United States Patent Application Publication US 2023/0026259 A1 - sequence listing, part 70

SEQ ID NO: 170689 - DNA, 966 bp, Homo sapiens
  Payload ID: 13597
  Gene Symbol: PRKCZ
  Gene Name: protein kinase C, zeta
  ENST ID: ENST00000486681
  CDS Start-End: 559-966
ggcaggacgcagcgggctggcctgcggggctcactgctgccccccggggccgagcacgaaagggagagttggagggcgcttcctcgccgggtgttgcggtgtgagcggggactggtgagtgtgtgctgtcttcagagagagaagagcagttttcaggaatctatctaccgccggggagccagaagatggaggaagctgtaccgtgccaacggccacctcttccaagccaagcgctttaacaggagagcgtactgcggtcagtgcagcgagaggatatggggcctcgcgaggcaaggctacaggtgcatcaactgcaaactgctggtccataagcgctgccacggcctcgtcccgctgacctgcaggaagcatatggcggaacccagaggcccttagaatggccccctgatgcttggttactgacaggatgcagctttgggacaggggagatgaccaagcattgtgcaaaatatcccgttgtataaagcacttggtggaaaggtcatggcctgcagtaccgagtggccacctccgtctgcagaatcataggattctgtcatgccttcccaagagcctccagtagacgacaagaacgaggacgccgaccttccttccgaggagacagatggaattgcttacatttcctcatcccggaagcatgacagcattaaagacgactcggaggaccttaagccagttatcgatgggatggatggaatcaaaatctctcaggggcttgggctgcaggactttgacctaatcagagtcatcgggcgcgggagctacgccaaggttctcctggtgcggttgaagaagaatgaccaaatttacgccatgaaagtggtgaagaaagagctggtgcatgatgacgaggatattgactgggtacagacagagaagcacgtgtttgagcaggcatccagcaaccccttcctggtcggattacactcctgcttccagacgaca

SEQ ID NO: 170690 - DNA, 690 bp, Homo sapiens
  Payload ID: 13597
  Gene Symbol: PRKCZ
  Gene Name: protein kinase C, zeta
  ENST ID: ENST00000468310
  CDS Start-End: 147-690
ggagttccgcggagttgaccgggtcggcgccgtcggtcctgagcgctgccttccgcgttccgccgcggccccacctggagcccccgccccgcgccatggccggagctcccggggcgcagcgctgacggcggcggggggagcgcgccatgcccagcaggaccggccccaagatggaagggagcggcggccgcgtccgcctcaaggcgcattacgggggggacatcttcatcaccagcgtggacgccgccacgaccttcgaggagctctgtgaggaagtgagagacatgtgtcgtctgcaccagcagcacccgctcaccctcaagtgggtggacagcgaagttttcccgagcacccctgagcagcctggcctgccatgtccgggagaagacaaatctatctaccgccggggagccagaagatggaggaagctgtaccgtgccaacggccacctcttccaagccaagcgctttaacaggagagcgtactgcggtcagtgcagcgagaggatatggggcctcgcgaggcaaggctacaggtgcatcaactgcaaactgctggtccataagcgctgccacggcctcgtcccgctgacctgcaggaagcatatggattctgtcatgccttcccaagagcctccagtagacgacaagaacgaggacgccgaccttccttccgaggagacagatggaa

SEQ ID NO: 170691 - DNA, 614 bp, Homo sapiens
  Payload ID: 13597
  Gene Symbol: PRKCZ
  Gene Name: protein kinase C, zeta
  ENST ID: ENST00000482686
  CDS Start-End: 396-614
agaacatcgctcggtgccagacaggcaggacgcagcgggctggcctgcggggctcactgctgccccccggggccgagcacgaaagggagagttggagggcgcttcctcgccgggtgttgcggtgtgagcggggactggtgagtgtgtgctgtcttcagagagagaagagcagttttcaggaatctatctaccgccggggagccagaagatggaggaagctgtaccgtgccaacggccacctcttccaagccaagcgctttaacaggagagcgtactgcggtcagtgcagcgagaggatatggggcctcgcgaggcaaggctacaggtgcatcaactgcaaactgctggtccataagcgctgccacggcctcgtcccgctgacctgcaggaagcatatggattctgtcatgccttcccaagagcctccagtagacgacaagaacgaggacgccgaccttccttccgaggagacagatggaattgcttacatttcctcatcccggaagcatgacagcattaaagacgactcggaggaccttaagccagttatcgatgggatggatggaatcaaaatctctcaggggcttgggctgcaggactttgacctaatcaga

SEQ ID NO: 170692 - DNA, 713 bp, Homo sapiens
  Payload ID: 13597
  Gene Symbol: PRKCZ
  Gene Name: protein kinase C, zeta
  ENST ID: ENST00000481140
  CDS Start-End: 74-295
atttggcaagagggaggctccgtggcacgatcacacgtgcaggagctgggggctgccagagcggctgttcaagatggacttggcaaatcacctctttcaagttgccggctacccggctgccgtagacagagtgaagtctggtagtttgtgtttatttatttatcttggccagcagagagaattgagtttgcatggagactgtaatttcattctaatctatctaccgccggggagccagaagatggaggaagctgtaccgtgccaacggccacctcttccaagccaagcgctttaacaggagagcgtactgcggtcagtgcagcgagaggatatggggcctcgcgaggcaaggctacaggtgcatcaactgcaaactgctggtccataagcgctgccacggcctcgtcccgctgacctgcaggaagcatatggattctgtcatgccttcccaagagcctccagtagacgacaagaacgaggacgccgaccttccttccgaggagacagatggaattgcttacatttcctcatcccggaagcatgacagcattaaagacgactcggaggaccttaagccagttatcgatgggatggatggaatcaaaatctctcaggggcttgggctgcaggactttgacctaatcagagtcatcgggcgcgggagctacgccaaggttctcctggtgcggttgaagaagaatgaccaaatttac

SEQ ID NO: 170693 - DNA, 1916 bp, Homo sapiens
  Payload ID: 13597
  Gene Symbol: PRKCZ
  Gene Name: protein kinase C, zeta
  Uniprot ID: Q05513
  ENST ID: ENST00000461106
  CDS Start-End: 269-1735
gtgctgcaggccctgtgcgtgcggaggacggtgcccgagtcagcattttgggtctgagtcccggcgttgccgctgcctgtgcgctgcacagatgctccgggcagcaacacggctggtgccacggcccggggaaggcgtgcggctgcagcagctcccagcaatgtcaggggaaacgcagtgagaggctgttgttttgcgggtgacagatttttagaaaaataaggctgtggagggaccttctgagcgaggcaggggctgctggagggacatgctcaccccgaggacggatgaatctatctaccgccggggagccagaagatggaggaagctgtaccgtgccaacggccacctcttccaagccaagcgctttaacaggagagcgtactgcggtcagtgcagcgagaggatatggggcctcgcgaggcaaggctacaggtgcatcaactgcaaactgctggtccataagcgctgccacggcctcgtcccgctgacctgcaggaagcatatggattctgtcatgccttcccaagagcctccagtagacgacaagaacgaggacgccgaccttccttccgaggagacagatggaattgcttacatttcctcatcccggaagcatgacagcattaaagacgactcggaggaccttaagccagttatcgatgggatggatggaatcaaaatctctcaggggcttgggctgcaggactttgacctaatcagagtcatcgggcgcgggagctacgccaaggttctcctggtgcggttgaagaagaatgaccaaatttacgccatgaaagtggtgaagaaagagctggtgcatgatgacgaggatattgactgggtacagacagagaagcacgtgtttgagcaggcatccagcaaccccttcctggtcggattacactcctgcttccagacgacaagtcggttgttcctggtcattgagtacgtcaacggcggggacctgatgttccacatgcagaggcagaggaagctccctgaggagcacgccaggttctacgcggccgagatctgcatcgccctcaacttcctgcacgagagggggatcatctacagggacctgaagctggacaacgtcctcctggatgcggacgggcacatcaagctcacagactacggcatgtgcaaggaaggcctgggccctggtgacacaacgagcactttctgcggaaccccgaattacatcgcccccgaaatcctgcggggagaggagtacgggttcagcgtggactggtgggcgctgggagtcctcatgtttgagatgatggccgggcgctccccgttcgacatcatcaccgacaacccggacatgaacacagaggactaccttttccaagtgatcctggagaagcccatccggatcccccggttcctgtccgtcaaagcctcccatgttttaaaaggatttttaaataaggaccccaaagagaggctcggctgccggccacagactggattttctgacatcaagtcccacgcgttcttccgcagcatagactgggacttgctggagaagaagcaggcgctccctccattccagccacagatcacagacgactacggtctggacaactttgacacacagttcaccagcgagcccgtgcagctgaccccagacgatgaggatgccataaagaggatcgaccagtcagagttcgaaggctttgagtatatcaacccattattgctgtccaccgaggagtcggtgtgaggccgcgtgcgtctctgtcgtggacacgcgtgattgaccctttaactgtatccttaaccaccgcatatgcatgccaggctgggcacggctccgagggcggccagggacagacgcttgcgccgagaccgcagagggaagcgtcagcgggcgctgctgggagcagaacagtccctcacacctg

SEQ ID NO: 170694 - DNA, 698 bp, Homo sapiens
  Payload ID: 13597
  Gene Symbol: PRKCZ
  Gene Name: protein kinase C, zeta
  ENST ID: ENST00000495347
  CDS Start-End: 636-698
gaggaggcagggatgtgaggggcgggggacaggacagccggccttccgttaaatatctgctcctcgcgctcgagcctccctgcctattgtcggggccggaggcgagccgacgcagcatcagctcgtcaacgggaaggaagatgcctccctgcacgcccgccgcgcacagagcataaagaatctgcgctgaggaggcaggagaagaaagccggagcggtgccgctggcctgtggcttctgcagggacaagtagtggctgtggccgggaggcgttcggcagctgtgcttcagccccggccccagcttcagctcttcgagttgctggcttctctaaggcctgtcctgaagtggcctggagactgctgagttacttctggaatctgcaccgtgaaagtgaaacctggaccatgatgtgaggctgaatctatctaccgccggggagccagaagatggaggaagctgtaccgtgccaacggccacctcttccaagccaagcgctttaacaggagagcgtactgcggtcagtgcagcgagaggatatggggcctcgcgaggcaaggctacaggtgcatcaactgcaaactgctggtccataagcgctgccacggcctcgtcccgctgacctgcaggaagcatatggattctgtcatgccttcccaagagcctccagtagacgacaagaacgaggacgccgacctt

SEQ ID NO: 170695 - DNA, 564 bp, Homo sapiens
  Payload ID: 13597
  Gene Symbol: PRKCZ
  Gene Name: protein kinase C, zeta
  ENST ID: ENST00000466352
  CDS Start-End: 490-564
gtcatgtgtaaatattgaggcccgtttgaactatccctgtgcggaaaaaaaggcctgtttttcacagggctgcctggggaggaggggggtggaaaggaaaacaggcaggggacagacggacccggcctgcgttggcctggggtgacttcacggctccactgtcagcaagcggccgtcccgtggtggatcctgtccgccctgcgaggacacctggctccatccacacctgggcctctgtctccagccgccgaggccgtgacaccatgaggatcataatctatctaccgccggggagccagaagatggaggaagctgtaccgtgccaacggccacctcttccaagccaagcgctttaacaggagagcgtactgcggtcagtgcagcgagaggatatggggcctcgcgaggcaaggctacaggtgcatcaactgcaaactgctggtccataagcgctgccacggcctcgtcccgctgacctgcaggaagcatatggattctgtcatgccttcccaagagcctccagtagacgacaagaacgaggacgccgaccttccttccgaggag

SEQ ID NO: 170696 - DNA, 480 bp, Homo sapiens
  Payload ID: 13597
  Gene Symbol: PRKCZ
  Gene Name: protein kinase C, zeta
  ENST ID: ENST00000461465
  CDS Start-End: 296-480
ggctcactccatcggggtcctcggatggtggcgaggagcggggctgcggcgtcctgttttctattctgaaatggttggagaatctatctaccgccggggagccagaagatggaggaagctgtaccgtgccaacggccacctcttccaagccaagcgctttaacaggagagcgtactgcggtcagtgcagcgagaggatatggggcctcgcgaggcaaggctacaggtgcatcaactgcaaactgctggtccataagcgctgccacggcctcgtcccgctgacctgcaggaagcatatggattctgtcatgccttcccaagagcctccagtagacgacaagaacgaggacgccgaccttccttccgaggagacagatggaattgcttacatttcctcatcccggaagcatgacagcattaaagacgactcggaggaccttaagccagttatcgatgggatggatggaatcaaaatctctca

SEQ ID NO: 170697 - DNA, 3726 bp, Homo sapiens
  Payload ID: 13598
  Gene Symbol: PRKD1
  Gene Name: protein kinase D1
  Uniprot ID: Q15139
  ENST ID: ENST00000331968
  CDS Start-End: 231-2969
tcctcccgcctcggccattttccctcctccccatctcctccccttagtcccctcccctcccgatcctcatccccttgccctcccccagcccagggacttttccggaaagtttttattttccgtctgggctctcggagaaagaagctcctggctcagcggctgcaaaactttcctgctgccgcgccgccagcccccgccctccgctgcccggccctgcgccccgccgagcgatgagcgcccctccggtcctgcggccgcccagtccgctgctgcccgtggcggcggcagctgccgcagcggccgccgcactggtcccagggtccgggcccgggcccgcgccgttcttggctcctgtcgcggccccggtcgggggcatctcgttccatctgcagatcggcctgagccgtgagccggtgctgctgctgcaggactcgtccggggactacagcctggcgcacgtccgcgagatggcttgctccattgtcgaccagaagttccctgaatgtggtttctacggaatgtatgataagatcctgctttttcgccatgaccctacctctgaaaacatccttcagctggtgaaagcggccagtgatatccaggaaggcgatcttattgaagtggtcttgtcagcttccgccacctttgaagactttcagattcgtccccacgctctctttgttcattcatacagagctccagctttctgtgatcactgtggagaaatgctgtgggggctggtacgtcaaggtcttaaatgtgaagggtgtggtctgaattaccataagagatgtgcatttaaaatacccaacaattgcagcggtgtgaggcggagaaggctctcaaacgtttccctcactggggtcagcaccatccgcacatcatctgctgaactctctacaagtgcccctgatgagccccttctgcaaaaatcaccatcagagtcgtttattggtcgagagaagaggtcaaattctcaatcatacattggacgaccaattcaccttgacaagattttgatgtctaaagttaaagtgccgcacacatttgtcatccactcctacacccggcccacagtgtgccagtactgcaagaagcttctgaaggggcttttcaggcagggcttgcagtgcaaagattgcagattcaactgccataaacgttgtgcaccgaaagtaccaaacaactgccttggcgaagtgaccattaatggagatttgcttagccctggggcagagtctgatgtggtcatggaagaagggagtgatgacaatgatagtgaaaggaacagtgggctcatggatgatatggaagaagcaatggtccaagatgcagagatggcaatggcagagtgccagaacgacagtggcgagatgcaagatccagacccagaccacgaggacgccaacagaaccatcagtccatcaacaagcaacaatatcccactcatgagggtagtgcagtctgtcaaacacacgaagaggaaaagcagcacagtcatgaaagaaggatggatggtccactacaccagcaaggacacgctgcggaaacggcactattggagattggatagcaaatgtattaccctctttcagaatgacacaggaagcaggtactacaaggaaattcctttatctgaaattttgtctctggaaccagtaaaaacttcagctttaattcctaatggggccaatcctcattgtttcgaaatcactacggcaaatgtagtgtattatgtgggagaaaatgtggtcaatccttccagcccatcaccaaataacagtgttctcaccagtggcgttggtgcagatgtggccaggatgtgggagatagccatccagcatgcccttatgcccgtcattcccaagggctcctccgtgggtacaggaaccaacttgcacagagatatctctgtgagtatttcagtatcaaattgccagattcaagaaaatgtggacatcagcacagtatatcagatttttcctgatgaagtactgggttctggacagtttggaattgtttatggaggaaaacatcgtaaaacaggaagagatgtagctattaaaatcattgacaaattacgatttccaacaaaacaagaaagccagcttcgtaatgaggttgcaattctacagaaccttcatcaccctggtgttgtaaatttggagtgtatgtttgagacgcctgaaagagtgtttgttgttatggaaaaactccatggagacatgctggaaatgatcttgtcaagtgaaaagggcaggttgccagagcacataacgaagtttttaattactcagatactcgtggctttgcggcaccttcattttaaaaatatcgttcactgtgacctcaaaccagaaaatgtgttgctagcctcagctgatccttttcctcaggtgaaactttgtgattttggttttgcccggatcattggagagaagtctttccggaggtcagtggtgggtacccccgcttacctggctcctgaggtcctaaggaacaagggctacaatcgctctctagacatgtggtctgttggggtcatcatctatgtaagcctaagcggcacattcccatttaatgaagatgaagacatacacgaccaaattcagaatgcagctttcatgtatccaccaaatccctggaaggaaatatctcatgaagccattgatcttatcaacaatttgctgcaagtaaaaatgagaaagcgctacagtgtggataagaccttgagccacccttggctacaggactatcagacctggttagatttgcgagagctggaatgcaaaatcggggagcgctacatcacccatgaaagtgatgacctgaggtgggagaagtatgcaggcgagcaggggctgcagtaccccacacacctgatcaatccaagtgctagccacagtgacactcctgagactgaagaaacagaaatgaaagccctcggtgagcgtgtcagcatcctctgagttccatctcctataatctgtcaaaacactgtggaactaataaatacatacggtcaggtttaacatttgccttgcagaactgccattattttctgtcagatgagaacaaagctgttaaactgttagcactgttgatgtatctgagttgccaagacaaatcaacagaagcatttgtattttgtgtgaccaactgtgttgtattaacaaaagttccctgaaacacgaaacttgttattgtgaatgattcatgttatatttaatgcattaaacctgtctccactgtgcctttgcaaatcagtgtttttcttactggagcttcattttggtaagagacagaatgtatctgtgaagtagttctgtttggtgtgtcccattggtgttgtcattgtaaacaaactcttgaagagtcgattatttccagtgttctatgaacaactccaaaacccatgtgggaaaaaaatgaatgaggagggtagggaataaaatcctaagacacaaatgcatgaacaagttttaatgtatagttttgaatcctttgcctgcctggtgtgcctcagtatatttaaactcaagacaatgcacctagctgtgcaagacctagtgctcttaagcctaaatgccttagaaatgtaaactgccatatataacagatacatttccctctttcttataatactctgttgtactatggaaaatcagctgctcagcaacctttcacctttgtgtatttttcaataataaaaaatattcttgtcaa

SEQ ID NO: 170698 - DNA, 3189 bp, Homo sapiens
  Payload ID: 13598
  Gene Symbol: PRKD1
  Gene Name: protein kinase D1
  ENST ID: ENST00000415220
  CDS Start-End: 131-2893
tccggaaagtttttattttccgtctgggctctcggagaaagaagctcctggctcagcggctgcaaaactttcctgctgccgcgccgccagcccccgccctccgctgcccggccctgcgccccgccgagcgatgagcgcccctccggtcctgcggccgcccagtccgctgctgcccgtggcggcggcagctgccgcagcggccgccgcactggtcccagggtccgggcccgggcccgcgccgttcttggctcctgtcgcggccccggtcgggggcatctcgttccatctgcagatcggcctgagccgtgagccggtgctgctgctgcaggactcgtccggggactacagcctggcgcacgtccgcgagatggcttgctccattgtcgaccagaagttccctgaatgtggtttctacggaatgtatgataagatcctgctttttcgccatgaccctacctctgaaaacatccttcagctggtgaaagcggccagtgatatccaggaaggcgatcttattgaagtggtcttgtcagcttccgccacctttgaagactttcagattcgtccccacgctctctttgttcattcatacagagctccagctttctgtgatcactgtggagaaatgctgtgggggctggtacgtcaaggtcttaaatgtgaagggtgtggtctgaattaccataagagatgtgcatttaaaatacccaacaattgcagcggtgtgaggcggagaaggctctcaaacgtttccctcactggggtcagcaccatccgcacatcatctgctgaactctctacaagtgcccctgatgagccccttctgtctcctgtgagtcctggctttgagcaaaaatcaccatcagagtcgtttattggtcgagagaagaggtcaaattctcaatcatacattggacgaccaattcaccttgacaagattttgatgtctaaagttaaagtgccgcacacatttgtcatccactcctacacccggcccacagtgtgccagtactgcaagaagcttctgaaggggcttttcaggcagggcttgcagtgcaaagattgcagattcaactgccataaacgttgtgcaccgaaagtaccaaacaactgccttggcgaagtgaccattaatggagatttgcttagccctggggcagagtctgatgtggtcatggaagaagggagtgatgacaatgatagtgaaaggaacagtgggctcatggatgatatggaagaagcaatggtccaagatgcagagatggcaatggcagagtgccagaacgacagtggcgagatgcaagatccagacccagaccacgaggacgccaacagaaccatcagtccatcaacaagcaacaatatcccactcatgagggtagtgcagtctgtcaaacacacgaagaggaaaagcagcacagtcatgaaagaaggatggatggtccactacaccagcaaggacacgctgcggaaacggcactattggagattggatagcaaatgtattaccctctttcagaatgacacaggaagcaggtactacaaggaaattcctttatctgaaattttgtctctggaaccagtaaaaacttcagctttaattcctaatggggccaatcctcattgtttcgaaatcactacggcaaatgtagtgtattatgtgggagaaaatgtggtcaatccttccagcccatcaccaaataacagtgttctcaccagtggcgttggtgcagatgtggccaggatgtgggagatagccatccagcatgcccttatgcccgtcattcccaagggctcctccgtgggtacaggaaccaacttgcacagagatatctctgtgagtatttcagtatcaaattgccagattcaagaaaatgtggacatcagcacagtatatcagatttttcctgatgaagtactgggttctggacagtttggaattgtttatggaggaaaacatcgtaaaacaggaagagatgtagctattaaaatcattgacaaattacgatttccaacaaaacaagaaagccagcttcgtaatgaggttgcaattctacagaaccttcatcaccctggtgttgtaaatttggagtgtatgtttgagacgcctgaaagagtgtttgttgttatggaaaaactccatggagacatgctggaaatgatcttgtcaagtgaaaagggcaggttgccagagcacataacgaagtttttaattactcagatactcgtggctttgcggcaccttcattttaaaaatatcgttcactgtgacctcaaaccagaaaatgtgttgctagcctcagctgatccttttcctcaggtgaaactttgtgattttggttttgcccggatcattggagagaagtctttccggaggtcagtggtgggtacccccgcttacctggctcctgaggtcctaaggaacaagggctacaatcgctctctagacatgtggtctgttggggtcatcatctatgtaagcctaagcggcacattcccatttaatgaagatgaagacatacacgaccaaattcagaatgcagctttcatgtatccaccaaatccctggaaggaaatatctcatgaagccattgatcttatcaacaatttgctgcaagtaaaaatgagaaagcgctacagtgtggataagaccttgagccacccttggctacaggactatcagacctggttagatttgcgagagctggaatgcaaaatcggggagcgctacatcacccatgaaagtgatgacctgaggtgggagaagtatgcaggcgagcaggggctgcagtaccccacacacctgatcaatccaagtgctagccacagtgacactcctgagactgaagaaacagaaatgaaagccctcggtgagcgtgtcagcatcctctgagttccatctcctataatctgtcaaaacactgtggaactaataaatacatacggtcaggtttaacatttgccttgcagaactgccattattttctgtcagatgagaacaaagctgttaaactgttagcactgttgatgtatctgagttgccaagacaaatcaacagaagcatttgtattttgtgtgaccaactgtgttgtattaacaaaagttccctgaaacacgaaacttgttattgtgaatgattcatgttatatttaatgcattaaacctgtctccactgtgcctttgcaaatc

SEQ ID NO: 170699 - DNA, 582 bp, Homo sapiens
  Payload ID: 13598
  Gene Symbol: PRKD1
  Gene Name: protein kinase D1
  ENST ID: ENST00000549503
  CDS Start-End: 231-582
tcttataccaatcagcctgtcaacttcagcaagagaccatacaagtggaaaagtaagacagtaagttggattaatcaagcagagaaaggagttgaaagccatagctgggtctgcaaactgaagccttctctaaattctcagaaattctggaagaaaatgttggaaattcctcaggaaatggaaagtttctcttgctgccatgatgtaagaagtgcctttcacctctcaccatgattctgagccctccccagccatgtggaactttccctgaatgtggtttctacggaatgtatgataagatcctgctttttcgccatgaccctacctctgaaaacatccttcagctggtgaaagcggccagtgatatccaggaaggcgatcttattgaagtggtcttgtcagcttccgccacctttgaagactttcagattcgtccccacgctctctttgttcattcatacagagctccagctttctgtgatcactgtggagaaatgctgtgggggctggtacgtcaaggtcttaaatgtgaagggtgtggtctgaattaccataagagatgtgcatttaaaatacccaaca

SEQ ID NO: 170700 - DNA, 585 bp, Homo sapiens
  Payload ID: 13598
  Gene Symbol: PRKD1
  Gene Name: protein kinase D1
  ENST ID: ENST00000546371
  CDS Start-End: 1-474
agcagcacagtcatgaaagaaggatggatggtccactacaccagcaaggacacgctgcggaaacggcactattggagattggatagcaaatgtattaccctctttcagaatgacacaggaagcaggtactacaaggaaattcctttatctgaaattttgtctctggaaccagtaaaaacttcagctttaattcctaatggggccaatcctcattgtttcgaaatcactacggcaaatgtagtgtattatgtgggagaaaatgtggtcaatccttccagcccatcaccaaataacagtgttctcaccagtggcgttggtgcagatgtggccaggatgtgggagatagccatccagcatgcccttatgcccgtcattcccaagggctcctccgtgggtacaggaaccaacttgcacagtgagtctgccagttttctaaccagcccaaagctcatcatgtgcctaccccttgcttagtaaacatgtgccctgcccttcctaagaacagaatgaagaaagacttcttggggatgacttagtttattgtagaatgtagggtgtctaaataaaagctgctgcacatactaa

SEQ ID NO: 170701 - DNA, 492 bp, Homo sapiens
  Payload ID: 13598
  Gene Symbol: PRKD1
  Gene Name: protein kinase D1
  ENST ID: ENST00000490795
  CDS Start-End: 1-243
gaggtcctaaggaacaagggctacaatcgctctctagacatgtggtctgttggggtcatcatctatgtaagcctaagcggcacattcccatttaatgaagatgaagacatacacgaccaaattcagaatgcagctttcatgtatccaccaaatccctggaaggaaatatctcatgaagatgttgacttgatacaatataatacctatatcttggggtgcttgagtagtcattgcactgcttgatcctcacagcaatcctctggtctcagttttcttttctgatatggtgatgctaattcctaccttactgggttattatatacaatatcaggacatgtaacttgttcatgttacagattgccatgaaaatagtgagaataagaaaagaagcacaagtatcttttttcaggaataaagaagaaacaactataaacaccagggaaatacaaaaagttgtataacaaagtcgtgtataataaagatgcaactaac

SEQ ID NO: 170702 - DNA, 3498 bp, Homo sapiens
  Payload ID: 13598
  Gene Symbol: PRKD1
  Gene Name: protein kinase D1
  Uniprot ID: Q15139
  ENST ID: ENST00000616995
  CDS Start-End: 1-2739
atgagcgcccctccggtcctgcggccgcccagtccgctgctgcccgtggcggcggcagctgccgcagcggccgccgcactggtcccagggtccgggcccgggcccgcgccgttcttggctcctgtcgcggccccggtcgggggcatctcgttccatctgcagatcggcctgagccgtgagccggtgctgctgctgcaggactcgtccggggactacagcctggcgcacgtccgcgagatggcttgctccattgtcgatcaaaagttccctgaatgtggtttctacggaatgtatgataagatcctgctttttcgccatgaccctacctctgaaaacatccttcagctggtgaaagcggccagtgatatccaggaaggcgatcttattgaagtggtcttgtcagcttccgccacctttgaagactttcagattcgtccccacgctctctttgttcattcatacagagctccagctttctgtgatcactgtggagaaatgctgtgggggctggtacgtcaaggtcttaaatgtgaagggtgtggtctgaattaccataagagatgtgcatttaaaatacccaacaattgcagcggtgtgaggcggagaaggctctcaaacgtttccctcactggggtcagcaccatccgcacatcatctgctgaactctctacaagtgcccctgatgagccccttctgcaaaaatcaccatcagagtcgtttattggtcgagagaagaggtcaaattctcaatcatacattggacgaccaattcaccttgacaagattttgatgtctaaagttaaagtgccgcacacatttgtcatccactcctacacccggcccacagtgtgccagtactgcaagaagcttctgaaggggcttttcaggcagggcttgcagtgcaaagattgcagattcaactgccataaacgttgtgcaccgaaagtaccaaacaactgccttggcgaagtgaccattaatggagatttgcttagccctggggcagagtctgatgtggtcatggaagaagggagtgatgacaatgatagtgaaaggaacagtgggctcatggatgatatggaagaagcaatggtccaagatgcagagatggcaatggcagagtgccagaacgacagtggcgagatgcaagatccagacccagaccacgaggacgccaacagaaccatcagtccatcaacaagcaacaatatcccactcatgagggtagtgcagtctgtcaaacacacgaagaggaaaagcagcacagtcatgaaagaaggatggatggtccactacaccagcaaggacacgctgcggaaacggcactattggagattggatagcaaatgtattaccctctttcagaatgacacaggaagcaggtactacaaggaaattcctttatctgaaattttgtctctggaaccagtaaaaacttcagctttaattcctaatggggccaatcctcattgtttcgaaatcactacggcaaatgtagtgtattatgtgggagaaaatgtggtcaatccttccagcccatcaccaaataacagtgttctcaccagtggcgttggtgcagatgtggccaggatgtgggagatagccatccagcatgcccttatgcccgtcattcccaagggctcctccgtgggtacaggaaccaacttgcacagagatatctctgtgagtatttcagtatcaaattgccagattcaagaaaatgtggacatcagcacagtatatcagatttttcctgatgaagtactgggttctggacagtttggaattgtttatggaggaaaacatcgtaaaacaggaagagatgtagctattaaaatcattgacaaattacgatttccaacaaaacaagaaagccagcttcgtaatgaggttgcaattctacagaaccttcatcaccctggtgttgtaaatttggagtgtatgtttgagacgcctgaaagagtgtttgttgttatggaaaaactccatggagacatgctggaaatgatcttgtcaagtgaaaagggcaggttgccagagcacataacgaagtttttaattactcagatactcgtggctttgcggcaccttcattttaaaaatatcgttcactgtgacctcaaaccagaaaatgtgttgctagcctcagctgatccttttcctcaggtgaaactttgtgattttggttttgcccggatcattggagagaagtctttccggaggtcagtggtgggtacccccgcttacctggctcctgaggtcctaaggaacaagggctacaatcgctctctagacatgtggtctgttggggtcatcatctatgtaagcctaagcggcacattcccatttaatgaagatgaagacatacacgaccaaattcagaatgcagctttcatgtatccaccaaatccctggaaggaaatatctcatgaagccattgatcttatcaacaatttgctgcaagtaaaaatgagaaagcgctacagtgtggataagaccttgagccacccttggctacaggactatcagacctggttagatttgcgagagctggaatgcaaaatcggggagcgctacatcacccatgaaagtgatgacctgaggtgggagaagtatgcaggcgagcaggggctgcagtaccccacacacctgatcaatccaagtgctagccacagtgacactcctgagactgaagaaacagaaatgaaagccctcggtgagcgtgtcagcatcctctgagttccatctcctataatctgtcaaaacactgtggaactaataaatacatacggtcaggtttaacatttgccttgcagaactgccattattttctgtcagatgagaacaaagctgttaaactgttagcactgttgatgtatctgagttgccaagacaaatcaacagaagcatttgtattttgtgtgaccaactgtgttgtattaacaaaagttccctgaaacacgaaacttgttattgtgaatgattcatgttatatttaatgcattaaacctgtctccactgtgcctttgcaaatcagtgtttttcttactggagcttcattttggtaagagacagaatgtatctgtgaagtagttctgtttggtgtgtcccattggtgttgtcattgtaaacaaactcttgaagagtcgattatttccagtgttctatgaacaactccaaaacccatgtgggaaaaaaatgaatgaggagggtagggaataaaatcctaagacacaaatgcatgaacaagttttaatgtatagttttgaatcctttgcctgcctggtgtgcctcagtatatttaaactcaagacaatgcacctagctgtgcaagacctagtgctcttaagcctaaatgccttagaaatgtaaactgccatatataacagatacatttccctctttcttataatactctgttgtactatggaaaatcagctgctcagcaacctttcacctttgtgtatttttcaataataaaaaatattcttgtcaaaa

SEQ ID NO: 170703 - DNA, 3070 bp, Homo sapiens
  Payload ID: 13599
  Gene Symbol: PRKD2
  Gene Name: protein kinase D2
  Uniprot ID: Q9BZL6
  ENST ID: ENST00000291281
  CDS Start-End: 227-2863
cttctgggagccctggattccgggcctctgacccactatagtgcctttctctccttcccaggaccccgccatcctcaggtcccctccgcctgccagatcttttctcggatccccgctctcccaccacctgctcacgagatcccgcggatctagaacccagggtcccccggggccccccggccgggtcccgggtgggctccaggcggccggtccccggcctccccccatggccaccgccccctcttatcccgccgggctccctggctctcccgggccggggtctcctccgccccccggcggcctagagctgcagtcgccgccaccgctactgccccagatcccggccccgggttccggggtctcctttcacatccagatcgggctgacccgcgagttcgtgctgttgcccgccgcctccgagctggctcatgtgaagcagctggcctgttccatcgtggaccagaagttccctgagtgtggcttctacggcctttacgacaagatcctgcttttcaaacatgaccccacgtcggccaacctcctgcagctggtgcgctcgtccggagacatccaggagggcgacctggtggaggtggtgctgtcggcctcggccaccttcgaggacttccagatccgcccgcacgccctcacggtgcactcctatcgggcgcctgccttctgtgatcactgcggggagatgctcttcggcctagtgcgccagggcctcaagtgcgatggctgcgggctgaactaccacaagcgctgtgccttcagcatccccaacaactgtagtggggcccgcaaacggcgcctgtcatccacgtctctggccagtggccactcggtgcgcctcggcacctccgagtccctgccctgcacggctgaagagctgagccgtagcaccaccgaactcctgcctcgccgtcccccgtcatcctcttcctcctcttctgcctcatcgtatacgggccgccccattgagctggacaagatgctgctctccaaggtcaaggtgccgcacaccttcctcatccacagctatacacggcccaccgtttgccaggcttgcaagaaactcctcaagggcctcttccggcagggcctgcaatgcaaagactgcaagtttaactgtcacaaacgctgcgccacccgcgtccctaatgactgcctgggggaggcccttatcaatggagatgtgccgatggaggaggccaccgatttcagcgaggctgacaagagcgccctcatggatgagtcagaggactccggtgtcatccctggctcccactcagagaatgcgctccacgccagtgaggaggaggaaggcgagggaggcaaggcccagagctccctggggtacatccccctaatgagggtggtgcaatcggtgcgacacacgacgcggaaatccagcaccacgctgcgggagggttgggtggttcattacagcaacaaggacacgctgagaaagcggcactattggcgcctggactgcaagtgtatcacgctcttccagaacaacacgaccaacagatactataaggaaattccgctgtcagaaatcctcacggtggagtccgcccagaacttcagccttgtgccgccgggcaccaacccacactgctttgagatcgtcactgccaatgccacctacttcgtgggcgagatgcctggcgggactccgggtgggccaagtgggcagggggctgaggccgcccggggctgggagacagccatccgccaggccctgatgcccgtcatccttcaggacgcacccagcgccccaggccacgcgccccacagacaagcttctctgagcatctctgtgtccaacagtcagatccaagagaatgtggacattgccactgtctaccagatcttccctgacgaagtgctgggctcagggcagtttggagtggtctatggaggaaaacaccggaagacaggccgggacgtggcagttaaggtcattgacaaactgcgcttccctaccaagcaggagagccagctccggaatgaagtggccattctgcagagcctgcggcatcccgggatcgtgaacctggagtgcatgttcgagacgcctgagaaagtgtttgtggtgatggagaagctgcatggggacatgttggagatgatcctgtccagtgagaagggccggctgcctgagcgcctcaccaagttcctcatcacccagatcctggtggctttgagacaccttcacttcaagaacattgtccactgtgacttgaaaccagaaaacgtgttgctggcatcagcagacccatttcctcaggtgaagctgtgtgactttggctttgctcgcatcatcggcgagaagtcgttccgccgctcagtggtgggcacgccggcctacctggcacccgaggtgctgctcaaccagggctacaaccgctcgctggacatgtggtcagtgggcgtgatcatgtacgtcagcctcagcggcaccttccctttcaacgaggatgaggacatcaatgaccagatccagaacgccgccttcatgtacccggccagcccctggagccacatctcagctggagccattgacctcatcaacaacctgctgcaggtgaagatgcgcaaacgctacagcgtggacaaatctctcagccacccctggttacaggagtaccagacgtggctggacctccgagagctggaggggaagatgggagagcgatacatcacgcatgagagtgacgacgcgcgctgggagcagtttgcagcagagcatccgctgcctgggtctgggctgcccacggacagggatctcggtggggcctgtccaccacaggaccacgacatgcaggggctggcggagcgcatcagtgttctctgaggtcctgtgccctcgtccagctgctgccctccacagcggttcttcacaggatcccagcaatgaactgttctagggaaagtggcttcctgcccaaactggatgggacacgtggggagtggggtggggggagctatttccaaggcccctccctgtttccccagcaattaaaacggactcatctctggccccatggccttgatctcagca

SEQ ID NO: 170704 - DNA, 3321 bp, Homo sapiens
  Payload ID: 13599
  Gene Symbol: PRKD2
  Gene Name: protein kinase D2
  Uniprot ID: Q9BZL6
  ENST ID: ENST00000433867
  CDS Start-End: 479-3115
actgtcgctccggacacttcctcctgggccgccgccgccgccgccgacttaaactttggagggggaaaaagagctactggcgcctggcgaccctccctgccccccacccaaccccgctccggcaacgcccccttcctcacggctcccgaccgaacttttctccaacttctgcgactcgtgagattcccttctacccactccggccctcgggacccctctgcccatcccctggccggtcgggtccctgcgaacccctttatctctggaatccactcggtccccgactcagagactcctgccctccacccccaaggaccccgccatcctcaggtcccctccgcctgccagatcttttctcggatccccgctctcccaccacctgctcacgagatcccgcggatctagaacccagggtcccccggggccccccggccgggtcccgggtgggctccaggcggccggtccccggcctccccccatggccaccgccccctcttatcccgccgggctccctggctctcccgggccggggtctcctccgccccccggcggcctagagctgcagtcgccgccaccgctactgccccagatcccggccccgggttccggggtctcctttcacatccagatcgggctgacccgcgagttcgtgctgttgcccgccgcctccgagctggctcatgtgaagcagctggcctgttccatcgtggaccagaagttccctgagtgtggcttctacggcctttacgacaagatcctgcttttcaaacatgaccccacgtcggccaacctcctgcagctggtgcgctcgtccggagacatccaggagggcgacctggtggaggtggtgctgtcggcctcggccaccttcgaggacttccagatccgcccgcacgccctcacggtgcactcctatcgggcgcctgccttctgtgatcactgcggggagatgctcttcggcctagtgcgccagggcctcaagtgcgatggctgcgggctgaactaccacaagcgctgtgccttcagcatccccaacaactgtagtggggcccgcaaacggcgcctgtcatccacgtctctggccagtggccactcggtgcgcctcggcacctccgagtccctgccctgcacggctgaagagctgagccgtagcaccaccgaactcctgcctcgccgtcccccgtcatcctcttcctcctcttctgcctcatcgtatacgggccgccccattgagctggacaagatgctgctctccaaggtcaaggtgccgcacaccttcctcatccacagctatacacggcccaccgtttgccaggcttgcaagaaactcctcaagggcctcttccggcagggcctgcaatgcaaagactgcaagtttaactgtcacaaacgctgcgccacccgcgtccctaatgactgcctgggggaggcccttatcaatggagatgtgccgatggaggaggccaccgatttcagcgaggctgacaagagcgccctcatggatgagtcagaggactccggtgtcatccctggctcccactcagagaatgcgctccacgccagtgaggaggaggaaggcgagggaggcaaggcccagagctccctggggtacatccccctaatgagggtggtgcaatcggtgcgacacacgacgcggaaatccagcaccacgctgcgggagggttgggtggttcattacagcaacaaggacacgctgagaaagcggcactattggcgcctggactgcaagtgtatcacgctcttccagaacaacacgaccaacagatactataaggaaattccgctgtcagaaatcctcacggtggagtccgcccagaacttcagccttgtgccgccgggcaccaacccacactgctttgagatcgtcactgccaatgccacctacttcgtgggcgagatgcctggcgggactccgggtgggccaagtgggcagggggctgaggccgcccggggctgggagacagccatccgccaggccctgatgcccgtcatccttcaggacgcacccagcgccccaggccacgcgccccacagacaagcttctctgagcatctctgtgtccaacagtcagatccaagagaatgtggacattgccactgtctaccagatcttccctgacgaagtgctgggctcagggcagtttggagtggtctatggaggaaaacaccggaagacaggccgggacgtggcagttaaggtcattgacaaactgcgcttccctaccaagcaggagagccagctccggaatgaagtggccattctgcagagcctgcggcatcccgggatcgtgaacctggagtgcatgttcgagacgcctgagaaagtgtttgtggtgatggagaagctgcatggggacatgttggagatgatcctgtccagtgagaagggccggctgcctgagcgcctcaccaagttcctcatcacccagatcctggtggctttgagacaccttcacttcaagaacattgtccactgtgacttgaaaccagaaaacgtgttgctggcatcagcagacccatttcctcaggtgaagctgtgtgactttggctttgctcgcatcatcggcgagaagtcgttccgccgctcagtggtgggcacgccggcctacctggcacccgaggtgctgctcaaccagggctacaaccgctcgctggacatgtggtcagtgggcgtgatcatgtacgtcagcctcagcggcaccttccctttcaacgaggatgaggacatcaatgaccagatccagaacgccgccttcatgtacccggccagcccctggagccacatctcagctggagccattgacctcatcaacaacctgctgcaggtgaagatgcgcaaacgctacagcgtggacaaatctctcagccacccctggttacaggagtaccagacgtggctggacctccgagagctggaggggaagatgggagagcgatacatcacgcatgagagtgacgacgcgcgctgggagcagtttgcagcagagcatccgctgcctgggtctgggctgcccacggacagggatctcggtggggcctgtccaccacaggaccacgacatgcaggggctggcggagcgcatcagtgttctctgaggtcctgtgccctcgtccagctgctgccctccacagcggttcttcacaggatcccagcaatgaactgttctagggaaagtggcttcctgcccaaactggatgggacacgtggggagtggggtggggggagctatttccaaggcccctccctgtttccccagcaattaaaacggactcatctctggccccatggccttgatctcagc

SEQ ID NO: 170705 - DNA, 456 bp, Homo sapiens
  Payload ID: 13599
  Gene Symbol: PRKD2
  Gene Name: protein kinase D2
  ENST ID: ENST00000597641
  CDS Start-End: 1-222
tccggggtctcctttcacatccagatcgggctgacccgcgagttcgtgctgttgcccgccgcctccgagctggctcatgtgaagcagctggcctgttccatcgtggaccagaagcctcggccaccttcgaggacttccagatccgcccgcacgccctcacggtgcactcctatcgggcgcctgccttctgtgatcactgcggggagatgctcttcggcctagtgcgccagggcctcaagtgcgatggctgcgggctgaactaccacaagcgctgtgccttcagcatccccaacaactgtagtggggcccgcaaacggcgcctgtcatccacgtctctggccagtggccactcggtgcgcctcggcacctccgagtccctgccctgcacggctgaagagctgagccgtagcaccaccgaactcctgcctcgccgtcccccgtcatcctcttcctcct

SEQ ID NO: 170706 - DNA, 2906 bp, Homo sapiens
  Payload ID: 13599
  Gene Symbol: PRKD2
  Gene Name: protein kinase D2
  Uniprot ID: Q9BZL6
  ENST ID: ENST00000601806
  CDS Start-End: 493-2658
gacttaaactttggagggggaaaaagagctactggcgcctggcgaccctccctgccccccacccaaccccgctccggcaacgcccccttcctcacggctcccgaccgaacttttctccaacttctgcgactcatcccggccccgggttccggggtctcctttcacatccagatcgggctgacccgcgagttcgtgctgttgcccgccgcctccgagctggctcatgtgaagcagctggcctgttccatcgtggaccagaagttccctgagtgtggcttctacggcctttacgacaagatcctgcttttcaaacatgaccccacgtcggccaacctcctgcagctggtgcgctcgtccggagacatccaggagggcgacctggtggaggtggtgctgtcggcctcggccaccttcgaggacttccagatccgcccgcacgccctcacggtgcactcctatcgggcgcctgccttctgtgatcactgcggggagatgctcttcggcctagtgcgccagggcctcaagtgcgatggctgcgggctgaactaccacaagcgctgtgccttcagcatccccaacaactgtagtggggcccgcaaacggcgcctgtcatccacgtctctggccagtggccactcggtgcgcctcggcacctccgagtccctgccctgcacggctgaagagctgagccgtagcaccaccgaactcctgcctcgccgtcccccgtcatcctcttcctcctcttctgcctcatcgtatacgggccgccccattgagctggacaagatgctgctctccaaggtcaaggtgccgcacaccttcctcatccacagctatacacggcccaccgtttgccaggcttgcaagaaactcctcaagggcctcttccggcagggcctgcaatgcaaagactgcaagtttaactgtcacaaacgctgcgccacccgcgtccctaatgactgcctgggggaggcccttatcaatggagatgtgccgatggaggaggccaccgatttcagcgaggctgacaagagcgccctcatggatgagtcagaggactccggtgtcatccctggctcccactcagagaatgcgctccacgccagtgaggaggaggaaggcgagggaggcaaggcccagagctccctggggtacatccccctaatgagggtggtgcaatcggtgcgacacacgacgcggaaatccagcaccacgctgcgggagggttgggtggttcattacagcaacaaggacacgctgagaaagcggcactattggcgcctggactgcaagtgtatcacgctcttccagaacaacacgaccaacagatactataaggaaattccgctgtcagaaatcctcacggtggagtccgcccagaacttcagccttgtgccgccgggcaccaacccacactgctttgagatcgtcactgccaatgccacctacttcgtgggcgagatgcctggcgggactccgggtgggccaagtgggcagggggctgaggccgcccggggctgggagacagccatccgccaggccctgatgcccgtcatccttcaggacgcacccagcgccccaggccacgcgccccacagacaagcttctctgagcatctctgtgtccaacagtcagatccaagagaatgtggacattgccactgtctaccagatcttccctgacgaagtgctgggctcagggcagtttggagtggtctatggaggaaaacaccggaagacaggccgggacgtggcagttaaggtcattgacaaactgcgcttccctaccaagcaggagagccagctccggaatgaagtggccattctgcagagcctgcggcatcccgggatcgtgaacctggagtgcatgttcgagacgcctgagaaagtgtttgtggtgatggagaagctgcatggggacatgttggagatgatcctgtccagtgagaagggccggctgcctgagcgcctcaccaagttcctcatcacccagatcctggtggctttgagacaccttcacttcaagaacattgtccactgtgacttgaaaccagaaaacgtgttgctggcatcagcagacccatttcctcaggtgaagctgtgtgactttggctttgctcgcatcatcggcgagaagtcgttccgccgctcagtggtgggcacgccggcctacctggcacccgaggtgctgctcaaccagggctacaaccgctcgctggacatgtggtcagtgggcgtgatcatgtacgtcagcctcagcggcaccttccctttcaacgaggatgaggacatcaatgaccagatccagaacgccgccttcatgtacccggccagcccctggagccacatctcagctggagccattgacctcatcaacaacctgctgcaggtgaagatgcgcaaacgctacagcgtggacaaatctctcagccacccctggttacaggagtaccagacgtggctggacctccgagagctggaggggaagatgggagagcgatacatcacgcatgagagtgacgacgcgcgctgggagcagtttgcagcagagcatccgctgcctgggtctgggctgcccacggacagggatctcggtggggcctgtccaccacaggaccacgacatgcaggggctggcggagcgcatcagtgttctctgaggtcctgtgccctcgtccagctgctgccctccacagcggttcttcacaggatcccagcaatgaactgttctagggaaagtggcttcctgcccaaactggatgggacacgtggggagtggggtggggggagctatttccaaggcccctccctgtttccccagcaattaaaacggactcatctctggccccatggccttgatctcagcacacggcactctcgaatcattactctgttgtaccaacatgga

SEQ ID NO: 170707 - DNA, 624 bp, Homo sapiens
  Payload ID: 13599
  Gene Symbol: PRKD2
  Gene Name: protein kinase D2
  ENST ID: ENST00000595132
  CDS Start-End: 422-624
atttcctgcccccaggcccccaaagctgaggacccagacacctgggtcctttgagcattgggtggcaggcgccctccttatctccagcgccctcgagtccaagtcccccggcccccccccccactttcccaggagccccgaaaagtcctccttccagctcgccccaccccagtgctgggcctggagccagttccctgagtgtggcttctacggcctttacgacaagatcctgcttttcaaacatgaccccacgtcggccaacctcctgcagctggtgcgctcgtccggagacatccaggagggcgacctggtggaggtggtgctgtcggcctcggccaccttcgaggacttccagatccgcccgcacgccctcacggtgcactcctatcgggcgcctgccttctgtgatcactgcggggagatgctcttcggcctagtgcgccagggcctcaagtgcgatggctgcgggctgaactaccacaagcgctgtgccttcagcatccccaacaactgtagtggggcccgcaaacggcgcctgtcatccacgtctctggccagtggccactcggtgcgcctcggcacctccgagtccctgccctgcacggctgaagagctggtgaggag

SEQ ID NO: 170708 - DNA, 536 bp, Homo sapiens
  Payload ID: 13599
  Gene Symbol: PRKD2
  Gene Name: protein kinase D2
  ENST ID: ENST00000601605
  CDS Start-End: 254-536
acatccctctcccgcccctcagttccctgagtgtggcttctacggcctttacgacaagatcctgcttttcaaacatgaccccacgtcggccaacctcctgcagctggtgcgctcgtccggagacatccaggagggcgacctggtggaggtggtgctgtcggcctcggccaccttcgaggacttccagatccgcccgcacgccctcacggtgcactcctatcgggcgcctgccttctgtgatcactgcggggagatgctcttcggcctagtgcgccagggcctcaagtgcgatgactgcaagtttaactgtcacaaacgctgcgccacccgcgtccctaatgactgcctgggggaggcccttatcaatggagatgtgccgatggaggaggccaccgatttcagcgaggctgacaagagcgccctcatggatgagtcagaggactccggtgtcatccctggctcccactcagagaatgcgctccacgccagtgaggaggaggaaggcgagggaggcaaggcccagagctccctggggt

SEQ ID NO: 170709 - DNA, 3012 bp, Homo sapiens
  Payload ID: 13599
  Gene Symbol: PRKD2
  Gene Name: protein kinase D2
  ENST ID: ENST00000595515
  CDS Start-End: 331-2997
gacacttcctcctgggccgccgccgccgccgccgacttaaactttggagggggaaaaagagctactggcgcctggcgaccctccctgccccccacccaaccccgctccggcaacgcccccttcctcacggctcccgaccgaacttttctccaacttctgcgactcgaccccgccatcctcaggtcccctccgcctgccagatcttttctcggatccccgctctcccaccacctgctcacgagatcccgcggatctagaacccagggtcccccggggccccccggccgggtcccgggtgggctccaggcggccggtccccggcctccccccatggccaccgccccctcttatcccgccgggctccctggctctcccgggccggggtctcctccgccccccggcggcctagagctgcagtcgccgccaccgctactgccccagatcccggccccgggttccggggtctcctttcacatccagatcgggctgacccgcgagttcgtgctgttgcccgccgcctccgagctggctcatgtgaagcagctggcctgttccatcgtggaccagaagttccctgagtgtggcttctacggcctttacgacaagatcctgcttttcaaacatgaccccacgtcggccaacctcctgcagctggtgcgctcgtccggagacatccaggagggcgacctggtggaggtggtgctgtcggcctcggccaccttcgaggacttccagatccgcccgcacgccctcacggtgcactcctatcgggcgcctgccttctgtgatcactgcggggagatgctcttcggcctagtgcgccagggcctcaagtgcgatggctgcgggctgaactaccacaagcgctgtgccttcagcatccccaacaactgtagtggggcccgcaaacggcgcctgtcatccacgtctctggccagtggccactcggtgcgcctcggcacctccgagtccctgccctgcacggctgaagagctgagccgtagcaccaccgaactcctgcctcgccgtcccccgtcatcctcttcctcctcttctgcctcatcgtatacgggccgccccattgagctggacaagatgctgctctccaaggtcaaggtgccgcacaccttcctcatccacagctatacacggcccaccgtttgccaggcttgcaagaaactcctcaagggcctcttccggcagggcctgcaatgcaaagactgcaagtttaactgtcacaaacgctgcgccacccgcgtccctaatgactgcctgggggaggcccttatcaatggagatgtgccgatggaggaggccaccgatttcagcgaggctgacaagagcgccctcatggatgagtcagaggactccggtgtcatccctggctcccactcagagaatgcgctccacgccagtgaggaggaggaaggcgagggaggcaaggcccagagctccctggggtacatccccctaatgagggtggtgcaatcggtgcgacacacgacgcggaaatccagcaccacgctgcgggagggttgggtggttcattacagcaacaaggacacgctgagaaagcggcactattggcgcctggactgcaagtgtatcacgctcttccagaacaacacgaccaacagatactataaggaaattccgctgtcagaaatcctcacggtggagtccgcccagaacttcagccttgtgccgccgggcaccaacccacactgctttgagatcgtcactgccaatgccacctacttcgtgggcgagatgcctggcgggactccgggtgggccaagtgggcagggggctgaggccgcccggggctgggagacagccatccgccaggccctgatgcccgtcatccttcaggacgcacccagcgccccaggccacgcgccccacagacaagcttctctgagcatctctgtgtccaacagtcagatccaagagaatgtggacattgccactgtctaccagatcttccctgacgaagtgctgggctcagggcagtttggagtggtctatggaggaaaacaccggaagacaggccgggacgtggcagttaaggtcattgacaaactgcgcttccctaccaagcaggagagccagctccggaatgaagtggccattctgcagagcctgcggcatcccgggatcgtgaacctggagtgcatgttcgagacgcctgagaaagtgtttgtggtgatggagaagctgcatggggacatgttggagatgatcctgtccagtgagaagggccggctgcctgagcgcctcaccaagttcctcatcacccagatcctggtggctttgagacaccttcacttcaagaacattgtccactgtgacttgaaaccagaaaacgtgttgctggcatcagcagacccatttcctcaggtgaagctgtgtgactttggctttgctcgcatcatcggcgagaagtcgttccgccgctcagtggtgggcacgccggcctacctggcacccgaggtgctgctcaaccagggctacaaccgctcgctggacatgtggtcagtgggcgtgatcatgtacgtcagcctcagcggcaccttccctttcaacgaggatgaggacatcaatgaccagatccagaacgccgccttcatgtacccggccagcccctggagccacatctcagctggaggtgcctggggcccgcctaccccatgggcggccattgacctcatcaacaacctgctgcaggtgaagatgcgcaaacgctacagcgtggacaaatctctcagccacccctggttacaggagtaccagacgtggctggacctccgagagctggaggggaagatgggagagcgatacatcacgcatgagagtgacgacgcgcgctgggagcagtttgcagcagagcatccgctgcctgggtctgggctgcccacggacagggatctcggtggggcctgtccaccacaggaccacgacatgcaggggctggcggagcgcatcagtgttctctgaggtcctgtgccctcg

SEQ ID NO: 170710 - DNA, 541 bp, Homo sapiens
  Payload ID: 13599
  Gene Symbol: PRKD2
  Gene Name: protein kinase D2
  ENST ID: ENST00000598633
  CDS Start-End: 486-541
acacttcctcctgggccgccgccgccgccgccgacttaaactttggagggggaaaaagagctactggcgcctggcgaccctccctgccccccacccaaccccgctccggcaacgcccccttcctcacggctcccgaccgaacttttctccaacttctgcgactcatcgggctgacccgcgagttcgtgctgttgcccgccgcctccgagctggctcatgtgaagcagctggcctgttccatcgtggaccagaagttccctgagtgtggcttctacggcctttacgacaagatcctgcttttcaaacatgaccccacgtcggccaacctcctgcagctggtgcgctcgtccggagacatccaggagggcgacctggtggaggtggtgctgtcggcctcggccaccttcgaggacttccagatccgcccgcacgccctcacggtgcactcctatcgggcgcctgccttctgtgatcactgcggggagatgctcttcggcctagtgcgccagggcctcaagtgcgatggctgcgggctgaacta

SEQ ID NO: 170711 - DNA, 2923 bp, Homo sapiens
  Payload ID: 13599
  Gene Symbol: PRKD2
  Gene Name: protein kinase D2
  Uniprot ID: Q9BZL6
  ENST ID: ENST00000600194
  CDS Start-End: 555-2720
gttcattcagcatcccctcccacctccgccaggttccggaaaattcgaggtgtccacgctcccggagccactctccctcccaccccagctcccccttccagccaccaaacccacgccggcgccccctccccgtacaattggggcgctggcatcctgcccggctcgcgctggggttgggagggggcaggcaggaagcgagggcctgcggggtctctgcgtttccgggggaaacagccggccctgccctgggagggtcacagtccgcccgctgctgaaggcggctctgagcttttccgtcgccacatccctctcccgcccctcagttccctgagtgtggcttctacggcctttacgacaagatcctgcttttcaaacatgaccccacgtcggccaacctcctgcagctggtgcgctcgtccggagacatccaggagggcgacctggtggaggtggtgctgtcggcctcggccaccttcgaggacttccagatccgcccgcacgccctcacggtgcactcctatcgggcgcctgccttctgtgatcactgcggggagatgctcttcggcctagtgcgccagggcctcaagtgcgatggctgcgggctgaactaccacaagcgctgtgccttcagcatccccaacaactgtagtggggcccgcaaacggcgcctgtcatccacgtctctggccagtggccactcggtgcgcctcggcacctccgagtccctgccctgcacggctgaagagctgagccgtagcaccaccgaactcctgcctcgccgtcccccgtcatcctcttcctcctcttctgcctcatcgtatacgggccgccccattgagctggacaagatgctgctctccaaggtcaaggtgccgcacaccttcctcatccacagctatacacggcccaccgtttgccaggcttgcaagaaactcctcaagggcctcttccggcagggcctgcaatgcaaagactgcaagtttaactgtcacaaacgctgcgccacccgcgtccctaatgactgcctgggggaggcccttatcaatggagatgtgccgatggaggaggccaccgatttcagcgaggctgacaagagcgccctcatggatgagtcagaggactccggtgtcatccctggctcccactcagagaatgcgctccacgccagtgaggaggaggaaggcgagggaggcaaggcccagagctccctggggtacatccccctaatgagggtggtgcaatcggtgcgacacacgacgcggaaatccagcaccacgctgcgggagggttgggtggttcattacagcaacaaggacacgctgagaaagcggcactattggcgcctggactgcaagtgtatcacgctcttccagaacaacacgaccaacagatactataaggaaattccgctgtcagaaatcctcacggtggagtccgcccagaacttcagccttgtgccgccgggcaccaacccacactgctttgagatcgtcactgccaatgccacctacttcgtgggcgagatgcctggcgggactccgggtgggccaagtgggcagggggctgaggccgcccggggctgggagacagccatccgccaggccctgatgcccgtcatccttcaggacgcacccagcgccccaggccacgcgccccacagacaagcttctctgagcatctctgtgtccaacagtcagatccaagagaatgtggacattgccactgtctaccagatcttccctgacgaagtgctgggctcagggcagtttggagtggtctatggaggaaaacaccggaagacaggccgggacgtggcagttaaggtcattgacaaactgcgcttccctaccaagcaggagagccagctccggaatgaagtggccattctgcagagcctgcggcatcccgggatcgtgaacctggagtgcatgttcgagacgcctgagaaagtgtttgtggtgatggagaagctgcatggggacatgttggagatgatcctgtccagtgagaagggccggctgcctgagcgcctcaccaagttcctcatcacccagatcctggtggctttgagacaccttcacttcaagaacattgtccactgtgacttgaaaccagaaaacgtgttgctggcatcagcagacccatttcctcaggtgaagctgtgtgactttggctttgctcgcatcatcggcgagaagtcgttccgccgctcagtggtgggcacgccggcctacctggcacccgaggtgctgctcaaccagggctacaaccgctcgctggacatgtggtcagtgggcgtgatcatgtacgtcagcctcagcggcaccttccctttcaacgaggatgaggacatcaatgaccagatccagaacgccgccttcatgtacccggccagcccctggagccacatctcagctggagccattgacctcatcaacaacctgctgcaggtgaagatgcgcaaacgctacagcgtggacaaatctctcagccacccctggttacaggagtaccagacgtggctggacctccgagagctggaggggaagatgggagagcgatacatcacgcatgagagtgacgacgcgcgctgggagcagtttgcagcagagcatccgctgcctgggtctgggctgcccacggacagggatctcggtggggcctgtccaccacaggaccacgacatgcaggggctggcggagcgcatcagtgttctctgaggtcctgtgccctcgtccagctgctgccctccacagcggttcttcacaggatcccagcaatgaactgttctagggaaagtggcttcctgcccaaactggatgggacacgtggggagtggggtggggggagctatttccaaggcccctccctgtttccccagcaattaaaacggactcatctctggccccatggccttgatctc

SEQ ID NO: 170712 - DNA, 1367 bp, Homo sapiens
  Payload ID: 13599
  Gene Symbol: PRKD2
  Gene Name: protein kinase D2
  ENST ID: ENST00000597390
  CDS Start-End: 1-461
gacaagcttctctgagcatctctgtgtccaacagtcagatccaagagaatgtggacattgccactgtctaccagatcttccctgacgaagtgctgggctcagggcagtttggagtggtctatggaggaaaacaccggaagacaggccgggacgtggcagttaaggtcattgacaaactgcgcttccctaccaagcaggagagccagctccggaatgaagtggccattctgcagagcctgcggcatcccgggatcgtgaacctggagtgcatgttcgagacgcctgagaaagtgtttgtggtgatggagaagctgcatggggacatgttggagatgatcctgtccagtgagaagggccggctgcctgagcgcctcaccaagttcctcatcacccagatttctgctttctgggctcttgcctgccccacacctaagccctgtgctaagccctttacctcctgagcttatgtaggcctcaccaccatcctaggagatcctggtggctttgagacaccttcacttcaagaacattgtccactgtgacttgaaaccagaaaacgtgttgctggcatcagcagacccatttcctcaggtgaagctgtgtgactttggctttgctcgcatcatcggcgagaagtcgttccgccgctcagtggtgggcacgccggcctacctggcacccgaggtgctgctcaaccagggctacaaccgctcgctggacatgtggtcagtgggcgtgatcatgtacgtcagcctcagcggcaccttccctttcaacgaggatgaggacatcaatgaccagatccagaacgccgccttcatgtacccggccagcccctggagccacatctcagctggagccattgacctcatcaacaacctgctgcaggtgaagatgcgcaaacgctacagcgtggacaaatctctcagccacccctggttacaggagtaccagacgtggctggacctccgagagctggaggggaagatgggagagcgatacatcacgcatgagagtgacgacgcgcgctgggagcagtttgcagcagagcatccgctgcctgggtctgggctgcccacggacagggatctcggtggggcctgtccaccacaggaccacgacatgcaggggctggcggagcgcatcagtgttctctgaggtcctgtgccctcgtccagctgctgccctccacagcggttcttcacaggatcccagcaatgaactgttctagggaaagtggcttcctgcccaaactggatgggacacgtggggagtggggtggggggagctatttccaaggcccctccctgtttccccagcaattaaaacggactcatctctggccccatggccttgatctcagcaca

SEQ ID NO: 170713 - DNA, 669 bp, Homo sapiens
  Payload ID: 13599
  Gene Symbol: PRKD2
  Gene Name: protein kinase D2
  ENST ID: ENST00000593363
  CDS Start-End: 464-669
acttcctcctgggccgccgccgccgccgccgacttaaactttggagggggaaaaagagctactggcgcctggcgaccctccctgccccccacccaaccccgctccggcaacgcccccttcctcacggctcccgaccgaacttttctccaacttctgcgactcgtgagattcccttctacccactccggccctcgggacccctctgcccatcccctggccggtcgggtccctgcgaacccctttatctctggaatccactcggtccccgactcagagactcctgccctccacccccaaggaccccgccatcctcaggtcccctccgcctgccagatcttttctcggatccccgctctcccaccacctgctcacgagatcccgcggatctagaacccagggtcccccggggccccccggccgggtcccgggtgggctccaggcggccggtccccggcctccccccatggccaccgccccctcttatcccgccgggctccctggctctcccgggccggggtctcctccgccccccggcggcctagagctgcagtcgccgccaccgctactgccccagatcccggccccgggttccggggtctcctttcacatccagatcgggctgacccgcgagttcgtgctgttgcccgccgcctccgagctggctcatgt

SEQ ID NO: 170714 - DNA, 5900 bp, Homo sapiens
  Payload ID: 13600
  Gene Symbol: PRKD3
  Gene Name: protein kinase D3
  Uniprot ID: O94806
  ENST ID: ENST00000234179
  CDS Start-End: 556-3228
aaagttcatccccccagaatgaaaatgaggacatttgagaaggtgatttaaggtgtggacatttgagaaggtgtcctatcaaattagtaaaccaaaggaaaagtactgaatagattaatccaaaacacttactgttttttaaacgaagaggatttcaccttgacagaaaaacaacttttattcaatatgtatttcctgaaattaaagagacaagtacagactgaaaggaaaatagattcgtaaataagctacgtcaactctatcctgctgaggatagctcagtgatgttaaatcctttacaaatccctggttgtcttcctacagacaagactgctttttgatgggactgatattaagagaaataggacctttggggcattcaactccttgataaaacttaaaagtatcggcatgagtggcttaacagaggaaataaagaagttttcaactaaatccaaaagtgcggtcattttctttactgctgttattttaaaaacctcttcataaccattgaaaaagaatcgacaactattttaaaagattaaagaaaggcagatgtctgcaaataattcccctccatcagcccagaagtctgtattacccacagctattcctgctgtgcttccagctgcttctccgtgttcaagtcctaagacgggactctctgcccgactctctaatggaagcttcagtgcaccatcactcaccaactccagaggctcagtgcatacagtttcatttctactgcaaattggcctcacacgggagagtgttaccattgaagcccaggaactgtctttatctgctgtcaaggatcttgtgtgctccatagtttatcaaaagtttccagagtgtggattctttggcatgtatgacaaaattcttctctttcgccatgacatgaactcagaaaacattttgcagctgattacctcagcagatgaaatacatgaaggagacctagtggaagtggttctttcagctttagccacagtagaagacttccagattcgtccacatactctctatgtacattcttacaaagctcctactttctgtgattactgtggtgagatgctctggggattggtacgtcaaggactgaaatgtgaaggctgtggattaaattaccataaacgatgtgccttcaagattccaaataactgtagtggagtaagaaagagacgtctgtcaaatgtatctttaccaggacccggcctctcagttccaagacccctacagcctgaatatgtagcccttcccagtgaagagtcacatgtccaccaggaaccaagtaagagaattccttcttggagtggtcgcccaatctggatggaaaagatggtaatgtgcagagtgaaagttccacacacatttgctgttcactcttacacccgtcccacgatatgtcagtactgcaagcggttactgaaaggcctctttcgccaaggaatgcagtgtaaagattgcaaattcaactgccataaacgctgtgcatcaaaagtaccaagagactgccttggagaggttactttcaatggagaaccttccagtctgggaacagatacagatataccaatggatattgacaataatgacataaatagtgatagtagtcggggtttggatgacacagaagagccatcacccccagaagataagatgttcttcttggatccatctgatctcgatgtggaaagagatgaagaagccgttaaaacaatcagtccatcaacaagcaataatattccgctaatgagggttgtacaatccatcaagcacacaaagaggaagagcagcacaatggtgaaggaagggtggatggtccattacaccagcagggataacctgagaaagaggcattattggagacttgacagcaaatgtctaacattatttcagaatgaatctggatcaaagtattataaggaaattccactttcagaaattctccgcatatcttcaccacgagatttcacaaacatttcacaaggcagcaatccacactgttttgaaatcattactgatactatggtatacttcgttggtgagaacaatggggacagctctcataatcctgttcttgctgccactggagttggacttgatgtagcacagagctgggaaaaagcaattcgccaagccctcatgcctgttactcctcaagcaagtgtttgcacttctccagggcaagggaaagatcacaaagatttgtctacaagtatctctgtatctaattgtcagattcaggagaatgtggatatcagtactgtttaccagatctttgcagatgaggtgcttggttcaggccagtttggcatcgtttatggaggaaaacatagaaagactgggagggatgtggctattaaagtaattgataagatgagattccccacaaaacaagaaagtcaactccgtaatgaagtggctattttacagaatttgcaccatcctgggattgtaaacctggaatgtatgtttgaaaccccagaacgagtctttgtagtaatggaaaagctgcatggagatatgttggaaatgattctatccagtgagaaaagtcggcttccagaacgaattactaaattcatggtcacacagatacttgttgctttgaggaatctgcattttaagaatattgtgcactgtgatttaaagccagaaaatgtgctgcttgcatcagcagagccatttcctcaggtgaagctgtgtgactttggatttgcacgcatcattggtgaaaagtcattcaggagatctgtggtaggaactccagcatacttagcccctgaagttctccggagcaaaggttacaaccgttccctagatatgtggtcagtgggagttatcatctatgtgagcctcagtggcacatttccttttaatgaggatgaagatataaatgaccaaatccaaaatgctgcatttatgtacccaccaaatccatggagagaaatttctggtgaagcaattgatctgataaacaatctgcttcaagtgaagatgagaaaacgttacagtgttgacaaatctcttagtcatccctggctacaggactatcagacttggcttgaccttagagaatttgaaactcgcattggagaacgttacattacacatgaaagtgatgatgctcgctgggaaatacatgcatacacacataaccttgtatacccaaagcacttcattatggctcctaatccagatgatatggaagaagatccttaatcactgagctaacctaaataaggaaggatttcattttatggactgatattttgctgtgtaacttgttctttgtagattgtcatctgcagtgctgcaaagatatgaagaaatatgataacgaataagtgacaccagtactgtagttcataatgagtaggtacaggcgggaaactgaataataagaagtcataatggaatcaaggtgaagctttttataaacttttttagcctaagcaataactggttttgtattttttcttaatccttcactttaatacaataggctcacttaatttgtcttcccatttctctttatatatatatatataaatataaatatatgtttgtttgtttttttaatgaaaaacaagtcaagctagcatccagttactatatagcttggctaaattatacaagacttacaagattgattactcgacaggcttgtatttaagaggtaactgtgaggttaccattatgtgatgttactataaggacttttaacattggtttaacaaaccatagaggcattgaagggtttttcttagatgcctagaaaaagcgcactgggctgttttacctttcttttttaggtcaatcaagactccaaaatagtgattcctaacctttttggagttgctctgctactctgaatatgttctatacagcataaggattgtcaccttctgtgtgttgcaacagcttctaagataattagggacaaatgatgttacaaaaggaagagtactgctggtctaagtgctgagttgtatgtctttgcatagctccactctgctgctaaatatgcatgttctgactgacaccatcttgatgccagtactggattccagcattcagcaggtgcagatctcggctttacacaatttatctttacctagggttcagtcagtaatttctgctttttagcagggccagtgcagggtcagttaatgctacagttactgtatagcaaacagtatccttttttctccttcccctagcctattgggctttgcagatatctggagtgttttaaagtcaattattttaagcagtttgaggggatgtgtaggagtggagcatgaaacagtttataaggctggggctgtattatcagcacagcaaattaaagaatgaaagaagtacttctttttacatttcagctccagcagccagctatttaaaaaatatttttaaatatcttccccaaagtttaagatgtgggaccatctacttgtaagaaacagtggcttatttcttcatttctcagtaatcattgtaaacctttttttttttcttctccactctaacaaaagtaaaagaacaaaacttttgctgaggtcttggactccactacttgttagttatgttggcctggacagatggcaggtctgtcggcagttcctcagtctgtaaaatgaagattatcattcttgcctctccctttgtcacagtgttgtcgtgaagatcagatatgtatgaatgcagtcaaataaactaaaaactaggaaagtgttaactatcgttgcccaccgaatttgaggtagcaaaaaaaaaaaagaatgttctggtacatgaacagactgagaaggcctttcgacatccctgaagctagtctcctgtctagactaaaaatatccttgaaagaatagtagcaaacagtatgcagtactcctgtgttctaagttcttttatgttttagtttaccctcacagcagccatagtgttaagtcattatgagcttcatcttaaagataagaaaactgaggcaaggggagattaacttactgccaaatttcaaacagttagtagtatttgagaccagtagtatggctctaatcttacccttagccctcccaaccattatgctgtactatctacccataaatacctccaggaaacattcccctcttggtaatttgtccttctatagaagcttcaaagattaaatcaaattaattttcaaaaaaaatttttttttagaaatgttattttccctgtgatagaggatgacttcccagtttcaccaaagtctgtttatatcaacacacacaaaatggaataattctgagtcactaggcaatcaatctactgtggttttactatgtaaggtgaaaattaactggaacgatgtttgtttgctatacttacatagtcaaactttacaagccatgaaattaattgcactctttgtatttgttgttaaatgcctaagaagttttctaaaaattttgtaaaggcactgtcagagaatctggagttgaatgattattccagatactgtataacctgcataactttttgtctttaagtcgtgtttgtaaaagaagtaattgctagaaacatttgataatgtacaaagtagtctataatgactgttcagtacatttttaatatttttttggttatatccaactttttgtaaatatactggaagcttgataataaaatgtatttcctatcaccatacttttccatgtgaaaacctgagcctatttctagtataagtatccaaagaaaagtttgacctggttgtgttattttaccagaccttggtaaaagaactattttggaaacagtatttgtaaatggaactaatgctatatttaaaaacactgatttttttttaacctgccaaaaataaaaaaaagctcattttataattttctact

SEQ ID NO: 170715 - DNA, 6111 bp, Homo sapiens
  Payload ID: 13600
  Gene Symbol: PRKD3
  Gene Name: protein kinase D3
  Uniprot ID: O94806
  ENST ID: ENST00000379066
  CDS Start-End: 764-3436
ctttgtggtctacagccacaccaccccaaatgtgcctgatcttgtctgatcttggaagctaagcattgttgggcctagttaggacctggataggagaaatcccttatggctaactatatgtcagaaagcatcagcttttctcgatggacccattcatctaatgaaatatgcctgtactattttaaaaagctttgtatttcgtcatagaaaagttcatccccccagaatgaaaatgaggacatttgagaaggtgatttaaggtgtggacatttgagaaggtgtcctatcaaattagtaaaccaaaggaaaagtactgaatagattaatccaaaacacttactgttttttaaacgaagaggatttcaccttgacagaaaaacaacttttattcaatatgtatttcctgaaattaaagagacaagtacagactgaaaggaaaatagattcgtaaataagctacgtcaactctatcctgctgaggatagctcagtgatgttaaatcctttacaaatccctggttgtcttcctacagacaagactgctttttgatgggactgatattaagagaaataggacctttggggcattcaactccttgataaaacttaaaagtatcggcatgagtggcttaacagaggaaataaagaagttttcaactaaatccaaaagtgcggtcattttctttactgctgttattttaaaaacctcttcataaccattgaaaaagaatcgacaactattttaaaagattaaagaaaggcagatgtctgcaaataattcccctccatcagcccagaagtctgtattacccacagctattcctgctgtgcttccagctgcttctccgtgttcaagtcctaagacgggactctctgcccgactctctaatggaagcttcagtgcaccatcactcaccaactccagaggctcagtgcatacagtttcatttctactgcaaattggcctcacacgggagagtgttaccattgaagcccaggaactgtctttatctgctgtcaaggatcttgtgtgctccatagtttatcaaaagtttccagagtgtggattctttggcatgtatgacaaaattcttctctttcgccatgacatgaactcagaaaacattttgcagctgattacctcagcagatgaaatacatgaaggagacctagtggaagtggttctttcagctttagccacagtagaagacttccagattcgtccacatactctctatgtacattcttacaaagctcctactttctgtgattactgtggtgagatgctctggggattggtacgtcaaggactgaaatgtgaaggctgtggattaaattaccataaacgatgtgccttcaagattccaaataactgtagtggagtaagaaagagacgtctgtcaaatgtatctttaccaggacccggcctctcagttccaagacccctacagcctgaatatgtagcccttcccagtgaagagtcacatgtccaccaggaaccaagtaagagaattccttcttggagtggtcgcccaatctggatggaaaagatggtaatgtgcagagtgaaagttccacacacatttgctgttcactcttacacccgtcccacgatatgtcagtactgcaagcggttactgaaaggcctctttcgccaaggaatgcagtgtaaagattgcaaattcaactgccataaacgctgtgcatcaaaagtaccaagagactgccttggagaggttactttcaatggagaaccttccagtctgggaacagatacagatataccaatggatattgacaataatgacataaatagtgatagtagtcggggtttggatgacacagaagagccatcacccccagaagataagatgttcttcttggatccatctgatctcgatgtggaaagagatgaagaagccgttaaaacaatcagtccatcaacaagcaataatattccgctaatgagggttgtacaatccatcaagcacacaaagaggaagagcagcacaatggtgaaggaagggtggatggtccattacaccagcagggataacctgagaaagaggcattattggagacttgacagcaaatgtctaacattatttcagaatgaatctggatcaaagtattataaggaaattccactttcagaaattctccgcatatcttcaccacgagatttcacaaacatttcacaaggcagcaatccacactgttttgaaatcattactgatactatggtatacttcgttggtgagaacaatggggacagctctcataatcctgttcttgctgccactggagttggacttgatgtagcacagagctgggaaaaagcaattcgccaagccctcatgcctgttactcctcaagcaagtgtttgcacttctccagggcaagggaaagatcacaaagatttgtctacaagtatctctgtatctaattgtcagattcaggagaatgtggatatcagtactgtttaccagatctttgcagatgaggtgcttggttcaggccagtttggcatcgtttatggaggaaaacatagaaagactgggagggatgtggctattaaagtaattgataagatgagattccccacaaaacaagaaagtcaactccgtaatgaagtggctattttacagaatttgcaccatcctgggattgtaaacctggaatgtatgtttgaaaccccagaacgagtctttgtagtaatggaaaagctgcatggagatatgttggaaatgattctatccagtgagaaaagtcggcttccagaacgaattactaaattcatggtcacacagatacttgttgctttgaggaatctgcattttaagaatattgtgcactgtgatttaaagccagaaaatgtgctgcttgcatcagcagagccatttcctcaggtgaagctgtgtgactttggatttgcacgcatcattggtgaaaagtcattcaggagatctgtggtaggaactccagcatacttagcccctgaagttctccggagcaaaggttacaaccgttccctagatatgtggtcagtgggagttatcatctatgtgagcctcagtggcacatttccttttaatgaggatgaagatataaatgaccaaatccaaaatgctgcatttatgtacccaccaaatccatggagagaaatttctggtgaagcaattgatctgataaacaatctgcttcaagtgaagatgagaaaacgttacagtgttgacaaatctcttagtcatccctggctacaggactatcagacttggcttgaccttagagaatttgaaactcgcattggagaacgttacattacacatgaaagtgatgatgctcgctgggaaatacatgcatacacacataaccttgtatacccaaagcacttcattatggctcctaatccagatgatatggaagaagatccttaatcactgagctaacctaaataaggaaggatttcattttatggactgatattttgctgtgtaacttgttctttgtagattgtcatctgcagtgctgcaaagatatgaagaaatatgataacgaataagtgacaccagtactgtagttcataatgagtaggtacaggcgggaaactgaataataagaagtcataatggaatcaaggtgaagctttttataaacttttttagcctaagcaataactggttttgtattttttcttaatccttcactttaatacaataggctcacttaatttgtcttcccatttctctttatatatatatatataaatataaatatatgtttgtttgtttttttaatgaaaaacaagtcaagctagcatccagttactatatagcttggctaaattatacaagacttacaagattgattactcgacaggcttgtatttaagaggtaactgtgaggttaccattatgtgatgttactataaggacttttaacattggtttaacaaaccatagaggcattgaagggtttttcttagatgcctagaaaaagcgcactgggctgttttacctttcttttttaggtcaatcaagactccaaaatagtgattcctaacctttttggagttgctctgctactctgaatatgttctatacagcataaggattgtcaccttctgtgtgttgcaacagcttctaagataattagggacaaatgatgttacaaaaggaagagtactgctggtctaagtgctgagttgtatgtctttgcatagctccactctgctgctaaatatgcatgttctgactgacaccatcttgatgccagtactggattccagcattcagcaggtgcagatctcggctttacacaatttatctttacctagggttcagtcagtaatttctgctttttagcagggccagtgcagggtcagttaatgctacagttactgtatagcaaacagtatccttttttctccttcccctagcctattgggctttgcagatatctggagtgttttaaagtcaattattttaagcagtttgaggggatgtgtaggagtggagcatgaaacagtttataaggctggggctgtattatcagcacagcaaattaaagaatgaaagaagtacttctttttacatttcagctccagcagccagctatttaaaaaatatttttaaatatcttccccaaagtttaagatgtgggaccatctacttgtaagaaacagtggcttatttcttcatttctcagtaatcattgtaaacctttttttttttcttctccactctaacaaaagtaaaagaacaaaacttttgctgaggtcttggactccactacttgttagttatgttggcctggacagatggcaggtctgtcggcagttcctcagtctgtaaaatgaagattatcattcttgcctctccctttgtcacagtgttgtcgtgaagatcagatatgtatgaatgcagtcaaataaactaaaaactaggaaagtgttaactatcgttgcccaccgaatttgaggtagcaaaaaaaaaaaagaatgttctggtacatgaacagactgagaaggcctttcgacatccctgaagctagtctcctgtctagactaaaaatatccttgaaagaatagtagcaaacagtatgcagtactcctgtgttctaagttcttttatgttttagtttaccctcacagcagccatagtgttaagtcattatgagcttcatcttaaagataagaaaactgaggcaaggggagattaacttactgccaaatttcaaacagttagtagtatttgagaccagtagtatggctctaatcttacccttagccctcccaaccattatgctgtactatctacccataaatacctccaggaaacattcccctcttggtaatttgtccttctatagaagcttcaaagattaaatcaaattaattttcaaaaaaaatttttttttagaaatgttattttccctgtgatagaggatgacttcccagtttcaccaaagtctgtttatatcaacacacacaaaatggaataattctgagtcactaggcaatcaatctactgtggttttactatgtaaggtgaaaattaactggaacgatgtttgtttgctatacttacatagtcaaactttacaagccatgaaattaattgcactctttgtatttgttgttaaatgcctaagaagttttctaaaaattttgtaaaggcactgtcagagaatctggagttgaatgattattccagatactgtataacctgcataactttttgtctttaagtcgtgtttgtaaaagaagtaattgctagaaacatttgataatgtacaaagtagtctataatgactgttcagtacatttttaatatttttttggttatatccaactttttgtaaatatactggaagcttgataataaaatgtatttcctatcaccatacttttccatgtgaaaacctgagcctatttctagtataagtatccaaagaaaagtttgacctggttgtgttattttaccagaccttggtaaaagaactattttggaaacagtatttgtaaatggaactaatgctatatttaaaaacactgatttttttttaacctgccaaaaataaaaaaaagctcattttataattttctactaaa

SEQ ID NO: 170716 - DNA, 518 bp, Homo sapiens
  Payload ID: 13600
  Gene Symbol: PRKD3
  Gene Name: protein kinase D3
  ENST ID: ENST00000443977
  CDS Start-End: 1-518
actgatactatggtatacttcgttggtgagaacaatggggacagctctcataatcctgttcttgctgccactggagttggacttgatgtagcacagagctgggaaaaagcaattcgccaagccctcatgcctgttactcctcaagcaagtgtttgcacttctccagggcaagggaaagatcacaaagatttgtctacaagtatctctgtatctaattgtcagattcaggagaatgtggatatcagtactgtttaccagatctttgcagatgaggtgcttggttcaggccagtttggcatcgtttatggagatttgtcagttttaagagtagttacatctctggaggacttcctgtcatcagaggaacaaagaactgtccgaggaaaacatagaaagactgggagggatgtggctattaaagtaattgataagatgagattccccacaaaacaagaaagtcaactccgtaatgaagtggctattttacagaatttgcaccatcctgggattgtaaacct

SEQ ID NO: 170717 - DNA, 555 bp, Homo sapiens
  Payload ID: 13600
  Gene Symbol: PRKD3
  Gene Name: protein kinase D3
  ENST ID: ENST00000452104
  CDS Start-End: 1-555
ctacaagtatctctgtatctaattgtcagattcaggagaatgtggatatcagtactgtttaccagatctttgcagatgaggtgcttggttcaggccagtttggcatcgtttatggaggaaaacatagaaagactgggagggatgtggctattaaagtaattgataagatgagattccccacaaaacaagaaagtcaactccgtaatgaagtggctattttacagatacttgttgctttgaggaatctgcattttaagaatattgtgcactgtgatttaaagccagaaaatgtgctgcttgcatcagcagagccatttcctcaggtgaagctgtgtgactttggatttgcacgcatcattggtgaaaagtcattcaggagatctgtggtaggaactccagcatacttagcccctgaagttctccggagcaaaggttacaaccgttccctagatatgtggtcagtgggagttatcatctatgtgagcctcagtggcacatttccttttaatgaggatgaagatataaatgaccaaatccaaaatgctgcatttatgt

SEQ ID NO: 170718 - DNA, 695 bp, Homo sapiens
  Payload ID: 13600
  Gene Symbol: PRKD3
  Gene Name: protein kinase D3
  ENST ID: ENST00000443187
  CDS Start-End: 153-695
ggagggagggaggaaggggcgccggaggcgggcgggatcctgcgaggcgcgtgaagcctcgctggcgcctcgtccggtactcagacgctggcgggcgcagtttctcacgacgggccgagcctgccacttttccagagtgtggattctttggcatgtatgacaaaattcttctctttcgccatgacatgaactcagaaaacattttgcagctgattacctcagcagatgaaatacatgaaggagacctagtggaagtggttctttcagctttagccacagtagaagacttccagattcgtccacatactctctatgtacattcttacaaagctcctactttctgtgattactgtggtgagatgctctggggattggtacgtcaaggactgaaatgtgaaggctgtggattaaattaccataaacgatgtgccttcaagattccaaataactgtagtggagtaagaaagagacgtctgtcaaatgtatctttaccaggacccggcctctcagttccaagacccctacagcctgaatatgtagcccttcccagtgaagagtcacatgtccaccaggaaccaagtaagagaattccttcttggagtggtcgcccaatctggatggaaaagatggtaatgtgcagagtgaaagttccacacacatttgctgttcactcttacacccgtcccacgatatgt

SEQ ID NO: 170719 - DNA, 2502 bp, Homo sapiens
  Payload ID: 13601
  Gene Symbol: PKDCC
  Gene Name: protein kinase domain containing, cytoplasmic
  Uniprot ID: Q504Y2
  ENST ID: ENST00000294964
  CDS Start-End: 181-1662
gaggcaagtgtcaggccgatgtgtcgcccgcgaggggccggggtcggggccgccggggccatgcgcgcgggctgggcagggggccggcggggcgcagagcggagccgcctcggagcctgagccgcccggggccggggccggggagccgcgcggggccggccggccggggggaggggagcgatgcggcgccggcgggcggcagtggccgcgggtttctgcgcctccttcctgctgggctccgtcctcaacgtgctcttcgctccgggctcggagcctccgaggccaggccagtcccctgagccttcgccggccccgggtccgggccgtcgcgggggccgcggggagctggcccggcagatccgggcgcgctacgaggaggtgcagcgctattcccgcgggggccccgggcccggggcgggccggccggagcggcggcgcctgatggacctggctccgggcgggcccggcctgccgcgcccccggcccccttgggcccggcccctgtccgacggcgccccaggctggcccccggctcccggcccaggctcccccggcccgggcccgcgcctgggctgcgccgcgcttcgcaacgtgtccggcgcgcagtacatgggctcaggctacaccaaggccgtgtaccgggtccgcctgcccggcggtgccgcggtggcgctcaaggcggtggactttagcggccacgatctgggcagctgcgtgcgcgagttcggggtacggaggggctgctatcggctggcggcccacaagctgcttaaggagatggtgctgctggagcggctgcggcaccccaacgtgctgcagctctatggctactgctaccaggacagcgaggacatcccagacaccctgaccaccatcacggagctgggcgcccctgtagaaatgatccagctgctgcaaacttcctgggaggatcgattccgaatctgcctgagcctgggccgcctcctccaccacctggcccactccccactgggctccgtcactctgctggacttccgccctcggcagtttgtgctggtggatggggagctcaaagtgacggacctggatgacgcacgtgtggaggagacgccgtgtgcaggcagcaccgactgcatactcgagtttccggccaggaacttcaccctgccctgctcagcccagggctggtgcgagggcatgaacgagaagcggaacctctataatgcctacaggtttttcttcacatacctcctgcctcacagtgccccgccttcactgcgtcctctgctggacagcatcgtcaacgccacaggagagctcgcctggggggtggacgagaccctggcccagctggagaaggtgctgcacctgtaccggagcgggcagtatctgcagaactccacggcaagcagcagtaccgagtaccagtgtatcccagacagcaccatcccccaggaagactaccgctgctggccatcctaccaccacgggagctgcctcctttcagtgttcaacctggctgaggctgtggatgtctgtgagagccatgcccagtgtcgggcctttgtggtcaccaaccagaccacctggacaggtcggcagctggtctttttcaagactggatggagccaagtggtccctgatcccaacaagaccacatatgtgaaggcctctggctgacctatctgagggctcggctgaccagctgactatcctcagcagctgggcttgcctgtggagggagtgacttgcactggcagcactgcatgtcacctgggaacccctgcagacaaagctaacatcccagacagacagatgtgaccaggacaaacgtgcaataatgccaaatgttaaaatgtgagtttaccagcctagctatgggactgctggctcctagtccaggaatcatgggggtatgactgcctctccaaccctgtgggctgtaagcaagctcaggctagtctccccactgggggctgtgcccctccctgggacggttccgtgggcagccccatcactgtgttcaatagtgtgagaatgtagctaaagcccctgctgctgctgctgcacatgccacagcaggcggtgggggctgcgtggggacaatccatcgtggagtgttctctcagcttaggtctggacaggagacttggcgggagatgctccaggatgtgggtgattctgtacctggggaggctatctctgacctcccgacaggggacactcccaggccagcccaggggtcaggggcagaggtgcacacctcagcatgagccaagactggggtcagggagcaggtgtggtttgagccaggacctggggcgggggtggggccggggcctttctgcctcatttgctttcaatgaaagcctcaaagcagccaaaaccaggctttcccccttcctcgagtttgaatatccagaatcttttgtacttcttgttggttaaattgtttatttttgtaaaaaataaaataaaattagttaataaaatgatgtttcacagcaaactcttccctaa

SEQ ID NO: 170720 - DNA, 1550 bp, Homo sapiens
  Payload ID: 13601
  Gene Symbol: PKDCC
  Gene Name: protein kinase domain containing, cytoplasmic
  ENST ID: ENST00000401498
  CDS Start-End: 157-702
cgcccgcgaggggccggggtcggggccgccggggccatgcgcgcgggctgggcagggggccggcggggcgcagagcggagccgcctcggagcctgagccgcccggggccggggccggggagccgcgcggggccggccggccggggggaggggagcgatgcggcgccggcgggcggcagtggccgcgggtttctgcgcctccttcctgctgggctccgtcctcaacgtgctcttcgctccgggctcggagcctccgaggccaggccagtcccctgagccttcgccggccccgggtccgggccgtcgcgggggccgcggggagctggcccggcagatccgggcgcgctacgaggaggctggcccccggctcccggcccaggctcccccggcccgggcccgcgcctgggctgcgccgcgcttcgcaacgtgtccggcgcgcagtacatgggctcaggctacaccaaggccgtgtaccgggtccgcctgcccggcggtgccgcggtggcgctcaaggcggtggactttagcggccacgatctgggcagctgcgtgcgcgagttcggggtacggaggggctgctatcggctggcggcccacaagctgcttaaggagatggtgctgctggagcggctgcggcaccccaacgtgctgcagctctatggctactgctaccaggacagcgaggacatcccagacaccctgaccaccatcacggagctgggcgcccctgtagaaatgatccagctgctgcaaacttcctgggaggatcgattccgaatctgcctgagcctgggccgcctcctccaccacctggcccactccccactgggctccgtcactctgctggacttccgccctcggcagtttgtgctggtggatggggagctcaaagtgacggacctggatgacgcacgtgtggaggagacgccgtgtgcaggcagcaccgactgcatactcgagtttccggccaggaacttcaccctgccctgctcagcccagggctggtgcgagggcatgaacgagaagcggaacctctataatgcctacaggtttttcttcacatacctcctgcctcacagtgccccgccttcactgcgtcctctgctggacagcatcgtcaacgccacaggagagctcgcctggggggtggacgagaccctggcccagctggagaaggtgctgcacctgtaccggagcgggcagtatctgcagaactccacggcaagcagcagtaccgagtaccagtgtatcccagacagcaccatcccccaggaagactaccgctgctggccatcctaccaccacgggagctgcctcctttcagtgttcaacctggctgaggctgtggatgtctgtgagagccatgcccagtgtcgggcctttgtggtcaccaaccagaccacctggacaggtcggcagctggtctttttcaagactggatggagccaagtggtccctgatcccaacaagaccacatatgtgaaggcctctggctgacctatctgagggctcggctgaccagctgactatcctcagcagctgggcttgcct

SEQ ID NO: 170721 - DNA, 3069 bp, Homo sapiens
  Payload ID: 13602
  Gene Symbol: PKN1
  Gene Name: protein kinase N1
  Uniprot ID: Q16512
  ENST ID: ENST00000242783
  CDS Start-End: 166-2994
cggcggcctggccaggcgaggcgggagccgagcaggccggagcgggccgcgcgccggggagggtcgcgccgcgcccgccccctccccgccacgcccggggcgcacgcgcgctcctctggccgcccctccctccgcgcggggacccctggcgggcggcaggaggacatggccagcgacgccgtgcagagtgagcctcgcagctggtccctgctagagcagctgggcctggccggggcagacctggcggcccccggggtacagcagcagctggagctggagcgggagcggctgcggcgggaaatccgcaaggagctgaagctgaaggagggtgctgagaacctgcggcgggccaccactgacctgggccgcagcctgggccccgtagagctgctgctgcggggctcctcgcgccgcctcgacctgctgcaccagcagctgcaggagctgcacgcccacgtggtgcttcccgacccggcggccacccacgatggcccccagtcccctggtgcgggtggccccacctgctcggccaccaacctgagccgcgtggcgggcctggagaagcagttggccattgagctgaaggtgaagcagggggcggagaacatgatccagacctacagcaatggcagcaccaaggaccggaagctgctgctgacagcccagcagatgttgcaggacagtaagaccaagattgacatcatccgcatgcaactccgccgggcgctgcaggccggccagctggagaaccaggcagccccggatgacacccaagggagtcctgacctgggggctgtggagctgcgcatcgaagagctgcggcaccacttccgagtggagcacgcggtggccgagggtgccaagaacgtactgcgcctgctcagcgctgccaaggccccggaccgcaaggcagtcagcgaggcccaggagaaattaacagaatccaaccagaagctggggctgctgcgggaggctctggagcggagacttggggagctgcccgccgaccaccccaaggggcggctgctgcgagaagagctcgctgcggcctcctccgctgccttcagcacccgcctggccgggccctttcccgccacgcactacagcaccctgtgcaagcccgcgccgctcacagggaccctggaggtacgagtggtgggctgcagagacctcccagagaccatcccgtggaaccctaccccctcaatggggggacctgggaccccagacagccgcccccccttcctgagccgcccagcccggggcctttacagccgaagcggaagcctcagtggccggagcagcctcaaagcagaagccgagaacaccagtgaagtcagcactgtgcttaagctggataacacagtggtggggcagacgtcttggaagccatgtggccccaatgcctgggaccagagcttcactctggagctggaaagggcacgggaactggagttggctgtgttctggcgggaccagcggggcctgtgtgccctcaaattcctgaagttggaggatttcttggacaatgagaggcatgaggtgcagctggacatggaaccccagggctgcctggtggctgaggtcaccttccgcaaccctgtcattgagaggattcctcggctccgacggcagaagaaaattttctccaagcagcaagggaaggcgttccagcgtgctaggcagatgaacatcgatgtcgccacgtgggtgcggctgctccggaggctcatccccaatgccacgggcacaggcacctttagccctggggcttctccaggatccgaggcccggaccacgggtgacatatcggtggagaagctgaacctcggcactgactcggacagctcacctcagaagagctcgcgggatcctccttccagcccatcgagcctgagctcccccatccaggaatccactgctcccgagctgccttcggagacccaggagaccccaggccccgccctgtgcagccctctgaggaagtcacctctgaccctcgaagatttcaagttcctggcggtgctgggccggggtcattttgggaaggtgctcctctccgaattccggcccagtggggagctgttcgccatcaaggctctgaagaaaggggacattgtggcccgagacgaggtggagagcctgatgtgtgagaagcggatattggcggcagtgaccagtgcgggacaccccttcctggtgaacctcttcggctgtttccagacaccggagcacgtgtgcttcgtgatggagtactcggccggtggggacctgatgctgcacatccacagcgacgtgttctctgagccccgtgccatcttttattccgcctgcgtggtgctgggcctacagtttcttcacgaacacaagatcgtctacagggacctgaagttggacaatttgctcctggacaccgagggctacgtcaagatcgcagactttggcctctgcaaggaggggatgggctatggggaccggaccagcacattctgtgggaccccggagttcctggcccctgaggtgctgacggacacgtcgtacacgcgagctgtggactggtggggactgggtgtgctgctctacgagatgctggttggcgagtccccattcccaggggatgatgaggaggaggtcttcgacagcatcgtcaacgacgaggttcgctacccccgcttcctgtcggccgaagccatcggcatcatgagaaggctgcttcggaggaacccagagcggaggctgggatctagcgagagagatgcagaagatgtgaagaaacagcccttcttcaggactctgggctgggaagccctgttggcccggcgcctgccaccgccctttgtgcccacgctgtccggccgcaccgacgtcagcaacttcgacgaggagttcaccggggaggcccccacactgagcccgccccgcgacgcgcggcccctcacagccgcggagcaggcagccttcctggacttcgacttcgtggccgggggctgctagccccctcccctgcccctgcccctgcccctgcccgagagctcttagtttttaaaaaggcctttgggatttgccgga

SEQ ID NO: 170722 - DNA, 2960 bp, Homo sapiens
  Payload ID: 13602
  Gene Symbol: PKN1
  Gene Name: protein kinase N1
  Uniprot ID: Q16512
  ENST ID: ENST00000342216
  CDS Start-End: 32-2878
aagagggcggggccctcagcccggacccaggatggcggaggccaataacccctcggagcaggagctggagagtgagcctcgcagctggtccctgctagagcagctgggcctggccggggcagacctggcggcccccggggtacagcagcagctggagctggagcgggagcggctgcggcgggaaatccgcaaggagctgaagctgaaggagggtgctgagaacctgcggcgggccaccactgacctgggccgcagcctgggccccgtagagctgctgctgcggggctcctcgcgccgcctcgacctgctgcaccagcagctgcaggagctgcacgcccacgtggtgcttcccgacccggcggccacccacgatggcccccagtcccctggtgcgggtggccccacctgctcggccaccaacctgagccgcgtggcgggcctggagaagcagttggccattgagctgaaggtgaagcagggggcggagaacatgatccagacctacagcaatggcagcaccaaggaccggaagctgctgctgacagcccagcagatgttgcaggacagtaagaccaagattgacatcatccgcatgcaactccgccgggcgctgcaggccggccagctggagaaccaggcagccccggatgacacccaagggagtcctgacctgggggctgtggagctgcgcatcgaagagctgcggcaccacttccgagtggagcacgcggtggccgagggtgccaagaacgtactgcgcctgctcagcgctgccaaggccccggaccgcaaggcagtcagcgaggcccaggagaaattaacagaatccaaccagaagctggggctgctgcgggaggctctggagcggagacttggggagctgcccgccgaccaccccaaggggcggctgctgcgagaagagctcgctgcggcctcctccgctgccttcagcacccgcctggccgggccctttcccgccacgcactacagcaccctgtgcaagcccgcgccgctcacagggaccctggaggtacgagtggtgggctgcagagacctcccagagaccatcccgtggaaccctaccccctcaatggggggacctgggaccccagacagccgcccccccttcctgagccgcccagcccggggcctttacagccgaagcggaagcctcagtggccggagcagcctcaaagcagaagccgagaacaccagtgaagtcagcactgtgcttaagctggataacacagtggtggggcagacgtcttggaagccatgtggccccaatgcctgggaccagagcttcactctggagctggaaagggcacgggaactggagttggctgtgttctggcgggaccagcggggcctgtgtgccctcaaattcctgaagttggaggatttcttggacaatgagaggcatgaggtgcagctggacatggaaccccagggctgcctggtggctgaggtcaccttccgcaaccctgtcattgagaggattcctcggctccgacggcagaagaaaattttctccaagcagcaagggaaggcgttccagcgtgctaggcagatgaacatcgatgtcgccacgtgggtgcggctgctccggaggctcatccccaatgccacgggcacaggcacctttagccctggggcttctccaggatccgaggcccggaccacgggtgacatatcggtggagaagctgaacctcggcactgactcggacagctcacctcagaagagctcgcgggatcctccttccagcccatcgagcctgagctcccccatccaggaatccactgctcccgagctgccttcggagacccaggagaccccaggccccgccctgtgcagccctctgaggaagtcacctctgaccctcgaagatttcaagttcctggcggtgctgggccggggtcattttgggaaggtgctcctctccgaattccggcccagtggggagctgttcgccatcaaggctctgaagaaaggggacattgtggcccgagacgaggtggagagcctgatgtgtgagaagcggatattggcggcagtgaccagtgcgggacaccccttcctggtgaacctcttcggctgtttccagacaccggagcacgtgtgcttcgtgatggagtactcggccggtggggacctgatgctgcacatccacagcgacgtgttctctgagccccgtgccatcttttattccgcctgcgtggtgctgggcctacagtttcttcacgaacacaagatcgtctacagggacctgaagttggacaatttgctcctggacaccgagggctacgtcaagatcgcagactttggcctctgcaaggaggggatgggctatggggaccggaccagcacattctgtgggaccccggagttcctggcccctgaggtgctgacggacacgtcgtacacgcgagctgtggactggtggggactgggtgtgctgctctacgagatgctggttggcgagtccccattcccaggggatgatgaggaggaggtcttcgacagcatcgtcaacgacgaggttcgctacccccgcttcctgtcggccgaagccatcggcatcatgagaaggctgcttcggaggaacccagagcggaggctgggatctagcgagagagatgcagaagatgtgaagaaacagcccttcttcaggactctgggctgggaagccctgttggcccggcgcctgccaccgccctttgtgcccacgctgtccggccgcaccgacgtcagcaacttcgacgaggagttcaccggggaggcccccacactgagcccgccccgcgacgcgcggcccctcacagccgcggagcaggcagccttcctggacttcgacttcgtggccgggggctgctagccccctcccctgcccctgcccctgcccctgcccgagagctcttagtttttaaaaaggcctttgggatttgccggatccttgc

SEQ ID NO: 170723 - DNA, 899 bp, Homo sapiens
  Payload ID: 13602
  Gene Symbol: PKN1
  Gene Name: protein kinase N1
  ENST ID: ENST00000586557
  CDS Start-End: 133-899
gtcgcgccgcgcccgccccctccccgccacgcccggggcgcacgcgcgctcctctggccgcccctccctccgcgcggggacccctggcgggcggcaggaggacatggccagcgacgccgtgcagtcctgctgatggcctgccggccttgccgaggagctgggcgtatctggtgttgccgatcacacaagagtgagcctcgcagctggtccctgctagagcagctgggcctggccggggcagacctggcggcccccggggtacagcagcagctggagctggagcgggagcggctgcggcgggaaatccgcaaggagctgaagctgaaggagggtgctgagaacctgcggcgggccaccactgacctgggccgcagcctgggccccgtagagctgctgctgcggggctcctcgcgccgcctcgacctgctgcaccagcagctgcaggagctgcacgcccacgtggtgcttcccgacccggcggccacccacgatggcccccagtcccctggtgcgggtggccccacctgctcggccaccaacctgagccgcgtggcgggcctggagaagcagttggccattgagctgaaggtgaagcagggggcggagaacatgatccagacctacagcaatggcagcaccaaggaccggaagctgctgctgacagcccagcagatgttgcaggacagtaagaccaagattgacatcatccgcatgcaactccgccgggcgctgcaggccggccagctggagaaccaggcagccccggatgacacccaaggtgaagtcagcactgtgcttaagctggataacacagtggtggggcagacgtcttggaagccatgtggccccaatgcctgggaccagagcttcactctggagctggaaagggcacgggaact

SEQ ID NO: 170724 - DNA, 867 bp, Homo sapiens
  Payload ID: 13602
  Gene Symbol: PKN1
  Gene Name: protein kinase N1
  ENST ID: ENST00000591461
  CDS Start-End: 1-597
ccaggccccgccctgtgcagccctctgaggaagtcacctctgaccctcgaagatttcaagttcctggcggtgctgggccggggtcattttgggaaggtgctcctctccgaattccggcccagtggggagctgttcgccatcaaggctctgaagaaaggggacattgtggcccgagacgaggtggagagcctgatgtgtgagaagcggatattggcggcagtgaccagtgcgggacaccccttcctggtgaacctcttcggctgtttccagacaccggagcacgtgtgcttcgtgatggagtactcggccggtggggacctgatgctgcacatccacagcgacgtgttctctgagccccgtgccatcttttattccgcctgcgtggtgctgggcctacagtttcttcacgaacacaagatcgtctacagggacctgaagttggacaatttgctcctggacaccgagggctacgtcaagatcgcagactttggcctctgcaaggaggggatgggctatggggaccggaccagcacattctgtgggaccccggagttcgctacccccgcttcctgtcggccgaagccatcggcatcatgagaaggctgcttcggaggaacccagagcggaggctgggatctagcgagagagatgcagaagatgtgaagaaacagcccttcttcaggactctgggctgggaagccctgttggcccggcgcctgccaccgccctttgtgcccacgctgtccggccgcaccgacgtcagcaacttcgacgaggagttcaccggggaggcccccacactgagcccgccccgcgacgcgcggcccctcacagccgcggagcaggcagccttcctggacttcgact

SEQ ID NO: 170725 - DNA, 848 bp, Homo sapiens
  Payload ID: 13602
  Gene Symbol: PKN1
  Gene Name: protein kinase N1
  ENST ID: ENST00000590097
  CDS Start-End: 59-848
cggggacccctggcgggcggcaggaggacatggccagcgacgccgtgcagtcctgctgatggcctgccggccttgccgaggagctgggcgtatctggtgttgccgatcacacaagagtgagcctcgcagctggtccctgctagagcagctgggcctggccggggcagacctggcggcccccggggtacagcagcagctggagctggagcgggagcggctgcggcgggaaatccgcaaggagctgaagctgaaggagggtgctgagaacctgcggcgggccaccactgacctgggccgcagcctgggccccgtagagctgctgctgcggggctcctcgcgccgcctcgacctgctgcaccagcagctgcaggagctgcacgcccacgtggtgcttcccgacccggcggccacccacgatggcccccagtcccctggtgcgggtggccccacctgctcggccaccaacctgagccgcgtggcgggcctggagaagcagttggccattgagctgaaggtgaagcagggggcggagaacatgatccagacctacagcaatggcagcaccaaggaccggaagctgctgctgacagcccagcagatgttgcaggacagtaagaccaagattgacatcatccgcatgcaactccgccgggcgctgcaggccggccagctggagaaccaggcagccccggatgacacccaagggagtcctgacctgggggctgtggagctgcgcatcgaagagctgcggcaccacttccgagtggagcacgcggtggccgagggtgccaagaacgtactgcgcctgctcagcgctgccaaggccccggaccgcaaggcagtcagcg

SEQ ID NO: 170726 - DNA, 529 bp, Homo sapiens
  Payload ID: 13602
  Gene Symbol: PKN1
  Gene Name: protein kinase N1
  ENST ID: ENST00000586237
  CDS Start-End: 1-454
tgggtgcggctgctccggaggctcatccccaatgccacgggcacaggcacctttagccctggggcttctccaggatccgaggcccggaccacgggtgacatatcggtggagaagctgaacctcggcactgactcggacagctcacctcagaagagctcgcgggatcctccttccagcccatcgagcctgagctcccccatccaggaatccactgctcccgagctgccttcggagacccaggagaccccaggccccgccctgtgcagccctgttggcccggcgcctgccaccgccctttgtgcccacgctgtccggccgcaccgacgtcagcaacttcgacgaggagttcaccggggaggcccccacactgagcccgccccgcgacgcgcggcccctcacagccgcggagcaggcagccttcctggacttcgacttcgtggccgggggctgctagccccctcccctgcccctgcccctgcccctgcccgagagctcttagtttttaaaaaggcctttgggatttgccgga

SEQ ID NO: 170727 - DNA, 582 bp, Homo sapiens
  Payload ID: 13602
  Gene Symbol: PKN1
  Gene Name: protein kinase N1
  ENST ID: ENST00000585619
  CDS Start-End: 539-582
aaaggcctccgccgctctcggcttgaacgcgtggaaccgttctcctcgggttcccgcgcgctccaatgggggacccctcggcagcgtgcggtcgtctcgggacccggaaagaggaaagagtgagcctcgcagctggtccctgctagagcagctgggcctggccggggcagacctggcggcccccggggtacagcagcagctggagctggagcgggagcggctgcggcgggaaatccgcaaggagctgaagctgaaggagggtgctgagaacctgcggcgggccaccactgacctgggccgcagcctgggccccgtagagctgctgctgcggggctcctcgcgccgcctcgacctgctgcaccagcagctgcaggagctgcacgcccacgtggtgcttcccgacccggcggccacccacgatggcccccagtcccctggtgcgggtggccccacctgctcggccaccaacctgagccgcgtggcgggcctggagaagcagttggccattgagctgaaggtgaagcagggggcggagaacatgatccagacctacagcaatggcagcaccaaggaccggaagct

SEQ ID NO: 170728 - DNA, 677 bp, Homo sapiens
  Payload ID: 13602
  Gene Symbol: PKN1
  Gene Name: protein kinase N1
  ENST ID: ENST00000592960
  CDS Start-End: 1-677
gaacccagagcggaggctgggatctagcgagagagatgcagaagatgtgaagaaacagcccttcttcaggccagggtctcgctctgtcgcccaggctggagtgcagtggctcaatctcggctcactgcaacctccgcctcccaggttcatgcagttctcctgcctcagcctcccgagtacctgggattacaggcgtgcaccactccaccacaccaggctaatttttgtatttttagtagagacggggtttcgccatgttggccaggctggtcctgaactcctggcctcaagtgatcctcccgcctcggcctcccgaagtgctgggattacaggcctgagccaccacgccgggcctccacttttcctaatccggcttctccaccaggctctcgcagactctgggctgggaagccctgttggcccggcgcctgccaccgccctttgtgcccacgctgtccggccgcaccgacgtcagcaacttcgacgaggagttcaccggggaggcccccacactgagcccgccccgcgacgcgcggcccctcacagccgcggagcaggcagccttcctggacttcgacttcgtggccgggggctgctagccccctcccctgcccctgcccctgcccctgcccgagagctcttagtttttaaaaaggcctttgggatttgccggatcc

SEQ ID NO: 170729 - DNA, 2632 bp, Homo sapiens
  Payload ID: 13603
  Gene Symbol: PKN2
  Gene Name: protein kinase N2
  ENST ID: ENST00000316005
  CDS Start-End: 360-2174
gcttttgcgacgcggtgacagccaaatggtgcgacaggaggagctgcagccgcggccgcagcgcccgcacggagaggcttgaggcggctcctggcgtcgcccagagggagcgactagacgaacagtccggtgagggcggcgagaggaagcccgctacgagtgccctagctccccgccgctctcgatgaaccggacggaataagccgcgcctccagcaggggctgcgcctccatgaatccctagttgtttttttttttttctttctctcccctctcctcacccccaccccgagccccgtcccgccttctcccttcgccagaggcggccgcgtccaggtgcggagtccataccggagcgcaatggcgtccaaccccgaacggggggagattctgctcacggaactgcagggggattcccgaagtcttccgttttctgagaatgtgagtgctgttcaaaaattagacttttcagatacaatggtgcagcagaaattggatgatatcaaggatcgaattaagagagaaataaggaaagaactgaaaatcaaagaaggagctgaaaatctgaggaaagtcacaacagataaaaaaagtttggcttatgtagacaacattttgaaaaaatcaaataaaaaattagaagaactacatcacaagctgcaggaattaaatgcacatattgttgtatcagatccagaagatattacagattgcccaaggactccagatactccaaataatgaccctcgttgttctactagcaacaatagattgaaggccttacaaaaacaattggatatagaacttaaagtaaaacaaggtgcagagaatatgatacagatgtattcaaatggatcttcaaaggatcggaaactccatggtacagctcagcaactgctccaggacagcaagacaaaaatagaagtcatacgaatgcagattcttcaggcagtccagactaatgaattggcttttgataatgcaaaacctgtgataagtcctcttgaacttcggatggaagaattaaggcatcattttaggatagagtttgcagtagcagaaggtgcaaagaatgtaatgaaattacttggctcaggaaaagtaacagacagaaaagcactttcagaagctcaagcaagatttaatgaatcaagtcagaagttggaccttttaaagtattcattagagcaaagattaaacgaagtccccaagaatcatcccaaaagcaggattattattgaagaactttcacttgttgctgcatcaccaacactaagtccacgtcaaagtatgatatctacgcaaaatcaatatagtacactatccaaaccagcagcactaacaggtactttggaagttcgtcttatgggctgccaagatatcctagagaatgtccctggacggtcaaaagcaacatcagttgcactgcctggttggagtccaagtgaaaccagatcatctttcatgagcagaacgagtaaaagtaaaagcggaagtagtcgaaatcttctaaaaaccgatgacttgtccaatgatgtctgtgctgttttgaagctcgataatactgtggttggccaaactagctggaaacccatttccaatcagtcatgggaccagaagtttacactggaactggacaggtcacgtgaactggaaatttcagtttattggcgtgattggcggtctctgtgtgctgtaaaatttctgaggttagaagattttttagacaaccaacggcatggcatgtgtctctatttggaaccacagggtactttatttgcagaggttaccttttttaatccagttattgaaagaagaccaaaacttcaaagacaaaagaaaattttttcaaagcaacaaggcaaaacatttctcagagctcctcaaatgaatattaatattgccacttggggaaggctagtaagaagagctattcctacagtaaatcattctggcaccttcagccctcaagctcctgtgcctactacagtgccagtggttgatgtacgcatccctcaactagcacctccagctaggtatgtgtctgagattttaagcatctcttatacaaagttattgggacattcttacgtactgattatagcaggtgtactgagtcttgcttttttcccaagtagtattttgaaagtagtgttctgtttacttaaaaagtaaattgtttgctttaattttaaagctgtttaaaatacagactttctattactgttttggtgagttactttatcttctataagtgattctacagtaaccaaattggactttgatcttgagcctgaacctcctccagccccaccacgagcttcttctcttggagaaatagatgaatcttctgaattaagagttttggatataccaggacaggcaagccattttaaaccttgcataattcctcttcactgaatgaattagcaataaaagcatcatagtgaataaggcgtgtctttccatttaaaattgccactgaactgtgaatttatggttttttgtttgttttttgtttttgtttttgttttttgagacagagtttcactcttgttacccaggctggagtgcaatggcatgatctcggctcactgcaacctccgcctcccggattcaagcgattctcctgc

SEQ ID NO: 170730 - DNA, 2298 bp, Homo sapiens
  Payload ID: 13603
  Gene Symbol: PKN2
  Gene Name: protein kinase N2
  ENST ID: ENST00000370505
  CDS Start-End: 502-1464
gtccaggtgcggagtccataccggagcgcaatggcgtccaaccccgaacggggggagattctgctcacggaactgcagggggattcccgaagtcttccgttttctgagaatgtgagtgctgttcaaaaattagacttttcagatacaatggtgcagcagaaattggatgatatcaaggatcgaattaagagagaaataaggaaagaactgaaaatcaaagaaggagctgaaaatctgaggaaagtcacaacagataaaaaaagtttggcttatgtagacaacattttgaaaaaatcaaataaaaaattagaagaactacatcacaagctgcaggaattaaatgcacatattgttgtatcagatccagaagatattacagattgcccaaggactccagatactccaaataatgaccctcgttgttctactagcaacaatagattgaaggccttacaaaaacaattggatatagaacttaaagtaaaacaaggtgcagagaatatgatacagatgtattcaaatggatcttcaaaggatcggaaactccatggtacagctcagcaactgctccaggacagcaagacaaaaatagaagtcatacgaatgcagattcttcaggcagtccagactaatgaattggcttttgataatgcaaaacctgtgataagtcctcttgaacttcggatggaagaattaaggcatcattttaggatagagtttgcagtagcagaaggtgcaaagaatgtaatgaaattacttggctcaggaaaagtaacagacagaaaagcactttcagaagctcaagcaagatttaatgaatcaagtcagaagttggaccttttaaagtattcattagagcaaagattaaacgaagtccccaagaatcatcccaaaagcaggattattattgaagaactttcacttgttgctgcatcaccaacactaagtccacgtcaaagtatgatatctacgcaaaatcaatatagtacactatccaaaccagcagcactaacaggtactttggaagttcgtcttatgggctgccaagatatcctagagaatgtccctggacggtcaaaagcaacatcagttgcactgcctggttggagtccaagtgaaaccagatcatctttcatgagcagaacgagtaaaagtaaaagcggaagtagtcgaaatcttctaaaaaccgatgacttgtccaatgatgtctgtgctgttttgaagctcgataatactgtggttggccaaactagctggaaacccatttccaatcagtcatgggaccagaagtttacactggaactggacaggtcacgtgaactggaaatttcagtttattggcgtgattggcggtctctgtgtaaaatttctgaggttagaagattttttagacaaccaacggcatggcatgtgtctctatttggaaccacagggtactttatttgcagaggttaccttttttaatccagttattgaaagaagaccaaaacttcaaagacaaaagaaaattttttcaaagcaacaaggcaaaacatttctcagagctcctcaaatgaatattaatattgccacttggggaaggctagtaagaagagctattcctacagtaaatcattctggcaccttcagccctcaagctcctgtgcctactacagtgccagtggttgatgtacgcatccctcaactagcacctccagctaggtatgtgtctgagattttaagcatctcttatacaaagttattgggacattcttacgtactgattatagcaggtgtactgagtcttgcttttttcccaagtagtattttgaaagtagtgttctgtttacttaaaaagtaaattgtttgctttaattttaaagctgtttaaaatacagactttctattactgttttggtgagttactttatcttctataagtgattctacagtaaccaaattggactttgatcttgagcctgaacctcctccagccccaccacgagcttcttctcttggagaaatagatgaatcttctgaattaagagttttggatataccaggacaggcaagccattttaaaccttgcataattcctcttcactgaatgaattagcaataaaagcatcatagtgaataaggcgtgtctttccatttaaaattgccactgaactgtgaatttatggttttttgtttgttttttgtttttgtttttgttttttgagacagagtttcactcttgttacccaggctggagtgcaatggcatgatctcggctcactgcaacctccgcctcccggattcaagcgattctcctgc

SEQ ID NO: 170731 - DNA, 2890 bp, Homo sapiens
  Payload ID: 13603
  Gene Symbol: PKN2
  Gene Name: protein kinase N2
  Uniprot ID: Q16513
  ENST ID: ENST00000370513
  CDS Start-End: 9-2819
ggagcgcaatggcgtccaaccccgaacggggggagattctgctcacggaactgcagggggattcccgaagtcttccgttttctgagaatgtgagtgctgttcaaaaattagacttttcagatacaatggtgcagcagaaattggatgatatcaaggatcgaattaagagagaaataaggaaagaactgaaaatcaaagaaggagctgaaaatctgaggaaagtcacaacagataaaaaaagtttggcttatgtagacaacattttgaaaaaatcaaataaaaaattagaagaactacatcacaagctgcaggaattaaatgcacatattgttgtatcagatccagaagatattacagattgcccaaggactccagatactccaaataatgaccctcgttgttctactagcaacaatagattgaaggccttacaaaaacaattggatatagaacttaaagtaaaacaaggtgcagagaatatgatacagatgtattcaaatggatcttcaaaggatcggaaactccatggtacagctcagcaactgctccaggacagcaagacaaaaatagaagtcatacgaatgcagattcttcaggcagtccagactaatgaattggcttttgataatgcaaaacctgtgataagtcctcttgaacttcggatggaagaattaaggcatcattttaggatagagtttgcagtagcagaaggtgcaaagaatgtaatgaaattacttggctcaggaaaagtaacagacagaaaagcactttcagaagctcaagcaagatttaatgaatcaagtcagaagttggaccttttaaagtattcattagagcaaagattaaacgaagtccccaagaatcatcccaaaagcaggattattattgaagaactttcacttgttgctgcatcaccaacactaagtccacgtcaaagtatgatatctacgcaaaatcaatatagtacactatccaaaccagcagcactaacaggtactttggaagttcgtcttatgggctgccaagatatcctagagaatgtccctggacggtcaaaagcaacatcagttgcactgcctggttggagtccaagtgaaaccagatcatctttcatgagcagaacgagtaaaagtaaaagcggaagtagtcgaaatcttctaaaaaccgatgacttgtccaatgatgtctgtgctgttttgaagctcgataatactgtggttggccaaactagctggaaacccatttccaatcagtcatgggaccagaagtttacactggaactggacagggttaccttttttaatccagttattgaaagaagaccaaaacttcaaagacaaaagaaaattttttcaaagcaacaaggcaaaacatttctcagagctcctcaaatgaatattaatattgccacttggggaaggctagtaagaagagctattcctacagtaaatcattctggcaccttcagccctcaagctcctgtgcctactacagtgccagtggttgatgtacgcatccctcaactagcacctccagctagtgattctacagtaaccaaattggactttgatcttgagcctgaacctcctccagccccaccacgagcttcttctcttggagaaatagatgaatcttctgaattaagagttttggatataccaggacaggattcagagactgtttttgatattcagaatgacagaaatagtatacttccaaaatctcaatctgaatacaagcctgatactcctcagtcaggcctagaatatagtggtattcaagaacttgaggacagaagatctcagcaaaggtttcagtttaatctacaagatttcaggtgttgtgctgtcttgggaagaggacattttggaaaggtgcttttagctgaatataaaaacacaaatgagatgtttgctataaaagccttaaagaaaggagatattgtggctcgagatgaagtagacagcctgatgtgtgaaaaaagaatttttgaaactgtgaatagtgtaaggcatccctttttggtgaacctttttgcatgtttccaaaccaaagagcatgtttgctttgtaatggaatatgctgccggtggggacctaatgatgcacattcatactgatgtcttttctgaaccaagagctgtattttatgctgcttgtgtagttcttgggttgcagtatttacatgaacacaaaattgtttatagagatttgaaattggataacttattgctagatacagagggctttgtgaaaattgctgattttggtctttgcaaagaaggaatgggatatggagatagaacaagcacattttgtggcactcctgaatttcttgccccagaagtattaacagaaacttcttatacaagggctgtagattggtggggccttggcgtgcttatatatgaaatgcttgttggtgagtctccctttcctggtgatgatgaagaggaagtttttgacagtattgtaaatgatgaagtaaggtatccaaggttcttatctacagaagccatttctataatgagaaggctgttaagaagaaatcctgaacggcgccttggggctagcgagaaagatgcagaggatgtaaaaaagcacccatttttccggctaattgattggagcgctctgatggacaaaaaagtaaagccaccatttatacctaccataagaggacgagaagatgttagtaattttgatgatgaatttacctcagaagcacctattctgactccacctcgagaaccaaggatactttcggaagaggagcaggaaatgttcagagattttgactacattgctgattggtgttaagttgctagacactgcgaaaccaagctgactcacaagaagacctcttaaaaatagcaacccttcatttgctc

SEQ ID NO: 170732 - DNA, 6121 bp, Homo sapiens
  Payload ID: 13603
  Gene Symbol: PKN2
  Gene Name: protein kinase N2
  Uniprot ID: Q16513
  ENST ID: ENST00000370521
  CDS Start-End: 360-3314
gcttttgcgacgcggtgacagccaaatggtgcgacaggaggagctgcagccgcggccgcagcgcccgcacggagaggcttgaggcggctcctggcgtcgcccagagggagcgactagacgaacagtccggtgagggcggcgagaggaagcccgctacgagtgccctagctccccgccgctctcgatgaaccggacggaataagccgcgcctccagcaggggctgcgcctccatgaatccctagttgtttttttttttttctttctctcccctctcctcacccccaccccgagccccgtcccgccttctcccttcgccagaggcggccgcgtccaggtgcggagtccataccggagcgcaatggcgtccaaccccgaacggggggagattctgctcacggaactgcagggggattcccgaagtcttccgttttctgagaatgtgagtgctgttcaaaaattagacttttcagatacaatggtgcagcagaaattggatgatatcaaggatcgaattaagagagaaataaggaaagaactgaaaatcaaagaaggagctgaaaatctgaggaaagtcacaacagataaaaaaagtttggcttatgtagacaacattttgaaaaaatcaaataaaaaattagaagaactacatcacaagctgcaggaattaaatgcacatattgttgtatcagatccagaagatattacagattgcccaaggactccagatactccaaataatgaccctcgttgttctactagcaacaatagattgaaggccttacaaaaacaattggatatagaacttaaagtaaaacaaggtgcagagaatatgatacagatgtattcaaatggatcttcaaaggatcggaaactccatggtacagctcagcaactgctccaggacagcaagacaaaaatagaagtcatacgaatgcagattcttcaggcagtccagactaatgaattggcttttgataatgcaaaacctgtgataagtcctcttgaacttcggatggaagaattaaggcatcattttaggatagagtttgcagtagcagaaggtgcaaagaatgtaatgaaattacttggctcaggaaaagtaacagacagaaaagcactttcagaagctcaagcaagatttaatgaatcaagtcagaagttggaccttttaaagtattcattagagcaaagattaaacgaagtccccaagaatcatcccaaaagcaggattattattgaagaactttcacttgttgctgcatcaccaacactaagtccacgtcaaagtatgatatctacgcaaaatcaatatagtacactatccaaaccagcagcactaacaggtactttggaagttcgtcttatgggctgccaagatatcctagagaatgtccctggacggtcaaaagcaacatcagttgcactgcctggttggagtccaagtgaaaccagatcatctttcatgagcagaacgagtaaaagtaaaagcggaagtagtcgaaatcttctaaaaaccgatgacttgtccaatgatgtctgtgctgttttgaagctcgataatactgtggttggccaaactagctggaaacccatttccaatcagtcatgggaccagaagtttacactggaactggacaggtcacgtgaactggaaatttcagtttattggcgtgattggcggtctctgtgtgctgtaaaatttctgaggttagaagattttttagacaaccaacggcatggcatgtgtctctatttggaaccacagggtactttatttgcagaggttaccttttttaatccagttattgaaagaagaccaaaacttcaaagacaaaagaaaattttttcaaagcaacaaggcaaaacatttctcagagctcctcaaatgaatattaatattgccacttggggaaggctagtaagaagagctattcctacagtaaatcattctggcaccttcagccctcaagctcctgtgcctactacagtgccagtggttgatgtacgcatccctcaactagcacctccagctagtgattctacagtaaccaaattggactttgatcttgagcctgaacctcctccagccccaccacgagcttcttctcttggagaaatagatgaatcttctgaattaagagttttggatataccaggacaggattcagagactgtttttgatattcagaatgacagaaatagtatacttccaaaatctcaatctgaatacaagcctgatactcctcagtcaggcctagaatatagtggtattcaagaacttgaggacagaagatctcagcaaaggtttcagtttaatctacaagatttcaggtgttgtgctgtcttgggaagaggacattttggaaaggtgcttttagctgaatataaaaacacaaatgagatgtttgctataaaagccttaaagaaaggagatattgtggctcgagatgaagtagacagcctgatgtgtgaaaaaagaatttttgaaactgtgaatagtgtaaggcatccctttttggtgaacctttttgcatgtttccaaaccaaagagcatgtttgctttgtaatggaatatgctgccggtggggacctaatgatgcacattcatactgatgtcttttctgaaccaagagctgtattttatgctgcttgtgtagttcttgggttgcagtatttacatgaacacaaaattgtttatagagatttgaaattggataacttattgctagatacagagggctttgtgaaaattgctgattttggtctttgcaaagaaggaatgggatatggagatagaacaagcacattttgtggcactcctgaatttcttgccccagaagtattaacagaaacttcttatacaagggctgtagattggtggggccttggcgtgcttatatatgaaatgcttgttggtgagtctccctttcctggtgatgatgaagaggaagtttttgacagtattgtaaatgatgaagtaaggtatccaaggttcttatctacagaagccatttctataatgagaaggctgttaagaagaaatcctgaacggcgccttggggctagcgagaaagatgcagaggatgtaaaaaagcacccatttttccggctaattgattggagcgctctgatggacaaaaaagtaaagccaccatttatacctaccataagaggacgagaagatgttagtaattttgatgatgaatttacctcagaagcacctattctgactccacctcgagaaccaaggatactttcggaagaggagcaggaaatgttcagagattttgactacattgctgattggtgttaagttgctagacactgcgaaaccaagctgactcacaagaagacctcttaaaaatagcaacccttcatttgctctctgtgccaccaatagcttctgagttttttgttgttgttgtttttattgaaacacgtgaagatttgtttaaaagtaccattctaatacttcttcaaaagtggctcctcattgtacttcagcgtaaatatgagcactggaaacagtttcatggagtttaagttgagtgaacatcggccatgaaaatccatcacgaatacttttggatcaatagtctatttttaaaaagaaagaaaaaaaccacttttttatagtccctagctttgccatatgcccgccttaagtggaaggaaagttaatcacttaactatgttttataaaaagaaaaaagggcttggaatgctattactgttcacacaaagtatgattctgtttgaataaggcaaatgctcctttttttaaaaaaaaagacattactgtaatatcaaaaaccgtggcagtttgtatacaactcggggcttgattttttttaaaaaaacagaatgaattgatgtcttattttataaatgttctatatttattaggagaaaactttatattgccttttttatcaatcatgtaacaggcttatagctttccaacagagctgcttgccaaacaattttttttgtttattaaacagtgctgaaacaaacaggatcagcatttacttaagatgttaagaatgaggacttttaatcagccgaaccaagatattgttacctgtatgcattcccaaagtctagatgctcagtatgttcagtcatatctttcagaatcagtgaaccgattaccctttttttggtattcactctacatctgccaacctagttcaccttggttttgtgtctgctgtagaagggaaccataacttggttaaaccgtagggattatcattgtatacatgctgtgaacatgtatatgtgcaagttttaatgtattctatgttgtaggcttattatttaattttaccacttcatcacttttgtacagtggccaagcagacacctcaaactccagcatttacattaagtgcatttgtacattttaggccactggatccagattttatattggcagttattgagggcaaaagcaatatattgtaacagaatgtataaatatttttgataaaacagtctatattttattaaaaaatgaattataacactaaagctgtacctcaaaagtctcaaaaataatttgatgaaatattttatacaactcttcaaaggatccgtctgtggctttttatactcttttagggttgtctttttacaaaccatgactttccacttgcctgtagttttttgtttgttttggtttggtttgattttatatttttttctcctaatctatgactttattgttttttcttagtttagtaatagcatctttgatcctgtgcttagcatgttagggtcattatacctcaggaatagcaagctgttaagtaaccatactgaattaactatttaattacagtgagctcatctcttaaaaattgttcaggtgtaaatcttatgagaaacatgaaaaagcacactgatttatggagagttgagctaaaaacatttataaatatttgctgggatgttttagcatcttttcattgtactctgagaacaattaaaattgtccagagatcatttatattaccttccaaattgtttattacccaagatcctttgggagaaaatcttatagaatgggggaacaatatgtggtttaaagttattttaaaatgccagttaatttcctcggcaaaggacaatagaggaacttagcttaattgtctggctttaatttaaactgtgttaatacaacattaaaataaaacactaaatacttttgaggtacagtctgctcacttttttggttctcaaatagcaaagaaagtaatgtctaaaataggctcttagcattaaaaactgacagcatttcgtaactacacagtgtacagaatttttttttaattgaagtcaatcactaaaaaaattagaaggcagggtctatttacacaattaagctgaagaaagcactaattttttgtagtttaaaatatatatatattttagtcagatttaaaattttaagctttatagagtgtaaatatattttgctattactgtatgtgtatgtgactgctcaagcactttgtaaagaaattaggatattttagaatggtacactatgcattcaaatgaaatgtgcctttcactatgtcattctaagaaaacaagtgttttttgcagtcataaattatcacaaatgcacaaattaaagtctatatagattgaaatttgtaactttggttttaagtattctttccttttagaaacttcctaatgattaaaatatactttaacttttctgtgttcaaaatctcaaagactaattaactttaataaacattcttgcaagtactttttgtcctagtgaaggcttaaaaccatgaacattcagagcaaactgtccacttcattgggaataatgggaaaagtttgtattctgctcctgtaaggtcagtagcatcttttatttgaagcatatttatggactgcttactgtgtatagatactgagaataggaagtttttttttttaaagcaacaaaatgttgatgaatgaagaacagcctgttttaattaagatgcaagcaccagtattgtatgtacttttctcttgtttgaggttagcttattttaatttaggacctggcttctcaaaaaggcaaatgaataaaacagaatactagta

SEQ ID NO: 170733 - DNA, 342 bp, Homo sapiens
  Payload ID: 13603
  Gene Symbol: PKN2
  Gene Name: protein kinase N2
  ENST ID: ENST00000449189
  CDS Start-End: 1-196
gggctttgtgaaaattgctgattttggtctttgcaaagaaggaatgggatatggagatagaacaagcacattttgtggcactcctgaatttcttgccccagaagtattaacagaaacttcttatacaagggctgtagattggtggggccttggcgtgcttatatatgaaatgcttgttggtgagacttccgtctgagcaacacactctgcatccttgcttcaccgggaaactactgaagttcctggggaagcaaagtagaatttcgtaagaacaaaatggatggagagaggagaaaacctatggtagctgtgaaggccctgatgccatgtatgtcaaattga

SEQ ID NO: 170734 - DNA, 632 bp, Homo sapiens
  Payload ID: 13603
  Gene Symbol: PKN2
  Gene Name: protein kinase N2
  ENST ID: ENST00000436111
  CDS Start-End: 1-632
ggaagaattaaggcatcattttaggatagagtttgcagtagcagaaggtgcaaagaatgtaatgaaattacttggctcaggaaaagtaacagacagaaaagcactttcagaagctcaagcaagatttaatgaatcaagtcagaagttggaccttttaaagtattcattagagcaaagattaaacgaagtccccaagaatcatcccaaaagcaggattattattgaagaactttcacttgttgctgcatcaccaacactaagtccacgtcaaagtatgatatctacgcaaaatcaatatagtacactatccaaaccagcagcactaacagatgatgtctgtgctgttttgaagctcgataatactgtggttggccaaactagctggaaacccatttccaatcagtcatgggaccagaagtttacactggaactggacaggtcacgtgaactggaaatttcagtttattggcgtgattggcggtctctgtgtgctgtaaaatttctgaggttagaagattttttagacaaccaacggcatggcatgtgtctctatttggaaccacagggtactttatttgcagaggttaccttttttaatccagttattgaaagaagaccaaaacttcaaagac

SEQ ID NO: 170735 - DNA, 3375 bp, Homo sapiens
  Payload ID: 13604
  Gene Symbol: PKN3
  Gene Name: protein kinase N3
  Uniprot ID: Q6P5Z2
  ENST ID: ENST00000291906
  CDS Start-End: 394-3063
ggctcccgcgggcgcgcggcggggaaggccagaggacctgggcgcgggcgatgtgcctcctgagcgtccaaaccgggggtgaggcgcggtcacgcccagcgggaaccgcaggcgccgaagcccgggtactgggcccagaatcccgcggaattttggatccgagggaggcgctggggcgcgggacctcgggcgtggggtcccgggcgctggatcggcgcggacgggaggcggcgctggtcccgcgggccagcgggtctcgggagggggcgcccgatcccgcgtctccggcgccgcttcccgggaagtttcaagtttgaaagtcctggcggagggtctgcggcttccgggaccggagtggctgagagaagggccccaagcggccggagcggcgccatggaggagggggcgccgcggcagcctgggccgagccagtggcccccagaggatgagaaggaggtgatccgccgggccatccagaaagagctgaagatcaaggagggggtggagaacctgcggcgcgtggccacagaccgccgccacttgggccatgtgcagcagctgctgcggtcctccaaccgccgcctggagcagctgcatggcgagctgcgggagctgcacgcccgaatcctgctgcccggccctgggcctggcccagctgagcctgtggcctcaggaccccggccgtgggcagagcagctcagggctcggcacctagaggctctccggaggcagctgcatgtggagctgaaggtgaagcagggggctgagaacatgacccacacgtgcgccagtggcacccccaaggagaggaagctcctggcagctgcccagcagatgctgcgggacagccagctgaaggtggccctgctgcggatgaagatcagcagcctggaggccagtgggtccccggagccagggcctgagctgctggcggaggagctacagcatcgactgcacgttgaggcagctgtggctgagggcgccaagaacgtggtgaaactgcttagtagccggagaacacaggaccgcaaggcactggctgaggcccaggcccagctacaggagtcctctcagaaactggacctcctgcgcctggccttggagcagctgctggagcaactgcctcctgcccaccctttgcgcagcagagtgacccgagagttgcgggctgcggtgcctggatacccccagccttcagggacacctgtgaagcccaccgccctaacagggacactgcaggtccgcctcctgggctgtgaacagttgctgacagccgtgcctgggcgctccccagcggccgcactggccagcagcccctccgagggctggcttcggaccaaggccaagcaccagcgtggccgaggcgagcttgccagcgaggtgctggctgtgctaaaggtggacaaccgtgttgtggggcagacgggctgggggcaggtggccgaacagtcctgggaccagacctttgtcatcccactggagcgagcccgtgagctggagattggggtacactggcgggactggcggcagctatgtggcgtggccttcctgagacttgaggacttcctggacaatgcctgtcaccaactgtccctcagcctggtaccgcagggactgctttttgcccaggtgaccttctgcgatcctgtcattgagaggcggccccggctgcagaggcaggaacgcatcttctctaaacgcagaggccaggacttcctgagggcttcgcagatgaacctcggcatggcggcctgggggcgcctcgtcatgaacctgctgcccccctgcagctccccgagcacaatcagcccccctaaaggatgccctcggaccccaacaacactgcgagaggcctctgaccctgccactcccagtaatttcctgcccaagaagacccccttgggtgaagagatgacacccccacccaagcccccacgcctctacctcccccaggagccaacatccgaggagactccgcgcaccaaacgtccccatatggagcctaggactcgacgtgggccatctccaccagcctcccccaccaggaaaccccctcggcttcaggacttccgctgcttagctgtgctgggccggggacactttgggaaggtcctcctggtccagttcaaggggacagggaaatactacgccatcaaagcactgaagaagcaggaggtgctcagccgggacgagatagagagcctgtactgcgagaagcggatcctggaggctgtgggctgcacagggcaccctttcctgctctccctccttgcctgcttccagacctccagccatgcctgctttgtgactgagtttgtgcctggtggtgacctcatgatgcagatccacgaggatgtcttccccgagccccaggcccgcttctacgtggcttgtgttgtcctggggctgcagttcttacacgagaagaagatcatttacagggacctgaagttggataaccttctgctggatgcccagggattcctgaagatcgcagactttggactctgcaaggaagggatcggcttcggggaccggactagcaccttctgtggcaccccggagttcctggctcccgaggtgctgacccaggaggcatacacacgggctgtggactggtgggggctgggtgtgctgctctacgagatgctggtgggtgagtgcccgttcccaggggacacagaggaagaggtgtttgactgcatcgtcaacatggacgccccctaccccggctttctgtcggtgcaagggcttgagttcattcagaagctcctccagaagtgcccggagaagcgcctcggggcaggtgagcaggatgccgaggagatcaaggtccagccattcttcaggaccaccaactggcaagccctgctcgcccgcaccatccagccccccttcgtgcctaccctgtgtggccctgcggacctgcgctactttgagggcgagttcacagggctgccgcctgccctgaccccacctgcaccccacagcctcctcactgcccgccaacaggccgccttccgggacttcgactttgtgtcagagcgattcctggaaccctgagggcatctcctggcacctctgtccccttcccccacagactgttagagcctctgctcgttcacccgtgcgccctgcctggaggtccaggccttgctgggtacttctgagcccttgggattcaaagtggcagccatggggccactgttgtgggctttgctcagtgtcactgggcaaagtgtgtcccttccccctccagctcgccctcttctacctcccagcgagacctggcccagaaagggtgccgcagcaaggagtgatatggtttgtctttttaagactggacttgctttatattaaatttgtaaaagtgtg

SEQ ID NO: 170736 - DNA, 1134 bp, Homo sapiens
  Payload ID: 13605
  Gene Symbol: PRKAA1
  Gene Name: protein kinase, AMP-activated, alpha 1 catalytic subunit
  ENST ID: ENST00000296800
  CDS Start-End: 13-636
tcctggagaaagatggcgacagccgagaagcagaaacacgacgggcgggtgaagatcggccactacattctgggtgacacgctgggggtcggcaccttcggcaaagtgaaggttggcaaacatgaattgactgggcataaagtagctgtgaagatactcaatcgacagaagattcggagccttgatgtggtaggaaaaatccgcagagaaattcagaacctcaagcttttcaggcatcctcatataattaaactgtaccaggtcatcagtacaccatctgatattttcatggtgatggaatatgtctcaggaggagagctatttgattatatctgtaagaatggaaggctggatgaaaaagaaagtcggcgtctgttccaacagatcctttctggtgtggattattgtcacaggcatatggtggtccatagagatttgaaacctgaaaatgtcctgcttgatgcacacatgaatgcaaagatagctgattttggtctttcaaacatgatgtcagatggtgaatttttaagaacaagttgtggctcacccaactatgctgcaccagaagtaatttcaggaagagactgcaatattataagaattttaacctctcaatttactaactaccagcattgagaacatgaagatatttgtacagtgtcgctttttgaatagtttggaaaacaggagaatttaatatttttaagaataactctttgtccttcactatactactgaaattgaaaacagaagctgaagtttgctagatttataatgaacttttaataacttttcacccaaaccatgcttatttgtgtgaatgttttgcatcttgattaactcaatgcagaaatactgtagtattttctatttttataagcttgttggcctagactgctcaaagaaatgagatttgtgtaaaaatatggctgtgagtaaggcaggagtacctaattttagatttgtcaagtttcatcttttttttaaatattaacttaatgtcaaaaattatttaaaaaatttttaaaaaaatggtgttgtctatcttaattcttttaggaataaaacaattcaggacatggagactgtggaaagttgttatttaaataaataaaaagaaatgttataactgtg

SEQ ID NO: 170737 - DNA, 1918 bp, Homo sapiens
  Payload ID: 13605
  Gene Symbol: PRKAA1
  Gene Name: protein kinase, AMP-activated, alpha 1 catalytic subunit
  Uniprot ID: Q13131
  ENST ID: ENST00000354209
  CDS Start-End: 186-1910
attctcctggcagcccccgcccgccccgccagggggagcgtctgcgcccgacgtaggctgcggggcctgggctggcggcgcagggcggtgactcggctcggtggctgccctcccgcgtccccaccccctccccgcccgcccccggcgcggccctgcccgccccctccgccccctcccgcagcgccatgcgcagactcagttcctggagaaagatggcgacagccgagaagcagaaacacgacgggcgggtgaagatcggccactacattctgggtgacacgctgggggtcggcaccttcggcaaagtgaaggttggcaaacatgaattgactgggcataaagtagctgtgaagatactcaatcgacagaagattcggagccttgatgtggtaggaaaaatccgcagagaaattcagaacctcaagcttttcaggcatcctcatataattaaactgtaccaggtcatcagtacaccatctgatattttcatggtgatggaatatgtctcaggaggagagctatttgattatatctgtaagaatggaaggaaatctgatgtacctggagtagtaaaaacaggctccacgaaggagctggatgaaaaagaaagtcggcgtctgttccaacagatcctttctggtgtggattattgtcacaggcatatggtggtccatagagatttgaaacctgaaaatgtcctgcttgatgcacacatgaatgcaaagatagctgattttggtctttcaaacatgatgtcagatggtgaatttttaagaacaagttgtggctcacccaactatgctgcaccagaagtaatttcaggaagattgtatgcaggcccagaggtagatatatggagcagtggggttattctctatgctttattatgtggaacccttccatttgatgatgaccatgtgccaactctttttaagaagatatgtgatgggatcttctatacccctcaatatttaaatccttctgtgattagccttttgaaacatatgctgcaggtggatcccatgaagagggccacaatcaaagatatcagggaacatgaatggtttaaacaggaccttccaaaatatctctttcctgaggatccatcatatagttcaaccatgattgatgatgaagccttaaaagaagtatgtgaaaagtttgagtgctcagaagaggaagttctcagctgtctttacaacagaaatcaccaggatcctttggcagttgcctaccatctcataatagataacaggagaataatgaatgaagccaaagatttctatttggcgacaagcccacctgattcttttcttgatgatcatcacctgactcggccccatcctgaaagagtaccattcttggttgctgaaacaccaagggcacgccatacccttgatgaattaaatccacagaaatccaaacaccaaggtgtaaggaaagcaaaatggcatttaggaattagaagtcaaagtcgaccaaatgatattatggcagaagtatgtagagcaatcaaacaattggattatgaatggaaggttgtaaacccatattatttgcgtgtacgaaggaagaatcctgtgacaagcacttactccaaaatgagtctacagttataccaagtggatagtagaacttatctactggatttccgtagtattgatgatgaaattacagaagccaaatcagggactgctactccacagagatcgggatcagttagcaactatcgatcttgccaaaggagtgattcagatgctgaggctcaaggaaaatcctcagaagtttctcttacctcatctgtgacctcacttgactcttctcctgttgacctaactccaagacctggaagtcacacaatagaattttttgagatgtgtgcaaatctaattaaaattcttgcacaataaacagaaaa

SEQ ID NO: 170738 - DNA, 5088 bp, Homo sapiens
  Payload ID: 13605
  Gene Symbol: PRKAA1
  Gene Name: protein kinase, AMP-activated, alpha 1 catalytic subunit
  Uniprot ID: Q13131
  ENST ID: ENST00000397128
  CDS Start-End: 10-1689
cgcagcgccatgcgcagactcagttcctggagaaagatggcgacagccgagaagcagaaacacgacgggcgggtgaagatcggccactacattctgggtgacacgctgggggtcggcaccttcggcaaagtgaaggttggcaaacatgaattgactgggcataaagtagctgtgaagatactcaatcgacagaagattcggagccttgatgtggtaggaaaaatccgcagagaaattcagaacctcaagcttttcaggcatcctcatataattaaactgtaccaggtcatcagtacaccatctgatattttcatggtgatggaatatgtctcaggaggagagctatttgattatatctgtaagaatggaaggctggatgaaaaagaaagtcggcgtctgttccaacagatcctttctggtgtggattattgtcacaggcatatggtggtccatagagatttgaaacctgaaaatgtcctgcttgatgcacacatgaatgcaaagatagctgattttggtctttcaaacatgatgtcagatggtgaatttttaagaacaagttgtggctcacccaactatgctgcaccagaagtaatttcaggaagattgtatgcaggcccagaggtagatatatggagcagtggggttattctctatgctttattatgtggaacccttccatttgatgatgaccatgtgccaactctttttaagaagatatgtgatgggatcttctatacccctcaatatttaaatccttctgtgattagccttttgaaacatatgctgcaggtggatcccatgaagagggccacaatcaaagatatcagggaacatgaatggtttaaacaggaccttccaaaatatctctttcctgaggatccatcatatagttcaaccatgattgatgatgaagccttaaaagaagtatgtgaaaagtttgagtgctcagaagaggaagttctcagctgtctttacaacagaaatcaccaggatcctttggcagttgcctaccatctcataatagataacaggagaataatgaatgaagccaaagatttctatttggcgacaagcccacctgattcttttcttgatgatcatcacctgactcggccccatcctgaaagagtaccattcttggttgctgaaacaccaagggcacgccatacccttgatgaattaaatccacagaaatccaaacaccaaggtgtaaggaaagcaaaatggcatttaggaattagaagtcaaagtcgaccaaatgatattatggcagaagtatgtagagcaatcaaacaattggattatgaatggaaggttgtaaacccatattatttgcgtgtacgaaggaagaatcctgtgacaagcacttactccaaaatgagtctacagttataccaagtggatagtagaacttatctactggatttccgtagtattgatgatgaaattacagaagccaaatcagggactgctactccacagagatcgggatcagttagcaactatcgatcttgccaaaggagtgattcagatgctgaggctcaaggaaaatcctcagaagtttctcttacctcatctgtgacctcacttgactcttctcctgttgacctaactccaagacctggaagtcacacaatagaattttttgagatgtgtgcaaatctaattaaaattcttgcacaataaacagaaaactttgcttatttcttttgcagcaataagcatgcataataagtcacagccaaatgcttccatttgtaatcaagttatacataattataaccgagggctggcgttttggaatgcaatttgcacagggattggaacatgatttatagttaaaagcctaatatgcagaaatgaattaagatcattttgttgttcattgtgcagtatgtatatagcataatatacacagtgaattataggtctcaggcttacttgatttttggctattttatatttagtgtacacagggctttgaaatattaatttacataaaggccttcatatattattacgtgttatatattacgtgttataaatttattcaataaatatttgcctagaattcccaagacctttataggtgattttgttttctgggctccttaacttcataaatagctagtatcttccagcagtagtaacagtctggataacttcttccatatccctccctctttgtttttttgagacagtgtcactttgtcacccaggctggagtgcaatggtgtggtctcggctcactgcaacctccacctcccgggttcaagtgattctcccgcctcagcttcctgagtagctggaactacaggcgtgtgccaccacacccggctaatttttcgtatttttagtgtagacggggtttcactatgttgcccaggctggtctcgaactcctgaccgcgtgatccaccacctcagcttcccaaagtggtgggattacaggcgtgagccaccgcacccggcctccatatcccccttttaaaattctgtagtgtatggtaagtcatatcagatatcagacctaatttaaatttcattttagctttacaagtccaaaaacacagaatttatatattcagatactctagcactaattttagtcttaaaatattcccacgatattctgtacacaaaatgttctttttgttacaagagctgagttgcatatactgtagataaatcatattatttttgccaatttcacaaattcctctggcccatcatgtcagtcattattgagtatatgcacacattgctacttatttgattatgtatcttttaaattgattcagtgcatagaaaactatctcttacaaactttaagtgctctgatatgacttcccccccaaattttattatgaacatttttaaaaacagaaaaattgaaaaactgtttggtaagcacatgtatatctaccatttagattcagcagttgttaatgttttgtcatttgttttctctatacctatatatgtatagatacagctagttatgcatatatatgcatatatgtgtttgtttgtgtatgtatatatgcttttttccccctgaaccatttggatgttacagacatacttatcaccgtgaaaatacttcaagtatctcctacagataatgacattctcctaaaaatccgtaataccattgtaaaagtaataattccccaatatcatctaatcaagccatatttaaatttctgaagttaactccaaatttctttatagctgattatttcaaactaggatccaattaaagtttacatatgacacttggttataactctttagttggatataacattattattattttgataaaatatggaacaaatcaattctattaataagtggtcacatttgttttgggcttaaattactttttaaagatactggattttcctaagatttctgatttacactgatatttttttttgtcattcttaattgcatcacacaatagatgtaaatgaagatgtagtcacctcagataaaattggtatcgtgtatgataatattgtatcatttatatttgccttatgttaactttaagaaattgatttttttgtattaatcattttcccattgcaacagagctatattttttctattttaagaatcatattttaggattatttttggcaaatacagtgagcacttatgtaaccagatgataatgaactcaaatgtcatgatagcttgcataaatggtgactctagtagatttgactcaagcacttctagaatcatgcactgaattcaaaagaaaaatcttgctgctttttgtccagggcttgttctattcaacttctaatttgaaagctgtacaaagtaatagaagttccatttaaatatgagttcaaaactgtatttactttttatgtggccctctctttaggggattctaattttacttagggtctctaagtgcagcataatgttcctgatgttaacagaagactgtatttttaaagttacaaatttgtatatggaattaagtaatggcgctatatacgctgttgtggggaggggggaagaaaaggaggaaccaattaaataggaccttttaaaaattgttaattttgtaaactttgcttctcttataagttattgtgattcattttagttactgtgttttattttgaaaatatttaaatattgcacttctataaatagtatgataaatgcacagacaattgcagtaaattcttttttaagctaggatatttgaaatgacaacctttggttaagtgtgtcaaggttgcaacagaattttcacaatttttttgttgtttgcaaattgttactaatattgaagaggtaagggaggcaatgcaaatgatttttaatctttttttattatcttttcagcagtttatattttttgtgactttatgcaaccatatttttactttgtcttgacaactgaaagatgtataaggttttttgccagaaatgtactgtatacatagttttaagtataacagattttactgatatgtaaaaattttgccattaaaataaatgatttctcactgagaggaacttttctaccaggttggggcatatgggagcttaatatatcatatctaatttaaaataatttcactgaaataaactccattgcttttacctaatttttttcttgagatgcttttgtagtttttcagagttttagatgattttatacaaaatcctctgcctagcactgctctttttgatgttgtagtgacaccatttacattgaattaatgcttggtagcctggggctagatgtggaactccatggatctgtgttctgactggcacctttggaatgaaagaaaagtgtgtgctgtccaaattttttccccttaattctttccctcatcttctcacccataatagaaattttatttccattgtgagttctgacaagaatgaaattccacatacaacataactgtaaattgttggtaggtagaagttaatatttgtggttcatgtatattttgaccagagtatatttaagtatataatttcagcttccttgatttagaaatatgatataataaagaaaaactccatttatcatctgtta

SEQ ID NO: 170739 - DNA, 9347 bp, Homo sapiens
  Payload ID: 13606
  Gene Symbol: PRKAA2
  Gene Name: protein kinase, AMP-activated, alpha 2 catalytic subunit
  Uniprot ID: P54646
  ENST ID: ENST00000371244
  CDS Start-End: 67-1725
ggtaggcggcggcggcggcggctacgcggagcggcaggcggtggagcgaggccgcgcgcgccgaagatggctgagaagcagaagcacgacgggcgggtgaagatcggacactacgtgctgggcgacacgctgggcgtcggcaccttcggcaaagtgaagattggagaacatcaattaacaggccataaagtggcagttaaaatcttaaatagacagaagattcgcagtttagatgttgttggaaaaataaaacgagaaattcaaaatctaaaactctttcgtcatcctcatattatcaaactataccaggtgatcagcactccaacagatttttttatggtaatggaatatgtgtctggaggtgaattatttgactacatctgtaagcatggacgggttgaagagatggaagccaggcggctctttcagcagattctgtctgctgtggattactgtcataggcatatggttgttcatcgagacctgaaaccagagaatgtcctgttggatgcacacatgaatgccaagatagccgatttcggattatctaatatgatgtcagatggtgaatttctgagaactagttgcggatctccaaattatgcagcacctgaagtcatctcaggcagattgtatgcaggtcctgaagttgatatctggagctgtggtgttatcttgtatgctcttctttgtggcaccctcccatttgatgatgagcatgtacctacgttatttaagaagatccgagggggtgtcttttatatcccagaatatctcaatcgttctgtcgccactctcctgatgcatatgctgcaggttgacccactgaaacgagcaactatcaaagacataagagagcatgaatggtttaaacaagatttgcccagttacttatttcctgaagacccttcctatgatgctaacgtcattgatgatgaggctgtgaaagaagtgtgtgaaaaatttgaatgtacagaatcagaagtaatgaacagtttatatagtggtgaccctcaagaccagcttgcagtggcttatcatcttatcattgacaatcggagaataatgaaccaagccagtgagttctacctcgcctctagtcctccatctggttcttttatggatgatagtgccatgcatattcccccaggcctgaaacctcatccagaaaggatgccacctcttatagcagacagccccaaagcaagatgtccattggatgcactgaatacgactaagcccaaatctttagctgtgaaaaaagccaagtggcatcttggaatccgaagtcagagcaaaccgtatgacattatggctgaagtttaccgagctatgaagcagctggattttgaatggaaggtagtgaatgcataccatcttcgtgtaagaagaaaaaatccagtgactggcaattacgtgaaaatgagcttacaactttacctggttgataacaggagctatcttttggactttaaaagcattgatgatgaagtagtggagcagagatctggttcctcaacacctcagcgttcctgttctgctgctggcttacacagaccaagatcaagttttgattccacaactgcagagagccattcactttctggctctctcactggctctttgaccggaagcacattgtcttcagtttcacctcgcctgggcagtcacaccatggatttttttgaaatgtgtgccagtctgattactactttagcccgttgatctgtctctagtttctttctgttattgcactatgaaaatcagttatattctttaaatttttatcttacttttggataatatccactgcaatactaattgagaaacatgaattatttccaggggcacacaatgctattgaaattactgaaaacaaaatatctgacatcttatttacttgtagaaatctgtaattctattgtgcctatgataaattcacataggcaatatctttaataggttaatatcaatgaagatttttaattacaataatgagttcactacagacgattaacacaccacactggcgaaccatctcaatgtaagggtggtttggcaacacctccttgctttgctgtttggtgtaggtaaatctagtttacttcctaaatttcagtaggctttatgctgtgtttatgcccccaatttattttaacaaaagaagattaaaaagtaaaagaaccacgagtaagatattatttaaatgttgaaatcttaaaaacctgcctccaagatttcagaagccaagtttttctaacagtatttgtacaaatactgcctagtgtattcaacagaaggactgtggtcatgtaacaggtaaccacaattttcaggtttcttaaaaacagctgtaactaactcaggatttttatcttgagatttccctgaataatatatttatcttaagagccttcaagtttcaaattaatattggaacatctggaattgcaacaacttttgtcttttacataaacttacgtcatttaaaaaatgtcttcaaaatctacctttctcaaattctttttgcctctatttatttttgcatttcaccaacagtgataaaatagttaaatgaaacaaagcaaagtatcaacagtcccttaaatgagaatccttatctttgatctttattttctgtgttaggtgttagggtcctggtgcagctcataatgctaattcttcattggaagccactcccttcacctcacctcacctagtcactattgtctttgttcattgtttgatcctgagtggttgattgatatagctttgaatcttttctagtccaagtttgaaaacactgttctggccctaagggctggctatgacctttactgttgaacctgatagggcagggaagctttgaacatcaagaaaaaatttttatcttaaataaataaatatatatattcacacaccagtgcttttaagcaaaaaccagtttttttgtttgtttgttttgctttgtgcaggttttctttaagattaaaaaaacacaaactatagcagggtagataatagtttattgattatattttgttttagtaaaagtatttaattttaaattctgtgtaatttatctaatttgtatttattcatttgttatttttatgttgtaattaacacttatttacctggattaccctaaaaaaattaagctcttgaaaacaaaaaaatgacattaccttgacaggcttctctttgccaaaagtaatgtatgttctgccaagaagcaaatgagaatgttagactaagtttctcctgtgttagtggaaaacaagtgtgtctatctttaaatattctttgaatcaggagtttgcgttgtgtcacatcatatggctttgcagatcttttaaaaactgatgttaaataacttataagtccaacttcttaatatcaagataaatgaatagttcaccaatttgggaaggagggcgggttgcaatttgagatagtttaaggtttaattattgaaagactgccatcttgtggcaccaaaaggtaatttttacatgattatttgtatagtgataagcagtcctgctgtgttagcctggtccattatagatatggcatagttttgggttctctaaatgggtccatacctcttttgggaaaaaacagggccacctcataatatttgcctgattatgaatggaattaccttagaaataaggaactaatcagattacttaaccccaatgacaaaatccacaaaaattttgaaggcagagaaacagaaggaatccagtgatgttttagctccattagtctaataggtcagatattaaaaaattgttcatatcaaaattaccttatatggattattgccatgttttttgagagttaattatttactgttttctaattcttgccagtatttatgaacagctgtagcttgatatttacctactgaattttaggagaactaatggtcacagtttgggttcttttatgtgtatgtttttaaaacagctattttgtgaatctaggtggttggtttttagaagatttcaggagatgcagtccagcacaattagagctggaacattgttacagcaggctttttgttgctcatgggcagatagagggaaagaatcagttgttagccccaaatttccacatttcagtgttgtaaactctgaatgtgataggtagatgtgggctaagaataatttcctccagtgaagacacgggagaagagcttctattatgaggttatagataaggccttagttatatcatggaaatggactccatgtagttctagaactgcatttcccaaagtatatcctgtgagatgctccacagaaaaaatgattgcatggactaagtttgaaaaatgttgcatgctactcttcccctcgaagatgacagtggatgtcagcattaaagactttgacaggtctttctgtgaaaaaaagaaagccacataactttgttgaactttgcccaaattaatttttcattttaaaaaacttaatagcccatgaaaagcaaatttgggaaatacattttttaggaaaatactgtcccagaatgccataattagggtagttaataattaacacttccatttctcttactggttgttgggagaatctgattgaaaattagaattactttgttttaacttgcagacatgttcatcgtgagtgaatgctggattaaatagaattttctgtgtctgcaacttgtttcatgacaccttggttttcttaatcatcttgtattattatttgagtgcaacattattcttatgcatgggtgactgaaaaacctgaaacaagattacttgttaaaaaaaagtctaagagactaatgactcatgcttatggctcagtgggtaatgaatcagtgtcactgattcttacttttaaaatgtgtagtcagtgaacattttctaaatacttttctttgggataccatatgaagatctaattccttatgtttcagtgtaggaacagctaccttctcaaatagaatatgcagggagggaagtaggcaaaccatttacaagttgggtttttgttttgattaacctgttaagagacacttttgtaatctctagtgtttacattcctttatactagctatctataaagagaatccagaaggctaaattaatcagaaataattatatttctatgtcagggtattggctatatgtagcatgaacaattctccattttctgcaaatgggtttttcaggacagttttataattctgagtttgctttttcttattccctagacagtttgtactcagggaatacaaattgatttttactgttaaatgagacatagtttagaaaaaatcataagcaactattgtagatttttgatctgtttggatttatctgtagcattgaataatgtgcagtgtactgagttaatgtaggcacctcactttggatttataaaatgtaaaaacctggaacatgcctgccacagacaccactttgtctattcaccgggtactaatttacatcctattaatggttgtaaaagctgagtgtctaaatgctagacatgttcacaattttgtctgtttttgtttatttgtttttaagacccaaaccttttcaatcttgcatttatttacttggttctcctgtgtcaccctgtggctttttaaatagggaatgtaatttattttaatagtagttctcaaagactctattaaaaactctggacgagggatatgtgcaatctgttggtaagtcacatcctatgtttggcctcatttttataactcctaaaatgagaaaggtagattttaacacttctaaggtacctttgagctttaaagttcttttctgcttttccatatgatttgtgttagtgttcactttttatatatttagagtttttatatgagtgtgaatgtttctgttttgatttggtgaggcatgtcagaggtatatacttgaatatttttctaaatacagctgctggaggaatgcaaatggcaaaaatcatccagaaaaccaaacacggtgaaacatcacatccatttggcatgaagcaaagcattacaaatttggagtgatgaaagtgttccatatattttttatagtgatttttcgatctagagacccttcatattgtttacttactattacgataactttgagaggtaaccagagaaagcatttttgccatttccagatgaggaagcaggaccagaaagctcttcataaagctttaacaccatacaagtatccagcagtgatcaattgctctttataggaaaccacctttcctctggggaagaacagtctgaattaataaaacatcagagtggttgagtagtaaaaataaacacagatgtattgctttcaagtcttagagtgacataaagtagtcttaaataaatagttcttagtttattttaagcagttgattgtactaacgagatgtaattatctgaagtatttatgattagcatattggtttttataagtatttctgagttattgagggtgcttaaaaatgctgaagaaactttaaaacatgattcttcttataattttatgtgattcttatagcacaatcatttttgaaaaaggaaaactaggctgggtgtagtggctcatgcctataatcccagcactttgggaggccaaagtgggtggatcacccgagttcaggagttcgagaccagtctggccaacatggtgaaacctcgtctctactaaaaataccaaaattatccggtgtggtgacaggctgcttgtaatcccagctactcgggaggctgaggcacgggaatctcttgaacctgggaggcagagattgcaataagccaagatcatgccactgcatgccagcctgggtgacagcacaagactgtctcaaaaaaaaacaaaaaaaggaaaaagaaaactagccccagtccctgtctaaattgttatagtttttgactattatctgaattagtcttatccaaatttcatatgcagattgatttttcattttgtatgtatattacatgatataactattttcatagaatatatttctaatttacaaacactgaattattagcttgatagagtttctcccaaaccttataaaactttgaaatgtacttatgtttgagctttaaaaattataaaaacttcatttaaacaagttgctggcatcattactagcctttccacctataattatgatgcatttgatgccactgaacagtaatagcacaaagaacaggtcacacagtctagactggattgagttttaattaaacttcttcatccatagcctgataagaatcaggctgggtctagaagagttatcagactgtaggcctgtattaattttgcaagctaatgttaatgtttactgccagccttgcatagcaatgccagtttgcagttgtgactatgatgtgacttttggtaaaaatggtttatatctaaagtagtttagattttatggaagtggctcttgattgtttggacaagcagggtaggtaaatttcaattacgtttgaagtgtaattaaatcctagaatagagcactctccagaaaaaaaaatgaaaaaagaatttggagaatatcctggcatgaaaacttttttgaataatacgtagaattttgacaaggttcatacagtgcatacagtgtgaccttttctgaggtgggcagggagggttgctacgttgtgttgatttaaaatttcaaggaggaacaaaaacattctagccaaggagaattgcattgttatttttttttctactaatttaaacgtgcatttttcacagttacacatttaagttttgctaccaaaaatggccatttttctagacagataacattttcctaaagtggaagagagatccactgttctaaaaaaaaaaaaaaaaaaaaacactaaattgtgccttctcccttaaattataagaagagtaatagtaaaaacttgtttaaactatattttctttttttctaatccctctcagttctccttagatctgcctcctacaaatgatcatgttgtttgcatctgcctgattgagttcccttggtcaaacctctccctatcactatcagaagttgttcactaaatgtattttcctatttctttcatgttgattgactttataagtcaccttggtaaacataacatttggctaccttctcatgctttataaatgaatttgatgaatggcagtttttatattttaaccctttaaaaagtttgtcaaggaaacaactcagagctaagaacaaaatctaacttggaatcagtttcttcctttggctgctgaagcagcagcaagtcacgtaacctcatttagttttttgatttacaaaatgtggataataacctacctcacagatgtgtgtgagcaactgtttgaaagcccttgtttaaatacagggtttatatccccacattcaatgtaaattcctttttttaaaaaaaataagtatctttgatactgataggatgagtatcttgatttttaggtaagatcacagtttcacaaattgtggtgttgttaggtgacatttaatatttcttgagacctcaagtattcaaatatcaaacttgtcctgtgttgtaacaaatattcagaatctcttaaaatgttggctgaagctgccttaatgtaccaaaatacagctctcaagactgttcacaaatatctgtggttgtacaatgttttgaacatttaatgtaaagttgttgtagaactgtgaactctaaggatagtatctttattgttttaggaagaatggttgtgttctttgtcatgtatgcttaaatatacagtggattttgaatgcaacaaataaaactgaaaacagccatttggttgtgtcatgacaatcataatataggatataatatttactttttttcaaaaacatcctgcattcattcattcttagcatacctttgaaaaagaaaaaaaaatccataggttgatacattgacccattgaagtacttcattacgtatttattgaaaattttttttaattgttgaaattgggaccactttttataattggtttcaagaaaaaaaaatgaacagacttccagtgcttttctgttcaaataaactccgattcaaatttcagttttgtttgttatatactttttgtgagtgttaaatgatatgggaaggatttgtctttcattaaccatatggaaaagatgtcttcctgaattacatagcatttcatagttacagattcttcctaattaatgtttgcaccatatgaaactcataggtaacaaacacaaaggagaaaagcagcctgtctgattgcttataagcttttttcacaaaatcaaattaaaagtctctgattcatttgaaagcta

SEQ ID NO: 170740 - DNA, 9280 bp, Homo sapiens
  Payload ID: 13606
  Gene Symbol: PRKAA2
  Gene Name: protein kinase, AMP-activated, alpha 2 catalytic subunit
  ENST ID: ENST00000610361
  CDS Start-End: 1-1659
atggctgagaagcagaagcacgacgggcgggtgaagatcggacactacgtgctgggcgacacgctgggcgtcggcaccttcggcaaattgaatattggagaacatcaattaacaggccataaagtggcagttaaaatcttaaatagacagaagattcgcagtttagatgttgttggaaaaataaaacgagaaattcaaaatctaaaactctttcgtcatcctcatattatcaaactataccaggtgatcagcactccaacagatttttttatggtaatggaatatgtgtctggaggtgaattatttgactacatctgtaagcatggacgggttgaagagatggaagccaggcggctctttcagcagattctgtctgctgtggattactgtcataggcatatggttgttcatcgagacctgaaaccagagaatgtcctgttggatgcacacatgaatgccaagatagccgatttcggattatctaatatgatgtcagatggtgaatttctgagaactagttgcggatctccaaattatgcagcacctgaagtcatctcaggcagattgtatgcaggtcctgaagttgatatctggagctgtggtgttatcttgtatgctcttctttgtggcaccctcccatttgatgatgagcatgtacctacgttatttaagaagatccgagggggtgtcttttatatcccagaatatctcaatcgttctgtcgccactctcctgatgcatatgctgcaggttgacccactgaaacgagcaactatcaaagacataagagagcatgaatggtttaaacaagatttgcccagttacttatttcctgaagacccttcctatgatgctaacgtcattgatgatgaggctgtgaaagaagtgtgtgaaaaatttgaatgtacagaatcagaagtaatgaacagtttatatagtggtgaccctcaagaccagcttgcagtggcttatcatcttatcattgacaatcggagaataatgaaccaagccagtgagttctacctcgcctctagtcctccatctggttcttttatggatgatagtgccatgcatattcccccaggcctgaaacctcatccagaaaggatgccacctcttatagcagacagccccaaagcaagatgtccattggatgcactgaatacgactaagcccaaatctttagctgtgaaaaaagccaagtggcatcttggaatccgaagtcagagcaaaccgtatgacattatggctgaagtttaccgagctatgaagcagctggattttgaatggaaggtagtgaatgcataccatcttcgtgtaagaagaaaaaatccagtgactggcaattacgtgaaaatgagcttacaactttacctggttgataacaggagctatcttttggactttaaaagcattgatgatgaagtagtggagcagagatctggttcctcaacacctcagcgttcctgttctgctgctggcttacacagaccaagatcaagttttgattccacaactgcagagagccattcactttctggctctctcactggctctttgaccggaagcacattgtcttcagtttcacctcgcctgggcagtcacaccatggatttttttgaaatgtgtgccagtctgattactactttagcccgttgatctgtctctagtttctttctgttattgcactatgaaaatcagttatattctttaaatttttatcttacttttggataatatccactgcaatactaattgagaaacatgaattatttccaggggcacacaatgctattgaaattactgaaaacaaaatatctgacatcttatttacttgtagaaatctgtaattctattgtgcctatgataaattcacataggcaatatctttaataggttaatatcaatgaagatttttaattacaataatgagttcactacagacgattaacacaccacactggcgaaccatctcaatgtaagggtggtttggcaacacctccttgctttgctgtttggtgtaggtaaatctagtttacttcctaaatttcagtaggctttatgctgtgtttatgcccccaatttattttaacaaaagaagattaaaaagtaaaagaaccacgagtaagatattatttaaatgttgaaatcttaaaaacctgcctccaagatttcagaagccaagtttttctaacagtatttgtacaaatactgcctagtgtattcaacagaaggactgtggtcatgtaacaggtaaccacaattttcaggtttcttaaaaacagctgtaactaactcaggatttttatcttgagatttccctgaataatatatttatcttaagagccttcaagtttcaaattaatattggaacatctggaattgcaacaacttttgtcttttacataaacttacgtcatttaaaaaatgtcttcaaaatctacctttctcaaattctttttgcctctatttatttttgcatttcaccaacagtgataaaatagttaaatgaaacaaagcaaagtatcaacagtcccttaaatgagaatccttatctttgatctttattttctgtgttaggtgttagggtcctggtgcagctcataatgctaattcttcattggaagccactcccttcacctcacctcacctagtcactattgtctttgttcattgtttgatcctgagtggttgattgatatagctttgaatcttttctagtccaagtttgaaaacactgttctggccctaagggctggctatgacctttactgttgaacctgatagggcagggaagctttgaacatcaagaaaaaatttttatcttaaataaataaatatatatattcacacaccagtgcttttaagcaaaaaccagtttttttgtttgtttgttttgctttgtgcaggttttctttaagattaaaaaaacacaaactatagcagggtagataatagtttattgattatattttgttttagtaaaagtatttaattttaaattctgtgtaatttatctaatttgtatttattcatttgttatttttatgttgtaattaacacttatttacctggattaccctaaaaaaattaagctcttgaaaacaaaaaaatgacattaccttgacaggcttctctttgccaaaagtaatgtatgttctgccaagaagcaaatgagaatgttagactaagtttctcctgtgttagtggaaaacaagtgtgtctatctttaaatattctttgaatcaggagtttgcgttgtgtcacatcatatggctttgcagatcttttaaaaactgatgttaaataacttataagtccaacttcttaatatcaagataaatgaatagttcaccaatttgggaaggagggcgggttgcaatttgagatagtttaaggtttaattattgaaagactgccatcttgtggcaccaaaaggtaatttttacatgattatttgtatagtgataagcagtcctgctgtgttagcctggtccattatagatatggcatagttttgggttctctaaatgggtccatacctcttttgggaaaaaacagggccacctcataatatttgcctgattatgaatggaattaccttagaaataaggaactaatcagattacttaaccccaatgacaaaatccacaaaaattttgaaggcagagaaacagaaggaatccagtgatgttttagctccattagtctaataggtcagatattaaaaaattgttcatatcaaaattaccttatatggattattgccatgttttttgagagttaattatttactgttttctaattcttgccagtatttatgaacagctgtagcttgatatttacctactgaattttaggagaactaatggtcacagtttgggttcttttatgtgtatgtttttaaaacagctattttgtgaatctaggtggttggtttttagaagatttcaggagatgcagtccagcacaattagagctggaacattgttacagcaggctttttgttgctcatgggcagatagagggaaagaatcagttgttagccccaaatttccacatttcagtgttgtaaactctgaatgtgataggtagatgtgggctaagaataatttcctccagtgaagacacgggagaagagcttctattatgaggttatagataaggccttagttatatcatggaaatggactccatgtagttctagaactgcatttcccaaagtatatcctgtgagatgctccacagaaaaaatgattgcatggactaagtttgaaaaatgttgcatgctactcttcccctcgaagatgacagtggatgtcagcattaaagactttgacaggtctttctgtgaaaaaaagaaagccacataactttgttgaactttgcccaaattaatttttcattttaaaaaacttaatagcccatgaaaagcaaatttgggaaatacattttttaggaaaatactgtcccagaatgccataattagggtagttaataattaacacttccatttctcttactggttgttgggagaatctgattgaaaattagaattactttgttttaacttgcagacatgttcatcgtgagtgaatgctggattaaatagaattttctgtgtctgcaacttgtttcatgacaccttggttttcttaatcatcttgtattattatttgagtgcaacattattcttatgcatgggtgactgaaaaacctgaaacaagattacttgttaaaaaaaagtctaagagactaatgactcatgcttatggctcagtgggtaatgaatcagtgtcactgattcttacttttaaaatgtgtagtcagtgaacattttctaaatacttttctttgggataccatatgaagatctaattccttatgtttcagtgtaggaacagctaccttctcaaatagaatatgcagggagggaagtaggcaaaccatttacaagttgggtttttgttttgattaacctgttaagagacacttttgtaatctctagtgtttacattcctttatactagctatctataaagagaatccagaaggctaaattaatcagaaataattatatttctatgtcagggtattggctatatgtagcatgaacaattctccattttctgcaaatgggtttttcaggacagttttataattctgagtttgctttttcttattccctagacagtttgtactcagggaatacaaattgatttttactgttaaatgagacatagtttagaaaaaatcataagcaactattgtagatttttgatctgtttggatttatctgtagcattgaataatgtgcagtgtactgagttaatgtaggcacctcactttggatttataaaatgtaaaaacctggaacatgcctgccacagacaccactttgtctattcaccgggtactaatttacatcctattaatggttgtaaaagctgagtgtctaaatgctagacatgttcacaattttgtctgtttttgtttatttgtttttaagacccaaaccttttcaatcttgcatttatttacttggttctcctgtgtcaccctgtggctttttaaatagggaatgtaatttattttaatagtagttctcaaagactctattaaaaactctggacgagggatatgtgcaatctgttggtaagtcacatcctatgtttggcctcatttttataactcctaaaatgagaaaggtagattttaacacttctaaggtacctttgagctttaaagttcttttctgcttttccatatgatttgtgttagtgttcactttttatatatttagagtttttatatgagtgtgaatgtttctgttttgatttggtgaggcatgtcagaggtatatacttgaatatttttctaaatacagctgctggaggaatgcaaatggcaaaaatcatccagaaaaccaaacacggtgaaacatcacatccatttggcatgaagcaaagcattacaaatttggagtgatgaaagtgttccatatattttttatagtgatttttcgatctagagacccttcatattgtttacttactattacgataactttgagaggtaaccagagaaagcatttttgccatttccagatgaggaagcaggaccagaaagctcttcataaagctttaacaccatacaagtatccagcagtgatcaattgctctttataggaaaccacctttcctctggggaagaacagtctgaattaataaaacatcagagtggttgagtagtaaaaataaacacagatgtattgctttcaagtcttagagtgacataaagtagtcttaaataaatagttcttagtttattttaagcagttgattgtactaacgagatgtaattatctgaagtatttatgattagcatattggtttttataagtatttctgagttattgagggtgcttaaaaatgctgaagaaactttaaaacatgattcttcttataattttatgtgattcttatagcacaatcatttttgaaaaaggaaaactaggctgggtgtagtggctcatgcctataatcccagcactttgggaggccaaagtgggtggatcacccgagttcaggagttcgagaccagtctggccaacatggtgaaacctcgtctctactaaaaataccaaaattatccggtgtggtgacaggctgcttgtaatcccagctactcgggaggctgaggcacgggaatctcttgaacctgggaggcagagattgcaataagccaagatcatgccactgcatgccagcctgggtgacagcacaagactgtctcaaaaaaaaacaaaaaaaggaaaaagaaaactagccccagtccctgtctaaattgttatagtttttgactattatctgaattagtcttatccaaatttcatatgcagattgatttttcattttgtatgtatattacatgatataactattttcatagaatatatttctaatttacaaacactgaattattagcttgatagagtttctcccaaaccttataaaactttgaaatgtacttatgtttgagctttaaaaattataaaaacttcatttaaacaagttgctggcatcattactagcctttccacctataattatgatgcatttgatgccactgaacagtaatagcacaaagaacaggtcacacagtctagactggattgagttttaattaaacttcttcatccatagcctgataagaatcaggctgggtctagaagagttatcagactgtaggcctgtattaattttgcaagctaatgttaatgtttactgccagccttgcatagcaatgccagtttgcagttgtgactatgatgtgacttttggtaaaaatggtttatatctaaagtagtttagattttatggaagtggctcttgattgtttggacaagcagggtaggtaaatttcaattacgtttgaagtgtaattaaatcctagaatagagcactctccagaaaaaaaaatgaaaaaagaatttggagaatatcctggcatgaaaacttttttgaataatacgtagaattttgacaaggttcatacagtgcatacagtgtgaccttttctgaggtgggcagggagggttgctacgttgtgttgatttaaaatttcaaggaggaacaaaaacattctagccaaggagaattgcattgttatttttttttctactaatttaaacgtgcatttttcacagttacacatttaagttttgctaccaaaaatggccatttttctagacagataacattttcctaaagtggaagagagatccactgttctaaaaaaaaaaaaaaaaaaaaacactaaattgtgccttctcccttaaattataagaagagtaatagtaaaaacttgtttaaactatattttctttttttctaatccctctcagttctccttagatctgcctcctacaaatgatcatgttgtttgcatctgcctgattgagttcccttggtcaaacctctccctatcactatcagaagttgttcactaaatgtattttcctatttctttcatgttgattgactttataagtcaccttggtaaacataacatttggctaccttctcatgctttataaatgaatttgatgaatggcagtttttatattttaaccctttaaaaagtttgtcaaggaaacaactcagagctaagaacaaaatctaacttggaatcagtttcttcctttggctgctgaagcagcagcaagtcacgtaacctcatttagttttttgatttacaaaatgtggataataacctacctcacagatgtgtgtgagcaactgtttgaaagcccttgtttaaatacagggtttatatccccacattcaatgtaaattcctttttttaaaaaaaataagtatctttgatactgataggatgagtatcttgatttttaggtaagatcacagtttcacaaattgtggtgttgttaggtgacatttaatatttcttgagacctcaagtattcaaatatcaaacttgtcctgtgttgtaacaaatattcagaatctcttaaaatgttggctgaagctgccttaatgtaccaaaatacagctctcaagactgttcacaaatatctgtggttgtacaatgttttgaacatttaatgtaaagttgttgtagaactgtgaactctaaggatagtatctttattgttttaggaagaatggttgtgttctttgtcatgtatgcttaaatatacagtggattttgaatgcaacaaataaaactgaaaacagccatttggttgtgtcatgacaatcataatataggatataatatttactttttttcaaaaacatcctgcattcattcattcttagcatacctttgaaaaagaaaaaaaaatccataggttgatacattgacccattgaagtacttcattacgtatttattgaaaattttttttaattgttgaaattgggaccactttttataattggtttcaagaaaaaaaaatgaacagacttccagtgcttttctgttcaaataaactccgattcaaatttcagttttgtttgttatatactttttgtgagtgttaaatgatatgggaaggatttgtctttcattaaccatatggaaaagatgtcttcctgaattacatagcatttcatagttacagattcttcctaattaatgtttgcaccatatgaaactcataggtaacaaacacaaaggagaaaagcagcctgtctgattgcttataagcttttttcacaaaatcaaattaaaagtctctgattcatttgaaagct

SEQ ID NO: 170741 - DNA, 2610 bp, Homo sapiens
  Payload ID: 13607
  Gene Symbol: PRKAB1
  Gene Name: protein kinase, AMP-activated, beta 1 non-catalytic subunit
  Uniprot ID: Q9Y478
  ENST ID: ENST00000229328
  CDS Start-End: 493-1305
agcgcctcgtcctgggcctggccctgggcggccggctgctgactgcgactgcgcgctccgaggcctgcagagacggcccggggcacctgttaccgcaccgctcaagaccggaagcggaaatggaatcgagatagcctcgcgcgtttagctggccgccgccacctccacgccctaggccgggccgacttacggagtcgccggaagcggaagtcgctgaggggtggtgaagcggttgggaaagtgtcggtttatcttcgcgccccttgcgttcttgccgcggcttgcctgggcaggtaaagcgcgattgcgagagctcggcaaccctgccgactcagccggaaccggctcccggcccgaggggcgtggtgtcctggtgctccgactccttccgcaggctccttgggacccgcggttccgggagtcccttgctcagggtccctttcctgcagtgaggcgccgtccgccttccctgtgtccccgcagacccccatcatgggcaataccagcagtgagcgcgccgcgctggagcggcatggtggccataagacgccccggagggacagctcggggggcaccaaggacggggacaggcccaagatcctgatggacagccccgaagacgccgacctcttccactccgaggaaatcaaggcaccagagaaggaggaattcctggcctggcagcatgatctggaagtgaatgataaagctcccgcccaggctcggccaacggtgtttcgatggacggggggcggaaaggaagtttacttatctgggtccttcaacaactggagtaaacttcccctcaccagaagccacaataactttgtagccatcctggatctgccggaaggagagcatcagtacaagttctttgtggatggtcagtggacgcacgacccttccgagcccatagtaaccagccagcttggcacagttaacaacatcattcaagtgaagaaaactgactttgaagtatttgatgctttaatggtggattcccaaaagtgctccgatgtgtctgagctgtccagttctcccccaggaccctaccatcaggagccctacgtctgcaaacccgaagagcgctttcgggcaccccctattctccccccacatctcctccaggtcatcctgaacaaggacacggggatttcctgtgatccagctttgcttcctgagcccaatcacgtcatgctgaaccacctatacgcgctgtctatcaaggatggagtgatggtgctcagcgcaacccaccggtacaagaagaagtacgtcaccaccttgttatacaagcccatatgaagagctgggggcggatggtggcccaggagacagcacaccaccaggctccacacgtgcatgctttccccaagagggaatggactgtacattgctcatttcacactcttcagaagacatttcatacctgccctggtcctgcttgaaggtttgtccaggcagagcagctcctgcagcgcctcggtctgtgacagtcctcctagcacccccatggctttgagcctcggggactcatcaagtccaagaaaagagggaggggtggcagaggatctgcagccctggccccgcggtgcatgaggctgggtgcagttctaaacctacattctcgatttttcttaagccaaaaatgaatgctaactcctttgccagtaaaattctgggaaacagggactgaggccacacatcatttccagtcatctgtgtgtttttaaggccagccacttgtccctgttgaggcctggctatggaactaaatacagtgttggtcttgcctgtccttcaaaatcaacaacagattgtctctcggctccagggaggtgtcatttctatagaaattagaagctttctgatttctagatgaggttttacaattgtttcttacagtcatgtgcactaagtactctttttgtaagcagaggtggctggctctgcagccttaaggccattttttaagtcaccacgtctagaagtcacatgaactctgctcagcaataatctgttctcagaacagacttttcaacctgctgccggatttctccattcagctggatgatcctcaggactgaccagttagctggcaggttgtccagctttttattccagtcataataggtgacagtgttaaccgtgaaaacttgagaggcactctgccctcttccctataaaatcacacagcgtgattttacaaggtcccgtggcaccttgctcaggacctctgcccctagttagcaagactgcagcagttgctgttgcttattctgaaaggaatgtagaacttgacagcagccttctgagtctgggtcaggaagatgtcctttggaccaaagcagacttctttatacgcagctcagtttcccgggagtcgccacagatgtacccactagcccaggttgctgtgagtcagcggaagctcccgttatgccctttgctcctggtgggagagggaggagtgagctccctgggttccagtatttacttggtatacctgagtttgggggtacccttttttgtgacttttcaaaacagtgaattactgtcaccttgatggacaagtttcaataaaactttgtaaaaataattggacatgtg

SEQ ID NO: 170742 - DNA, 583 bp, Homo sapiens
  Payload ID: 13607
  Gene Symbol: PRKAB1
  Gene Name: protein kinase, AMP-activated, beta 1 non-catalytic subunit
  ENST ID: ENST00000545223
  CDS Start-End: 397-583
attgtctgttgtagggagctcgcttatggctttctgagtaaactgctctgcttctaggcaccagagaaggaggaattcctggcctggcagcatgatctggaagtgaatgataaagctcccgcccaggctcggccaacggtgtttcgatggacggggggcggaaaggaagtttacttatctgggtccttcaacaactggagtaaacttcccctcaccagaagccacaataactttgtagccatcctggatctgccggaaggagagcatcagtacaagttctttgtggatggtcagtggacgcacgacccttccgagcccatagtaaccagccagcttggcacagttaacaacatcattcaagtgaagaaaactgactttgaagtatttgatgctttaatggtggattcccaaaagtgctccgatgtgtctgagctgtccagttctcccccaggaccctaccatcaggagccctacgtctgcaaacccgaagagcgctttcgggcaccccctattctccccccacatctcctccaggtcatcctgaacaaggacacggggatttcctgtgatccagctttgcttc

SEQ ID NO: 170743 - DNA, 1673 bp, Homo sapiens
  Payload ID: 13607
  Gene Symbol: PRKAB1
  Gene Name: protein kinase, AMP-activated, beta 1 non-catalytic subunit
  ENST ID: ENST00000540121
  CDS Start-End: 843-1157
cgcccggctaattttttatatttttagtagagacggggtttcaccgtgttagccaggatggtctccatctcctgacctcaggagatccgcctgcctcggcctcccaaagtgctgggattacaggcgtgagccactgaacccaccctacttattttttttttttccttctttgagatggagtctcactctgttgcccaggctggagggcagtagcacaatctcggggcactgcaaccttcgtctcccggactcaaaccatcctgcctcagcctcccgagtagctgggactacaggcgtgtgccaccatgcctggctaattttgtgtatttttggtagaggtggggtttcgccatgttgcccaggttggtcttgaactcctgacctcaagtgatccgcccgcctgggccgcccaaagtgctgcgattacaggcatgagccaccactcccggcctcaccctgcttttttttaaagcgtacatagaaaagtctttcagcttctagaggcaccagagaaggaggaattcctggcctggcagcatgatctggaagtgaatgataaagctcccgcccaggctcggccaacggtgtttcgatggacggggggcggaaaggaagtttacttatctgggtccttcaacaactggagtaaacttcccctcaccagaagccacaataactttgtagccatcctggatctgccggaaggagagcatcagtacaagttctttgtggatggtcagtggacgcacgacccttccgagcccatagtaaccagccagcttggcacagttaacaacatcattcaagtgaagaaaactgactttgaagtatttgatgctttaatggtggattcccaaaagtgctccgatgtgtctgagctgtccagttctcccccaggaccctaccatcaggagccctacgtctgcaaacccgaagagcgctttcgggcaccccctattctccccccacatctcctccaggtcatcctgaacaaggacacggggatttcctgtgatccagctttgcttcctgagcccaatcacgtcatgctgaaccacctatacgcgctgtctatcaaggatggagtgatggtgctcagcgcaacccaccggtacaagaagaagtacgtcaccaccttgttatacaagcccatatgaagagctgggggcggatggtggcccaggagacagcacaccaccaggctccacacgtgcatgctttccccaagagggaatggactgtacattgctcatttcacactcttcagaagacatttcatacctgccctggtcctgcttgaaggtttgtccaggcagagcagctcctgcagcgcctcggtctgtgacagtcctcctagcacccccatggctttgagcctcggggactcatcaagtccaagaaaagagggaggggtggcagaggatctgcagccctggccccgcggtgcatgaggctgggtgcagttctaaacctacattctcgatttttcttaagccaaaaatgaatgctaactcctttgccagtaaaattctgggaaacagggactgaggccacacatcatttccagtcatctgtgtgtttttaaggccagccacttgtccctgttgaggcctggctatggaactaaatacagtgttggtcttgcctgtccttcaaaatcaacaacagattgt

SEQ ID NO: 170744 - DNA, 2303 bp, Homo sapiens
  Payload ID: 13607
  Gene Symbol: PRKAB1
  Gene Name: protein kinase, AMP-activated, beta 1 non-catalytic subunit
  Uniprot ID: Q9Y478
  ENST ID: ENST00000541640
  CDS Start-End: 192-1004
aagcggaaatggaatcgagatagcctcgcgcgtttagctggccgccgccacctccacgccctaggccgggccgacttacggagtcgccggaagcggaagtcgctgaggggtggtgaagcggttgggaaagtgtcggtttatcttcgcgccccttgcgttcttgccgcggcttgcctgggcagacccccatcatgggcaataccagcagtgagcgcgccgcgctggagcggcatggtggccataagacgccccggagggacagctcggggggcaccaaggacggggacaggcccaagatcctgatggacagccccgaagacgccgacctcttccactccgaggaaatcaaggcaccagagaaggaggaattcctggcctggcagcatgatctggaagtgaatgataaagctcccgcccaggctcggccaacggtgtttcgatggacggggggcggaaaggaagtttacttatctgggtccttcaacaactggagtaaacttcccctcaccagaagccacaataactttgtagccatcctggatctgccggaaggagagcatcagtacaagttctttgtggatggtcagtggacgcacgacccttccgagcccatagtaaccagccagcttggcacagttaacaacatcattcaagtgaagaaaactgactttgaagtatttgatgctttaatggtggattcccaaaagtgctccgatgtgtctgagctgtccagttctcccccaggaccctaccatcaggagccctacgtctgcaaacccgaagagcgctttcgggcaccccctattctccccccacatctcctccaggtcatcctgaacaaggacacggggatttcctgtgatccagctttgcttcctgagcccaatcacgtcatgctgaaccacctatacgcgctgtctatcaaggatggagtgatggtgctcagcgcaacccaccggtacaagaagaagtacgtcaccaccttgttatacaagcccatatgaagagctgggggcggatggtggcccaggagacagcacaccaccaggctccacacgtgcatgctttccccaagagggaatggactgtacattgctcatttcacactcttcagaagacatttcatacctgccctggtcctgcttgaaggtttgtccaggcagagcagctcctgcagcgcctcggtctgtgacagtcctcctagcacccccatggctttgagcctcggggactcatcaagtccaagaaaagagggaggggtggcagaggatctgcagccctggccccgcggtgcatgaggctgggtgcagttctaaacctacattctcgatttttcttaagccaaaaatgaatgctaactcctttgccagtaaaattctgggaaacagggactgaggccacacatcatttccagtcatctgtgtgtttttaaggccagccacttgtccctgttgaggcctggctatggaactaaatacagtgttggtcttgcctgtccttcaaaatcaacaacagattgtctctcggctccagggaggtgtcatttctatagaaattagaagctttctgatttctagatgaggttttacaattgtttcttacagtcatgtgcactaagtactctttttgtaagcagaggtggctggctctgcagccttaaggccattttttaagtcaccacgtctagaagtcacatgaactctgctcagcaataatctgttctcagaacagacttttcaacctgctgccggatttctccattcagctggatgatcctcaggactgaccagttagctggcaggttgtccagctttttattccagtcataataggtgacagtgttaaccgtgaaaacttgagaggcactctgccctcttccctataaaatcacacagcgtgattttacaaggtcccgtggcaccttgctcaggacctctgcccctagttagcaagactgcagcagttgctgttgcttattctgaaaggaatgtagaacttgacagcagccttctgagtctgggtcaggaagatgtcctttggaccaaagcagacttctttatacgcagctcagtttcccgggagtcgccacagatgtacccactagcccaggttgctgtgagtcagcggaagctcccgttatgccctttgctcctggtgggagagggaggagtgagctccctgggttccagtatttacttggtatacctgagtttgggggtacccttttttgtgacttttcaaaacagtgaattactgtcaccttgatggacaagtttcaataaaactttgtaaaaataattgga

SEQ ID NO: 170745 - DNA, 555 bp, Homo sapiens
  Payload ID: 13607
  Gene Symbol: PRKAB1
  Gene Name: protein kinase, AMP-activated, beta 1 non-catalytic subunit
  ENST ID: ENST00000537400
  CDS Start-End: 96-272
ccttgggacccgcggttccgggagtcccttgctcagggtccctttcctgcagtgaggcgccgtccgccttccctgtgtccccgcagacccccatcatgggcaataccagcagtgagcgcgccgcgctggagcggcatggtggccataagacgccccggagggacagctcggggggcaccaaggacggggacaggcccaagatcctgatggacagccccgaagacgccgacctcttccactccgaggaaatcaaggacggcagaagagaatgagagcaagcaggggaaatgccagatgcttataaaaccatcagatctcatgagactcactcactgtcagagaacagcatggggaaaccgcccccatgatcgatacctccacctggtcctgcccttgacacgtggggattatggggattacaattcaaggcaccagagaaggaggaattcctggcctggcagcatgatctggaagtgaatgataaagctcccgcccaggctcggccaacggtgtttcgatggacggggggcggaaaggaagtttacttatctgggt

SEQ ID NO: 170746 - DNA, 258 bp, Homo sapiens
  Payload ID: 13607
  Gene Symbol: PRKAB1
  Gene Name: protein kinase, AMP-activated, beta 1 non-catalytic subunit
  ENST ID: ENST00000630317
  CDS Start-End: 82-258
gttccgggagtcccttgctcagggtccctttcctgcagtgaggcgccgtccgccttccctgtgtccccgcagacccccatcatgggcaataccagcagtgagcgcgccgcgctggagcggcatggtggccataagacgccccggagggacagctcggggggcaccaaggacggggacaggcccaagatcctgatggacagccccgaagacgccgacctcttccactccgaggaaatcaaggacggcagaagagaatga

SEQ ID NO: 170747 - DNA, 5417 bp, Homo sapiens
  Payload ID: 13608
  Gene Symbol: PRKAB2
  Gene Name: protein kinase, AMP-activated, beta 2 non-catalytic subunit
  Uniprot ID: O43741
  ENST ID: ENST00000254101
  CDS Start-End: 140-958
aatcgctggtcgccagcgaggggtgcggcttcaatttcaataactttattggtggcctgatctgcagaacagccatcacatcagtggcccttggaggagggagcgcatcgcccgaggtggtccccgacgagctgcagccatgggaaacaccaccagcgaccgggtgtccggggagcgccacggcgccaaggctgcacgctccgagggcgcaggcggccatgccccggggaaggagcacaagatcatggtggggagtacggacgaccccagcgtgttcagcctccctgactccaagctccctggggacaaagagtttgtatcatggcagcaggatttggaggactccgtaaagcccacacagcaggcccggcccactgttatccgctggtctgaaggaggcaaggaggtcttcatctctgggtccttcaacaattggagcaccaagattccactgattaagagccataatgactttgttgccatcctggacctccctgagggagagcaccaatacaagttctttgtggatggacagtgggttcatgatccatcagagcctgtggttaccagtcagcttggcacaattaacaatttgatccatgtcaagaaatctgattttgaggtgttcgatgctttaaagttagattctatggaaagttctgagacatcttgtagagacctttccagctcacccccagggccttatggtcaagaaatgtatgcgtttcgatctgaggaaagattcaaatccccacccatccttcctcctcatctacttcaagttattcttaacaaagacactaatatttcttgtgacccagccttactccctgagcccaaccatgttatgctgaaccatctctatgcattgtccattaaggacagtgtgatggtccttagcgcaacccatcgctacaagaagaagtatgttactactctgctatacaagcccatttgaagggatcccttcttgcctctaaggattcaggagaagcatctcccttgcatttctggactgaaccagtcttacctgagactggaaggctgatttgctttgaggctgatatgtgtgtttcagagcctctgagtaggatgctctgcttttgcatttgattgcagatgagagctttatgagttcacggaatttattttaagaaaaaaaaatatacatatgagaagaaggtaaatggaagcctcctagccccagctagaagtattgtttctgcctgtgggttttcaccaagacctgtttgggggcgctgcaggaataactatataggaagatttttcctaaaatgaaagaacagcaaactcttaggatccttgttgggtggagattctatcactgctaccttggctctccaaggaatgggcttgtgctagaccgctgccctacttaacagctgcctcattgcaagggcagtttttcttgcatgggttctctatattcccagagtatgtggcacaatctgtgttgtttatatgataccagatgccccacaagaacccttattcctctcatttcacattcttcctttaatagcctccttcagatcccatacctgacccctctctaacacaaaacttattgggtaagtgactttgaaaagttttgtggcacctgacccaccccagacactagggctatcagaaggtctcctttttagcccagcacaggcccaggccactttgtcgtgtttgttttaacttctaaagaaaatatgtttcagcattataagaaaggcagaatgcagaacacctacatttttgttttagtttggtgccaaggctcaggctgtattggcaaattcccgaaagttttcccactttgcctggccctgcttctgtcttttctttctcagtaaacagttctgaaggcaggagtggaacccgggagtattttcatgtctttcatccttgaaagatttttatgtgcctgcattttttttttaattaaaaaatgccttttcattggtcttaagagaccgcattggagaatttcaggcttttgataaatgcttcttcaaagagattttcttctctagtctagccttccacattcttagattaatatggccaaccctgtacacatcactacactaaacactgctctagataaactgctcaagttcatttaactcatttgatgcacctaaaggggttcctcattttaaagatttgttaggccaagaagcaagagagtattcctagtattcccaaccatgaaaagtatcattctttgcaccaaatgttaacaaaatcattttgttctcctgcctcttctttttaaaggtgtttgatgattaagtggggtcactgaattccatttgtggactgaaaagtattcaatccacttttggggttcagagataaaacattttttcccaagtagctggggctcttccattttgcagataagtcaaataatcaacactaaaggaggctaaactgttgatgaatgagagactccctgactgctcagatgaccctagccacactgaaagggcacctacaggtcagtttagctacctcctgtctttcccatgcaaagctgataacacagttgtctttggacttgtagacctcttggattccaggtgtgatggagtaaagtgtgggattgttgttttgctgggatgcaaataactaaatgctttggtggttaattgctaagagtaaatactactttagccatccaaggccaccttctgcagcaaaaggcttttgtggagaaccttttatgttcccaaccactttttgaatggtgtgccatttaaaaatccaggccagatcctattataaccaactctcaggatttacagccttcagttgtactagaattttgtttttatccaatactcattaaataagtgggccacttaggaagattcaaaatcttggttattacatgaagtttgttatatttcttgtcaacagtattgaaatgtaatatgtatgtgttcatgtatgaaaatttttactccacacaggtgtttcagtagagtggggcaggaaaagagatctcttcgatttctttcaggcctgaggcttttgtgaaatgcgtcagccccctgtgacagtaggttttgatgctagtgatcttcagatctttctctctggaaatgtgcagagagtgtcagtttcccaagttctgaggtaactctcagcccagatgtgaaatgggagcctaccagctggtatagaagggaatgggtaggaggcactgggtgctgactcattcagcactgtcccttttctatactgctgatacatcccatggttctgagaagccttatctcagtctatttggaagagagggaggaagagaaggaagtaacccaaagtactactcatttatcattgtatattgattagttaaagggataattaatttaatgctgaggagagtttgacagattttgaaaatgagtaaaggcaaaaaaaatttttttagcctttattttgcttttgggaattttacagagtcaaagtaggcagaataagaaaatagttcttcaggagggccgacctttaaagaacttcaacatagtttcggaattgtggggaagagaagagtgactgagctgagaagtaataatagaataaagggttgagtaacttacaactgaaaatgatctcttttaaaaagaaattaaatcagacaccacatggtggtgtccttggatctcactgtacagaattagcagtgtataaccatcttctcttttcatcttgttccaattctctcctctttcctttccattctgctttaagctcatgtgtcaggcagactttaccagagtgtcagacattacctaaaacacatacgttagccatgctgctggtatggagaaattccacaccatgattattagcctcctttaagctgaatgggatttaaccattctaggcaacacccctgaagggcatacctaacctcaatagtgttggcttttaaaacgtatgtttgtatggtagagaaactttgtaaaagaagaatccaagagaagtttgtgaggatcctacaaacccaggcccactcactttgctctaattctttctagtatcttgtagatctaatgggtctgggataaaaactttgaaaagtgtcaatattccatgtatgctgctgaaatgaagttaagtttggaaagaagtgatacctctagactgggtttatattaatctgggatataaatgaagaagacatactaatagaactccttgcttttaattggggaaatagggctttaataattttgacctcaactaaaaatgatatgcaatagtctctgtgtgtgtttgaaatacattgtgttctcagagatttctacattctcacgttctagtgatttggggcatgggcttaatagcagatgtacagtgtattcctgcattattgtgattccccttaaagcccagttcttgctgtcttctaccaggggctgctgactccagttacccatggaatgcaggacctgggaggggtagccattagggtctttcaaaactctttggatctaagcatttgtctctccttaagtgccaatcacaattggatatggaaggactgtgatttctgcaatgaacccaaacttttagagtaaaaagccaaatttaaattataagaaagaagggaaaaaagagaaaaactcaagtctattacttgtagagtccaattcttagcaatggaatcgctctaggattctagtttgggctttgtctggatttgcttttctcagttgtgctttgaagtgaataagctttgttacaaattaattttttattagttccaatattagttggagttaacttgaattgattgtatgtagcacagcacttttgcagtaagattggtgtgaaatactaaacactatggattttgtaggtgtcaggttaaatggtcaagggatacctacattaagtcatatattaggtattgatgatcttacttcttttctgttcccctgtacaaaacacttacctaacccagcttgtggttttaggacagccaaagctcactgttgttggttagtcctaatcactacacgggtctcataaatgagacttgtttgaattttggtacattggagcatgttggttggtattacacggcagcatttcgaatgagtgcagctctgtgtctgtcagaaaggagagataagactactttgaagggaattaaatatgtgagtcctctttttaatggtgctttttgtaacctttaatgctgaggtacagagctgcttttcaatatttcataaaggagtggcagacaagagtggattttaaagctgttcttcaaacgtaatttgtcactggactctgacacacctggaaattatatgatatgatacatacagaaatgttgtgggttttttccataaaactttaataaaagtattatacagcaataa

SEQ ID NO: 170748 - DNA, 1683 bp, Homo sapiens
  Payload ID: 13609
  Gene Symbol: PRKAG1
  Gene Name: protein kinase, AMP-activated, gamma 1 non-catalytic subunit
  Uniprot ID: P54619
  ENST ID: ENST00000316299
  CDS Start-End: 40-1062
tttcctaaagcgaggaaaccaagccgggcgcctcttgcaatggagacggtcatttcttcagatagctccccagctgtggaaaatgagcatcctcaagagaccccagaatccaacaatagcgtgtatacttccttcatgaagtctcatcgctgctatgacctgattcccacaagctccaaattggttgtatttgatacgtccctgcaggtgaagaaagctttttttgctttggtgactaacggtgtacgagctgcccctttatgggatagtaagaagcaaagttttgtggtgctgagggctctgtcttgtcctctaggcatgctgaccatcactgatttcatcaatatcctgcaccgctactataaatcagccttggtacagatctatgagctagaagaacacaagatagaaacttggagagaggtgtatctccaggactcctttaaaccgcttgtctgcatttctcctaatgccagcttgtttgatgctgtctcttcattaattcggaacaagatccacaggctgccagttattgacccagaatcaggcaatactttgtacatcctcacccacaagcgcattctgaagttcctcaaattgtttatcactgagttccccaagccagagttcatgtccaagtctctggaagagctacagattggcacctatgccaatattgctatggttcgcactaccacccccgtctatgtggctctggggatttttgtacagcatcgagtctcagccctgccagtggtggatgagaaggggcgtgtggtggacatctactccaagtttgatgttatcaatctggcagcagaaaagacctacaacaacctagatgtatctgtgactaaagccttgcaacatcgatcacattactttgagggtgttctcaagtgctacctgcatgagactctggagaccatcatcaacaggctagtggaagcagaggttcaccgacttgtagtggtggatgaaaatgatgtggtcaagggaattgtatcactgtctgacatcctgcaggccctggtgctcacaggtggagagaagaagccctgagctgggggaaggggtcatgcagcaccaggggatatgcccaactcactgcctgctggaagctctgtgggaatcagatgaaacttgagggaattgtgactctgttccctgttcagggtcccctgcccttctatctgggagctagggaaggtatgggggaggaaagagaatggatttatagctacccttaccctcacacatacacttgaaaaaactttcagcctagccagttctagcccctgtcctcttagatatatccccctttctgggtgaactataggctctgtgcctctcagacaaattctgatctctaagagatccccagacctcacttgcctctgcctccatcttggccctgattcaaccctaagataatagcacaacaaaattcttcataaagatatttttattcacctgttccgtgctatatggaggaggccaagtccatttagtgacatttcttcccataatgtgagtggggaggattgtggggaggaggggctttgggttcctgtgtttgtgcatatgaagggagatgggggttaggtggaggaggagagcagcgtggttagctaaggttattgctttttgtggcaaatctaattaaatgacaggaatctcttc

SEQ ID NO: 170749 - DNA, 822 bp, Homo sapiens
  Payload ID: 13609
  Gene Symbol: PRKAG1
  Gene Name: protein kinase, AMP-activated, gamma 1 non-catalytic subunit
  ENST ID: ENST00000548362
  CDS Start-End: 1-282
cgtgtggtggacatctactccaagtttgatgttatcaatctggcagcagaaaagacctacaacaacctagatgtatctgtgactaaagccttgcaacatcgatcacattactttgagggtgttctcaagtgctacctgcatgagactctggagaccatcatcaacaggctagtggaagcagaggttcaccgacttgtagtggtggatgaaaatgatgtggtcaaggggatatgcccaactcactgcctgctggaagctctgtgggaatcagatgaaacttgagggaattgtgactctgttccctgttcagggtcccctgcccttctatctgggagctagggaaggtatgggggaggaaagagaatggatttatagctacccttaccctcacacatacacttgaaaaaactttcagcctagccagttctagcccctgtcctcttagatatatccccctttctgggtgaactataggctctgtgcctctcagacaaattctgatctctaagagatccccagacctcacttgcctctgcctccatcttggccctgattcaaccctaagataatagcacaacaaaattcttcataaagatatttttattcacctgttccgtgctatatggaggaggccaagtccatttagtgacatttcttcccataatgtgagtggggaggattgtggggaggaggggctttgggttcctgtgtttgtgcatatgaagggagatgggggttaggtggaggaggagagcagcgtggttagctaaggttattgctttttgtggcaaatctaattaaatgacaggaatctcttcacga

SEQ ID NO: 170750 - DNA, 2071 bp, Homo sapiens
  Payload ID: 13609
  Gene Symbol: PRKAG1
  Gene Name: protein kinase, AMP-activated, gamma 1 non-catalytic subunit
  Uniprot ID: P54619
  ENST ID: ENST00000548065
  CDS Start-End: 458-1453
acagcaaggttggtccttcgtaacaacggatgaaatggttcccttttttaaagcgccctctctccctccaccctcagcgcccctgtccttggcatgttttgtatcagcgatcattctgaactgtacatatttatgttgcgagaggcaaagggcaagttttggattttgcttcttccaagtttgtttttaaacgacaaataaaaaaagaacattttaaatacaagcggctccgtcccatgaccctcgccgtcagccggatccgtgcggtccgcgaggacccgggggagggcggttaccgaggcccgccaccgccggaagggtgggttccttgccttccgccccagtctggcgactgccatgacgtgggcggaagtggcgtcgccgcaccggatgtggggcggggcctgccccaagagagtttcctaaagcgaggaaaccaagccgggcgcctcttgcaatggagacggtcatttcttcagatagctccccagctgtggaaaatgagcatcctcaagagaccccagaatccaacaatagcgtgtatacttccttcatgaagtctcatcgctgctatgacctgattcccacaagctccaaattggttgtatttgatacgtccctgcaggtgaagaaagctttttttgctttggtgactaacggtgtacgagctgcccctttatgggatagtaagaagcaaagttttgtgggcatgctgaccatcactgatttcatcaatatcctgcaccgctactataaatcagccttggtacagatctatgagctagaagaacacaagatagaaacttggagagaggtgtatctccaggactcctttaaaccgcttgtctgcatttctcctaatgccagcttgtttgatgctgtctcttcattaattcggaacaagatccacaggctgccagttattgacccagaatcaggcaatactttgtacatcctcacccacaagcgcattctgaagttcctcaaattgtttatcactgagttccccaagccagagttcatgtccaagtctctggaagagctacagattggcacctatgccaatattgctatggttcgcactaccacccccgtctatgtggctctggggatttttgtacagcatcgagtctcagccctgccagtggtggatgagaaggggcgtgtggtggacatctactccaagtttgatgttatcaatctggcagcagaaaagacctacaacaacctagatgtatctgtgactaaagccttgcaacatcgatcacattactttgagggtgttctcaagtgctacctgcatgagactctggagaccatcatcaacaggctagtggaagcagaggttcaccgacttgtagtggtggatgaaaatgatgtggtcaagggaattgtatcactgtctgacatcctgcaggccctggtgctcacaggtggagagaagaagccctgagctgggggaaggggtcatgcagcaccaggggatatgcccaactcactgcctgctggaagctctgtgggaatcagatgaaacttgagggaattgtgactctgttccctgttcagggtcccctgcccttctatctgggagctagggaaggtatgggggaggaaagagaatggatttatagctacccttaccctcacacatacacttgaaaaaactttcagcctagccagttctagcccctgtcctcttagatatatccccctttctgggtgaactataggctctgtgcctctcagacaaattctgatctctaagagatccccagacctcacttgcctctgcctccatcttggccctgattcaaccctaagataatagcacaacaaaattcttcataaagatatttttattcacctgttccgtgctatatggaggaggccaagtccatttagtgacatttcttcccataatgtgagtggggaggattgtggggaggaggggctttgggttcctgtgtttgtgcatatgaagggagatgggggttaggtggaggaggagagcagcgtggttagctaaggttattgctttttgtggcaaatctaattaaatgacaggaatctc

SEQ ID NO: 170751 - DNA, 1679 bp, Homo sapiens
  Payload ID: 13609
  Gene Symbol: PRKAG1
  Gene Name: protein kinase, AMP-activated, gamma 1 non-catalytic subunit
  ENST ID: ENST00000546531
  CDS Start-End: 48-296
caagagagtttcctaaagcgaggaaaccaagccgggcgcctcttgcaatggagacggtcatttcttcagatagctccccagctgtggaaaatgagcatcctcaagagaccccagaatccaacaatagcgtgtatacttccttcatgaagtctcatcgctgctatgacctgattcccacaagctccaaattggttgtatttgatacgtccctgcagtcctgcccctgtggatttgcctttatgattattactgtcttggctacaggtgaagaaagctttttttgctttggtgactaacggtgtacgagctgcccctttatgggatagtaagaagcaaagttttgtgggcatgctgaccatcactgatttcatcaatatcctgcaccgctactataaatcagccttggtacagatctatgagctagaagaacacaagatagaaacttggagagaggtgtatctccaggactcctttaaaccgcttgtctgcatttctcctaatgccagcttgtttgatgctgtctcttcattaattcggaacaagatccacaggctgccagttattgacccagaatcaggcaatactttgtacatcctcacccacaagcgcattctgaagttcctcaaattgtttatcactgagttccccaagccagagttcatgtccaagtctctggaagagctacagattggcacctatgccaatattgctatggttcgcactaccacccccgtctatgtggctctggggatttttgtacagcatcgagtctcagccctgccagtggtggatgagaaggggcgtgtggtggacatctactccaagtttgatgttatcaatctggcagcagaaaagacctacaacaacctagatgtatctgtgactaaagccttgcaacatcgatcacattactttgagggtgttctcaagtgctacctgcatgagactctggagaccatcatcaacaggctagtggaagcagaggttcaccgacttgtagtggtggatgaaaatgatgtggtcaagggaattgtatcactgtctgacatcctgcaggccctggtgctcacaggtggagagaagaagccctgagctgggggaaggggtcatgcagcaccaggggatatgcccaactcactgcctgctggaagctctgtgggaatcagatgaaacttgagggaattgtgactctgttccctgttcagggtcccctgcccttctatctgggagctagggaaggtatgggggaggaaagagaatggatttatagctacccttaccctcacacatacacttgaaaaaactttcagcctagccagttctagcccctgtcctcttagatatatccccctttctgggtgaactataggctctgtgcctctcagacaaattctgatctctaagagatccccagacctcacttgcctctgcctccatcttggccctgattcaaccctaagataatagcacaacaaaattcttcataaagatatttttattcacctgttccgtgctatatggaggaggccaagtccatttagtgacatttcttcccataatgtgagtggggaggattgtggggaggaggggctttgggttcctgtgtttgtgcatatgaagggagatgggggttaggtggaggaggagagcagcgtggttagctaaggttattgcttttt

SEQ ID NO: 170752 - DNA, 688 bp, Homo sapiens
  Payload ID: 13609
  Gene Symbol: PRKAG1
  Gene Name: protein kinase, AMP-activated, gamma 1 non-catalytic subunit
  ENST ID: ENST00000551696
  CDS Start-End: 81-688
tcctaaagcgaggaaaccaagccgggcgcctcttgcaatggagacggtcatttcttcagatagctccccagctgtggaaaatgagcatcctcaaggtgaagaaagctttttttgctttggtgactaacggtgtacgagctgcccctttatgggatagtaagaagcaaagttttgtgggcatgctgaccatcactgatttcatcaatatcctgcaccgctactataaatcagccttggtacagatctatgagctagaagaacacaagatagaaacttggagagaggtgtatctccaggactcctttaaaccgcttgtctgcatttctcctaatgccagatcactgagttccccaagccagagttcatgtccaagtctctggaagagctacagattggcacctatgccaatattgctatggttcgcactaccacccccgtctatgtggctctggggatttttgtacagcatcgagtctcagccctgccagtggtggatgagaaggaatctggcagcagaaaagacctacaacaacctagatgtatctgtgactaaagccttgcaacatcgatcacattactttgagggtgttctcaagtgctacctgcatgagactctggagaccatcatcaacaggctagtggaagcagaggttcaccgacttgtagtggtggatgaaaatgatgtggt

SEQ ID NO: 170753 - DNA, 778 bp, Homo sapiens
  Payload ID: 13609
  Gene Symbol: PRKAG1
  Gene Name: protein kinase, AMP-activated, gamma 1 non-catalytic subunit
  ENST ID: ENST00000552463
  CDS Start-End: 403-778
ttttagaggtttgagagcgcagggttgtgagccggctttgctgggtgaggcacggggcgtccagagggatctccgcttgcaggggacccatggaagatttatgagcaagtcagtgaatgtcctttaggaatgttcatagcagctttctgtacatggactgagctacttcgaaaagtaaagtttcttgttaatggggatgaaagtcccttccaaatctgagatgctttggtgaacaaacttggtgaaagcatgaaagataaattgaagaacagatagatttgggccaaggaccccagtttaaacaacgttgcagaggtcatttcttcagatagctccccagctgtggaaaatgagcatcctcaagagaccccagaatccaacaatagcgtgtatacttccttcatgaagtctcatcgctgctatgacctgattcccacaagctccaaattggttgtatttgatacgtccctgcaggtgaagaaagctttttttgctttggtgactaacggtgtacgagctgcccctttatgggatagtaagaagcaaagttttgtgggcatgctgaccatcactgatttcatcaatatcctgcaccgctactataaatcagccttggtacagatctatgagctagaagaacacaagatagaaacttggagagaggtgtatctccaggactcctttaaaccgcttgtctgcatttctcctaatgccagcttgtttgatgctgtctcttcattaattcggaacaagatccacaggctgccagttattgacc

SEQ ID NO: 170754 - DNA, 604 bp, Homo sapiens
  Payload ID: 13609
  Gene Symbol: PRKAG1
  Gene Name: protein kinase, AMP-activated, gamma 1 non-catalytic subunit
  ENST ID: ENST00000547082
  CDS Start-End: 397-604
atgtggggcggggcctgccccaagagagtttcctaaagcgaggaaaccaagccgggcgcctcttgcaatggagacggggacccatggaagatttatgagcaagtcagtgaatgtcctttaggaatgttcatagcagctttctgtacatggactgagctacttcgaaaagtaaagtttcttgttaatggggatgaaagtcccttccaaatctgagatgctttggtgaacaaacttggtgaaagcatgaaagataaattgaagaacagatagatttgggccaaggaccccagtttaaacaacgttgcagaggtcatttcttcagatagctccccagctgtggaaaatgagcatcctcaagagaccccagaatccaacaatagcgtgtatacttccttcatgaagtctcatcgctgctatgacctgattcccacaagctccaaattggttgtatttgatacgtccctgcaggtgaagaaagctttttttgctttggtgactaacggtgtacgagctgcccctttatgggatagtaagaagcaaagttttgtgggcatgctgaccatcactgatttcatcaatatcctgcaccgctactataaatcag

SEQ ID NO: 170755 - DNA, 553 bp, Homo sapiens
  Payload ID: 13609
  Gene Symbol: PRKAG1
  Gene Name: protein kinase, AMP-activated, gamma 1 non-catalytic subunit
  ENST ID: ENST00000548857
  CDS Start-End: 306-553
ctaaagcgaggaaaccaagccgggcgcctcttgcaatggagacggtcatttcttcagatagctccccagctgtggaaaatgagcatcctcaaggaagctactggaagatgtgttccaccaaaataagggagtaatcaaaaaagataaaaacgcgatataggagcaccagtagaggacagacgtgaaaggggtacccaggatggtgatgaagaaagatcccaggatgacagcagtgcacaccagacaaaccagcccagatttgagcagagaccccagaatccaacaatagcgtgtatacttccttcatgaagtctcatcgctgctatgacctgattcccacaagctccaaattggttgtatttgatacgtccctgcaggtgaagaaagctttttttgctttggtgactaacggtgtacgagctgcccctttatgggatagtaagaagcaaagttttgtgggcatgctgaccatcactgatttcatcaatatcctgcaccgctactataaatcagccttggtacagatctatgagctagaagaacacaagataga

SEQ ID NO: 170756 - DNA, 1531 bp, Homo sapiens
  Payload ID: 13609
  Gene Symbol: PRKAG1
  Gene Name: protein kinase, AMP-activated, gamma 1 non-catalytic subunit
  ENST ID: ENST00000547306
  CDS Start-End: 68-910
aaaccaagccgggcgcctcttgcaatggagacggtcatttcttcagatagctccccagctgtggaaaatgagcatcctcaaggtgaagaaagctttttttgctttggtgactaacggtgtacgagctgcccctttatgggatagtaagaagcaaagttttgtgggcatgctgaccatcactgatttcatcaatatcctgcaccgctactataaatcagccttggtacagatctatgagctagaagaacacaagatagaaacttggagagaggtgtatctccaggactcctttaaaccgcttgtctgcatttctcctaatgccagcttgtttgatgctgtctcttcattaattcggaacaagatccacaggctgccagttattgacccagaatcaggcaatactttgtacatcctcacccacaagcgcattctgaagttcctcaaattgtttatcactgagttccccaagccagagttcatgtccaagtctctggaagagctacagattggcacctatgccaatattgctatggttcgcactaccacccccgtctatgtggctctggggatttttgtacagcatcgagtctcagccctgccagtggtggatgagaaggggcgtgtggtggacatctactccaagtttgatgttatcaatctggcagcagaaaagacctacaacaacctagatgtatctgtgactaaagccttgcaacatcgatcacattactttgagggtgttctcaagtgctacctgcatgagactctggagaccatcatcaacaggctagtggaagcagaggttcaccgacttgtagtggtggatgaaaatgatgtggtcaagggaattgtatcactgtctgacatcctgcaggccctggtgctcacaggtggagagaagaagccctgagctgggggaaggggtcatgcagcaccaggggatatgcccaactcactgcctgctggaagctctgtgggaatcagatgaaacttgagggaattgtgactctgttccctgttcagggtcccctgcccttctatctgggagctagggaaggtatgggggaggaaagagaatggatttatagctacccttaccctcacacatacacttgaaaaaactttcagcctagccagttctagcccctgtcctcttagatatatccccctttctgggtgaactataggctctgtgcctctcagacaaattctgatctctaagagatccccagacctcacttgcctctgcctccatcttggccctgattcaaccctaagataatagcacaacaaaattcttcataaagatatttttattcacctgttccgtgctatatggaggaggccaagtccatttagtgacatttcttcccataatgtgagtggggaggattgtggggaggaggggctttgggttcctgtgtttgtgcatatgaagggagatgggggttaggtggaggaggagagcagcgtggttagctaaggttattgctttttgtggcaaatctaattaaatgacaggaatctcttc

SEQ ID NO: 170757 - DNA, 1497 bp, Homo sapiens
  Payload ID: 13609
  Gene Symbol: PRKAG1
  Gene Name: protein kinase, AMP-activated, gamma 1 non-catalytic subunit
  Uniprot ID: P54619
  ENST ID: ENST00000552212
  CDS Start-End: 313-1212
ctcttgcaatggagacggtgaggagtgcaggagggcggtcgggggcgctgtggagcctaagacacccccccaacccttaggagaccgggagggccgggcaggggctggcgctggtgtctagcaaacaaaaagcagccgggtgtctgccctatcccgtgaccctgttcctccgcttcttcgttgggcgcatctcctggaactgggccgcgtccccgccgcctttccgtcatttcttcagatagctccccagctgtggaaaatgagcatcctcaagagaccccagaatccaacaatagcgtgtatacttccttcatgaagtctcatcgctgctatgacctgattcccacaagctccaaattggttgtatttgatacgtccctgcaggtgaagaaagctttttttgctttggtgactaacggtgtacgagctgcccctttatgggatagtaagaagcaaagttttgtgggcatgctgaccatcactgatttcatcaatatcctgcaccgctactataaatcagccttggtacagatctatgagctagaagaacacaagatagaaacttggagagaggtgtatctccaggactcctttaaaccgcttgtctgcatttctcctaatgccagcttgtttgatgctgtctcttcattaattcggaacaagatccacaggctgccagttattgacccagaatcaggcaatactttgtacatcctcacccacaagcgcattctgaagttcctcaaattgtttatcactgagttccccaagccagagttcatgtccaagtctctggaagagctacagattggcacctatgccaatattgctatggttcgcactaccacccccgtctatgtggctctggggatttttgtacagcatcgagtctcagccctgccagtggtggatgagaaggggcgtgtggtggacatctactccaagtttgatgttatcaatctggcagcagaaaagacctacaacaacctagatgtatctgtgactaaagccttgcaacatcgatcacattactttgagggtgttctcaagtgctacctgcatgagactctggagaccatcatcaacaggctagtggaagcagaggttcaccgacttgtagtggtggatgaaaatgatgtggtcaagggaattgtatcactgtctgacatcctgcaggccctggtgctcacaggtggagagaagaagccctgagctgggggaaggggtcatgcagcaccaggggatatgcccaactcactgcctgctggaagctctgtgggaatcagatgaaacttgagggaattgtgactctgttccctgttcagggtcccctgcccttctatctgggagctagggaaggtatgggggaggaaagagaatggatttatagctacccttaccctcacacatacacttgaaaaaactttcagcctagccagttctagcccctgtcctcttagatatatccccctttctgggtgaactataggctctgtg

SEQ ID NO: 170758 - DNA, 568 bp, Homo sapiens
  Payload ID: 13609
  Gene Symbol: PRKAG1
  Gene Name: protein kinase, AMP-activated, gamma 1 non-catalytic subunit
  ENST ID: ENST00000548605
  CDS Start-End: 484-568
ctcttgcaatggagacggtcatttcttcagatagctccccagctgtggaaaatgagcatcctcaaggaagctactggaagatgtgttccaccaaaataagggagtaatcaaaaaagataaaaacgcgatataggagcaccagtagaggacagacgtgaaaggggtacccaggatggtgatgaagaaagatcccaggatgacagcagtgcacaccagacaaaccagcccagatttgagcagagaccccagaatccaacaatagcgtgtatacttccttcatgaagtctcatcgctgctatgacctgattcccacaagctccaaattggttgtatttgatacgtccctgcagtcctgcccctgtggatttgcctttatgattattactgtcttggctacaggtgaagaaagctttttttgctttggtgactaacggtgtacgagctgcccctttatgggatagtaagaagcaaagttttgtgggcatgctgaccatcactgatttcatcaatatcctgcaccgctactataaatcagccttggtacagatctatgagctagaagaacaca

SEQ ID NO: 170759 - DNA, 1015 bp, Homo sapiens
  Payload ID: 13609
  Gene Symbol: PRKAG1
  Gene Name: protein kinase, AMP-activated, gamma 1 non-catalytic subunit
  ENST ID: ENST00000551770
  CDS Start-End: 1-756
aatagcgtgtatacttccttcatgaagtctcatcgctgctatgacctgattcccacaagctccaaattggttgtatttgatacgtccctgcaggtgaagaaagctttttttgctttggtgactaacggtgtacgagctgcccctttatgggatagtaagaagcaaagttttgtgggcatgctgaccatcactgatttcatcaatatcctgcaccgctactataaatcagccttggtacagatctatgagctagaagaacacaagatagaaacttggagagaggtgtatctccaggactcctttaaaccgcttgtctgcatttctcctaatgccagatcactgagttccccaagccagagttcatgtccaagtctctggaagagctacagattggcacctatgccaatattgctatggttcgcactaccacccccgtctatgtggctctggggatttttgtacagcatcgagtctcagccctgccagtggtggatgagaaggaatctggcagcagaaaagacctacaacaacctagatgtatctgtgactaaagccttgcaacatcgatcacattactttgagggtgttctcaagtgctacctgcatgagactctggagaccatcatcaacaggctagtggaagcagaggttcaccgacttgtagtggtggatgaaaatgatgtggtcaagggaattgtatcactgtctgacatcctgcaggccctggtgctcacaggtggagagaagaagccctgagctgggggaaggggtcatgcagcaccaggggatatgcccaactcactgcctgctggaagctctgtgggaatcagatgaaacttgagggaattgtgactctgttccctgttcagggtcccctgcccttctatctgggagctagggaaggtatgggggaggaaagagaatggatttatagctacccttaccctcacacatacacttgaaaaaactttcagcctagccagttctagcccctgtcctcttagatatatccccc

SEQ ID NO: 170760 - DNA, 612 bp, Homo sapiens
  Payload ID: 13609
  Gene Symbol: PRKAG1
  Gene Name: protein kinase, AMP-activated, gamma 1 non-catalytic subunit
  ENST ID: ENST00000551121
  CDS Start-End: 129-612
gcaatggagacggtcatttcttcagatagctccccagctgtggaaaatgagcatcctcaaggaagctactaactatcccaccctatgcagagaccccagaatccaacaatagcgtgtatacttccttcatgaagtctcatcgctgctatgacctgattcccacaagctccaaattggttgtatttgatacgtccctgcaggtgaagaaagctttttttgctttggtgactaacggtgtacgagctgcccctttatgggatagtaagaagcaaagttttgtgggcatgctgaccatcactgatttcatcaatatcctgcaccgctactataaatcagccttggtacagatctatgagctagaagaacacaagatagaaacttggagagaggtgtatctccaggactcctttaaaccgcttgtctgcatttctcctaatgccagcttgtttgatgctgtctcttcattaattcggaacaagatccacaggctgccagttattgacccagaatcaggcaatactttgtacatcctcacccacaagcgcattctgaagttcctcaaattgtttatcactgagttccccaagccagagttcatgtccaagtctctgg

SEQ ID NO: 170761 - DNA, 663 bp, Homo sapiens
  Payload ID: 13609
  Gene Symbol: PRKAG1
  Gene Name: protein kinase, AMP-activated, gamma 1 non-catalytic subunit
  ENST ID: ENST00000548950
  CDS Start-End: 228-663
gcctcttgcaatggagacggtcatttcttcagatagctccccagctgtggaaaatgagcatcctcaaggtgggtgaaatcctcttttcccttccccctttggagcctgtggtttaatacctctcatcctatctcatcctaagggtgaagaaagctttttttgctttggtgactaacggtgtacgagctgcccctttatgggatagtaagaagcaaagttttgtgggcatgctgaccatcactgatttcatcaatatcctgcaccgctactataaatcagccttggtacagatctatgagctagaagaacacaagatagaaacttggagagaggtgtatctccaggactcctttaaaccgcttgtctgcatttctcctaatgccagcttgtttgatgctgtctcttcattaattcggaacaagatccacaggctgccagttattgacccagaatcaggcaatactttgtacatcctcacccacaagcgcattctgaagttcctcaaattgtttatcactgagttccccaagccagagttcatgtccaagtctctggaagagctacagattggcacctatgccaatattgctatggttcgcactaccacccccgtctatgtggctctggggatttttgtacagcatcgagtctcagccctgccag

SEQ ID NO: 170762 - DNA, 527 bp, Homo sapiens
  Payload ID: 13609
  Gene Symbol: PRKAG1
  Gene Name: protein kinase, AMP-activated, gamma 1 non-catalytic subunit
  ENST ID: ENST00000547125
  CDS Start-End: 397-527
gccgggcgcctcttgcaatggagacggctctggggtagaagttaaaaagaggaaaaagaaaactcagccaggtgtggtggctcacgcctgtaatgccagtactttgggaggccaaggcaagtggattgcttgagctcaggagttcagcatcagcctgggcaacatgatgaaagcctgtctcgacagaaacaaaaatacaaaaattacccaggcgtggtggtggtggtgtgtgcctgtagtcccagctactcgggaggctcaggtgggaggatcgcttgatccaaagaggtggaggctggagtgagctgagatcatgccactgcactccagtctgagtgacacagtgagatcctgtctccaaaaaaaaagaaaagaaagaaaactcctgctttgaaaatgttcagcctaactggagtgatggtcatttcttcagatagctccccagctgtggaaaatgagcatcctcaagagaccccagaatccaacaatagcgtgtatacttccttcatgaagtctcatcgctgcta

SEQ ID NO: 170763 - DNA, 3305 bp, Homo sapiens
  Payload ID: 13610
  Gene Symbol: PRKAG2
  Gene Name: protein kinase, AMP-activated, gamma 2 non-catalytic subunit
  Uniprot ID: Q9UGJ0
  ENST ID: ENST00000287878
  CDS Start-End: 506-2215
gagctggtttattctgcggccgaggattacatttatgcacgaacgggcttactggttccagattccccacttgggcacaggcataggaggcttgttttccaaattgctggttttaattgcacctgcctttcagattacctctgggaatctgtgggaggagccgagagggtggaaaatgtttcttagctttgcaaaaggaagaaaactttgtcacccagcgggagacctcagccacgagtaacccggggagacaccagaaccgggacgggctttgactgatttgcctacgagggttccgtaggaaaggacgcttgaattcggcgcttcggcggcggcggcggccgcgcgagttccctgctcaccctccctctccgcggaagtccccacgaggtggcttcagggtgtaacagagcgcgcggctccagtccgaaggcagcggccgggggagggaaggaggggaccgaacccccgaggagtttcgcagaatcaacttctggttagagttatgggaagcgcggttatggacaccaagaagaaaaaagatgtttccagccccggcgggagcggcggcaagaaaaatgccagccagaagaggcgttcgctgcgcgtgcacattccggacctgagctccttcgccatgccgctcctggacggagacctggagggttccggaaagcattcctctcgaaaggtggacagccccttcggcccgggcagcccctccaaagggttcttctccagaggcccccagccccggccctccagccccatgtctgcacctgtgaggcccaagaccagccccggctctcccaaaaccgtgttcccgttctcctaccaggagtccccgccacgctcccctcgacgcatgagcttcagtgggatcttccgctcctcctccaaagagtcttcccccaactccaaccctgctacctcgcccgggggcatcaggtttttctcccgctccagaaaaacctccggcctctcctcctctccgtcaacacccacccaagtgaccaagcagcacacgtttcccctggaatcctataagcacgagcctgaacggttagagaatcgcatctatgcctcgtcttcccccccggacacagggcagaggttctgcccgtcttccttccagagcccgaccaggcctccactggcatcaccgacacactatgctccctccaaagccgcggcgctggcggcggccctgggacccgcggaagccggcatgctggagaagctggagttcgaggacgaagcagtagaagactcagaaagtggtgtttacatgcgattcatgaggtcacacaagtgttatgacatcgttccaaccagttcaaagcttgttgtctttgatactacattacaagttaaaaaggccttctttgctttggtagccaacggtgtccgagcagcgccactgtgggagagtaaaaaacaaagttttgtaggaatgctaacaattacagatttcataaatatactacatagatactataaatcacctatggtacagatttatgaattagaggaacataaaattgaaacatggagggagctttatttacaagaaacatttaagcctttagtgaatatatctccagatgcaagcctcttcgatgctgtatactccttgatcaaaaataaaatccacagattgcccgttattgaccctatcagtgggaatgcactttatatacttacccacaaaagaatcctcaagttcctccagctttttatgtctgatatgccaaagcctgccttcatgaagcagaacctggatgagcttggaataggaacgtaccacaacattgccttcatacatccagacactcccatcatcaaagccttgaacatatttgtggaaagacgaatatcagctctgcctgttgtggatgagtcaggaaaagttgtagatatttattccaaatttgatgtaattaatcttgctgctgagaaaacatacaataacctagatatcacggtgacccaggcccttcagcaccgttcacagtattttgaaggtgttgtgaagtgcaataagctggaaatactggagaccatcgtggacagaatagtaagagctgaggtccatcggctggtggtggtaaatgaagcagatagtattgtgggtattatttccctgtcggacattctgcaagccctgatcctcacaccagcaggtgccaaacaaaaggagacagaaacggagtgaccgccgtgaatgtagacgccctaggaggagaacttgaacaaagtctctgggtcacgttttgcctcatgaacactggctgcaagtggttaagaatgtatatcagggtttaacaataggtatttcttccagtgatgttgaaattaagcttaaaaaagaaagattttatgtgcttgaagattcaggcttgcattaaaagactgttttcagacctttgtctgaaggattttaaatgctgtatgtcattaaagtgcactgtgtcctgaagttttcattatttttcatttcaaagaattcactggtatggaacaggtgatgtggcataaggtgagtgcacggtatgttcagatcacagtgccttatgtccgaatacagcaatatgtcaccgccgcagccggggcgcacgcgtgtgaaacaacaccgagcttgaatgtggaagtctttgaaccttttaccaaatcagtttgttttctttagatttgtcaaaaagttgtaatttgaatataaataattactttaaaattgtaatgacacttttacacgtaagtgttttgttctgggctaccgtgtcaacgaggctgctttacaacagctttatttatttttactttcatgcaatttttttacacatcttttggtggagtaaacttcaccacatccatgaataaactctcagttattttgaaatggcaaatttctcattatttaagtttggatctggaaaggacatgacttctgaaatagccgctgctgggttttaaaagctgaggtctctcaaagtgtggaggagacgttgccgtcaggcgggagccaagtgccgggaagatgtctattttttttcttgtgtattgaaatgtaaaatcatgatgtttgttatgactgctgatgcgattgtttttgtaaattttattgtggcatatacagtattgtcatacagttgaagagaaacaatgtttcctaatgtaagtgctctgaaaatgttgacactgtatatatatatatgaggatagtttgttttttttttgttttgggtttttttttttcagattgaaaaattaaaatagatcctactatctaccattttgttaaagaa

SEQ ID NO: 170764 - DNA, 2281 bp, Homo sapiens
  Payload ID: 13610
  Gene Symbol: PRKAG2
  Gene Name: protein kinase, AMP-activated, gamma 2 non-catalytic subunit
  Uniprot ID: Q9UGJ0
  ENST ID: ENST00000392801
  CDS Start-End: 444-2021
gggaatgacagtttgctgcagtcccgtcaatgggggaatctgcccgagctctgcctgcattttgagcagcaaagcagctccagccaccaagaccgttgcctgcgctgtcttaggccagcccatgctgtctgccagccgcttgttgcgctgccttggggactgggaacacacccagccccggtccccatctgttgcagacatgcagtggcagcagctcggagcacagccgaaccctagaaattgcctgtgctgaaggggctgggaaaccccttctctgatggacctttcgagtgaggcagcaggatttgtcagagctgggagtgccgcccgtccccgtcactcgcatcctgccatccagcagcttacaagcctgcactgcttattagcatctggaagagaagacctccaggaccccttggggctgagacctgagctccttcgccatgccgctcctggacggagacctggagggttccggaaagcattcctctcgaaaggtggacagccccttcggcccgggcagcccctccaaagggttcttctccagaggcccccagccccggccctccagccccatgtctgcacctgtgaggcccaagaccagccccggctctcccaaaaccgtgttcccgttctcctaccaggagtccccgccacgctcccctcgacgcatgagcttcagtgggatcttccgctcctcctccaaagagtcttcccccaactccaaccctgctacctcgcccgggggcatcaggtttttctcccgctccagaaaaacctccggcctctcctcctctccgtcaacacccacccaagtgaccaagcagcacacgtttcccctggaatcctataagcacgagcctgaacggttagagaatcgcatctatgcctcgtcttcccccccggacacagggcagaggttctgcccgtcttccttccagagcccgaccaggcctccactggcatcaccgacacactatgctccctccaaagccgcggcgctggcggcggccctgggacccgcggaagccggcatgctggagaagctggagttcgaggacgaagcagtagaagactcagaaagtggtgtttacatgcgattcatgaggtcacacaagtgttatgacatcgttccaaccagttcaaagcttgttgtctttgatactacattacaagttaaaaaggccttctttgctttggtagccaacggtgtccgagcagcgccactgtgggagagtaaaaaacaaagttttgtaggaatgctaacaattacagatttcataaatatactacatagatactataaatcacctatggtacagatttatgaattagaggaacataaaattgaaacatggagggagctttatttacaagaaacatttaagcctttagtgaatatatctccagatgcaagcctcttcgatgctgtatactccttgatcaaaaataaaatccacagattgcccgttattgaccctatcagtgggaatgcactttatatacttacccacaaaagaatcctcaagttcctccagctttttatgtctgatatgccaaagcctgccttcatgaagcagaacctggatgagcttggaataggaacgtaccacaacattgccttcatacatccagacactcccatcatcaaagccttgaacatatttgtggaaagacgaatatcagctctgcctgttgtggatgagtcaggaaaagttgtagatatttattccaaatttgatgtaattaatcttgctgctgagaaaacatacaataacctagatatcacggtgacccaggcccttcagcaccgttcacagtattttgaaggtgttgtgaagtgcaataagctggaaatactggagaccatcgtggacagaatagtaagagctgaggtccatcggctggtggtggtaaatgaagcagatagtattgtgggtattatttccctgtcggacattctgcaagccctgatcctcacaccagcaggtgccaaacaaaaggagacagaaacggagtgaccgccgtgaatgtagacgccctaggaggagaacttgaacaaagtctctgggtcacgttttgcctcatgaacactggctgcaagtggttaagaatgtatatcagggtttaacaataggtatttcttccagtgatgttgaaattaagcttaaaaaagaaagattttatgtgcttgaagattcaggcttgcattaaaagactgttttcagacctttgtctgaaggattttaaatgctgtatgtcattaaagtgcactgtgtcc

SEQ ID NO: 170765 - DNA, 2318 bp, Homo sapiens
  Payload ID: 13610
  Gene Symbol: PRKAG2
  Gene Name: protein kinase, AMP-activated, gamma 2 non-catalytic subunit
  Uniprot ID: Q9UGJ0
  ENST ID: ENST00000418337
  CDS Start-End: 255-1241
gcggccgcgccacctgcggcggcggcggcggcctcgggcgggtgggggcagcgctcccgctccgcccccggcccccgctgcccgcgtcccctgccaggcccctcctcccggcggcgcggcagagccaggccccagcgctcggccggccgcgagcccgccggccggggacgagcgtcgcagctcatgctgatcgctgtcctcctcctccccctcaggcggcgctggcggcggccctgggacccgcggaagccggcatgctggagaagctggagttcgaggacgaagcagtagaagactcagaaagtggtgtttacatgcgattcatgaggtcacacaagtgttatgacatcgttccaaccagttcaaagcttgttgtctttgatactacattacaagttaaaaaggccttctttgctttggtagccaacggtgtccgagcagcgccactgtgggagagtaaaaaacaaagttttgtaggaatgctaacaattacagatttcataaatatactacatagatactataaatcacctatggtacagatttatgaattagaggaacataaaattgaaacatggagggagctttatttacaagaaacatttaagcctttagtgaatatatctccagatgcaagcctcttcgatgctgtatactccttgatcaaaaataaaatccacagattgcccgttattgaccctatcagtgggaatgcactttatatacttacccacaaaagaatcctcaagttcctccagctttttatgtctgatatgccaaagcctgccttcatgaagcagaacctggatgagcttggaataggaacgtaccacaacattgccttcatacatccagacactcccatcatcaaagccttgaacatatttgtggaaagacgaatatcagctctgcctgttgtggatgagtcaggaaaagttgtagatatttattccaaatttgatgtaattaatcttgctgctgagaaaacatacaataacctagatatcacggtgacccaggcccttcagcaccgttcacagtattttgaaggtgttgtgaagtgcaataagctggaaatactggagaccatcgtggacagaatagtaagagctgaggtccatcggctggtggtggtaaatgaagcagatagtattgtgggtattatttccctgtcggacattctgcaagccctgatcctcacaccagcaggtgccaaacaaaaggagacagaaacggagtgaccgccgtgaatgtagacgccctaggaggagaacttgaacaaagtctctgggtcacgttttgcctcatgaacactggctgcaagtggttaagaatgtatatcagggtttaacaataggtatttcttccagtgatgttgaaattaagcttaaaaaagaaagattttatgtgcttgaagattcaggcttgcattaaaagactgttttcagacctttgtctgaaggattttaaatgctgtatgtcattaaagtgcactgtgtcctgaagttttcattatttttcatttcaaagaattcactggtatggaacaggtgatgtggcataaggtgagtgcacggtatgttcagatcacagtgccttatgtccgaatacagcaatatgtcaccgccgcagccggggcgcacgcgtgtgaaacaacaccgagcttgaatgtggaagtctttgaaccttttaccaaatcagtttgttttctttagatttgtcaaaaagttgtaatttgaatataaataattactttaaaattgtaatgacacttttacacgtaagtgttttgttctgggctaccgtgtcaacgaggctgctttacaacagctttatttatttttactttcatgcaatttttttacacatcttttggtggagtaaacttcaccacatccatgaataaactctcagttattttgaaatggcaaatttctcattatttaagtttggatctggaaaggacatgacttctgaaatagccgctgctgggttttaaaagctgaggtctctcaaagtgtggaggagacgttgccgtcaggcgggagccaagtgccgggaagatgtctattttttttcttgtgtattgaaatgtaaaatcatgatgtttgttatgactgctgatgcgattgtttttgtaaattttattgtggcatatacagtattgtcatacagttgaagagaaacaatgtttcctaatgtaagtgctctgaaaatgttgacactgtatatatatatatgaggatagtttgttttttttttgttttgggtttttttttttcagattgaaaaattaaaatagatcctactatctacca

SEQ ID NO: 170766 - DNA, 573 bp, Homo sapiens
  Payload ID: 13610
  Gene Symbol: PRKAG2
  Gene Name: protein kinase, AMP-activated, gamma 2 non-catalytic subunit
  ENST ID: ENST00000493872
  CDS Start-End: 79-237
gcagctcatgctgatcgctgtcctcctcctccccctcaggcggcgctggcggcggccctgggacccgcggaagccggcatgctggagaagctggagttcgaggacgaagcaaggtgtcagggagcgctaattgtttgtgcttgtcaccatgcactcggaggcaaccccgaatcatacccacagtccagaccctttaatcatagactggtgcccttatctgcgcctgtgaagatatgaccgcagtagaagactcagaaagtggtgtttacatgcgattcatgaggtcacacaagtgttatgacatcgttccaaccagttcaaagcttgttgtctttgatactacattacaagttaaaaaggccttctttgctttggtagccaacggtgtccgagcagcgccactgtgggagagtaaaaaacaaagttttgtaggaatgctaacaattacagatttcataaatatactacatagatactataaatcacctatggtacagatttatgaattagaggaacataaaattgaaacatggagggagctttatttacaagaaacatttaagcctttagtga

SEQ ID NO: 170767 - DNA, 1123 bp, Homo sapiens
  Payload ID: 13610
  Gene Symbol: PRKAG2
  Gene Name: protein kinase, AMP-activated, gamma 2 non-catalytic subunit
  ENST ID: ENST00000476632
  CDS Start-End: 635-1123
aggacttcctctttcaggcccggcttgcaagagcgctagggccaagctcctttcagccctaatcggtactggagctaatcgcattcgcggcgcccgtgcactctgcagggatgggccgtggggccagggacctcagtcccctctcggcctgtcctgcccttccaggaggctagcggctgctggccgcgcagcctgccaacctgagttggccatagtagagtctcagatacccagctcctgagcggccagggccagattcagggtgtgtacgtttttggcagcggctccccaaccgagaagacactcggctgcgaagagaggacgcgaattaagagttccatgctggaaaaaaaaaaatggatagcgacaaagtgcatctacaatacgtgtagcccacggaacgatttttgttaagggggccgaggatgggcagttacatctaaaatttggaaagggaagaggaaagcgagaaaggatcccctagctggcgccccggggcgttctgcagcctccagcccctctccccctccccgcgccgcggagcccacacctgcgcaggtggagcctgccgagcgcggccgccggtgctgggaaggcggcgctggcggcggccctgggacccgcggaagccggcatgctggagaagctggagttcgaggacgaagcagtagaagactcagaaagtggtgtttacatgcgattcatgaggtcacacaagtgttatgacatcgttccaaccagttcaaagcttgttgtctttgatactacattacaagttaaaaaggccttctttgctttggtagccaacggtgtccgagcagcgccactgtgggagagtaaaaaacaaagttttgtaggaatgctaacaattacagatttcataaatatactacatagatactataaatcacctatggtacagatttatgaattagaggaacataaaattgaaacatggagggagctttatttacaagaaacatttaagcctttagtgaatatatctccagatgcaagcctcttcgatgctgtatactccttgatcaaaaataaaatccacagattgcccgttattgaccctatcagtgggaatgcactttatatacttacccacaaaagaatc

SEQ ID NO: 170768 - DNA, 2699 bp, Homo sapiens
  Payload ID: 13610
  Gene Symbol: PRKAG2
  Gene Name: protein kinase, AMP-activated, gamma 2 non-catalytic subunit
  ENST ID: ENST00000492843
  CDS Start-End: 322-1659
gcttccggcagcttcttgctacttaaggacagccgggctgacgctccagctgctgtggccggaggtgcagccccgtcaggacggctccactccctggcgcctcacagactctggggctgcggtgaggtcgccctgaagaccccctggtgaggacgcttgaacccgggctgtcacctgagcacaggctgccactctgagcttttggggcgccctgtgcctgtcgggctgatgctcctctggctcccggccacctggggctgacaccggttctgtgggtcctgatatgttcacctgtcgccactcctgtggccacagctacccatgaagcgctttgggagcctcaggagcaacaagaaacacaaggaccaaaatcgaagcacggagaggcgccagtcggagcctcatggccttttcgcctccggcctctcctcctctccgtcaacacccacccaagtgaccaagcagcacacgtttcccctggaatcctataagcacgagcctgaacggttagagaatcgcatctatgcctcgtcttcccccccggacacagggcagaggttctgcccgtcttccttccagagcccgaccaggcctccactggcatcaccgacacactatgctccctccaaagccgcggcgctggcggcggccctgggacccgcggaagccggcatgctggagaagctggagttcgaggacgaagcagtagaagactcagaaagtggtgtttacatgcgattcatgaggtcacacaagtgttatgacatcgttccaaccagttcaaagcttgttgtctttgatactacattacaagttaaaaaggccttctttgctttggtagccaacggtgtccgagcagcgccactgtgggagagtaaaaaacaaagttttgtaggaatgctaacaattacagatttcataaatatactacatagatactataaatcacctatggtacagatttatgaattagaggaacataaaattgaaacatggagggagctttatttacaagaaacatttaagcctttagtgaatatatctccagatgcaagcctcttcgatgctgtatactccttgatcaaaaataaaatccacagattgcccgttattgaccctatcagtgggaatgcactttatatacttacccacaaaagaatcctcaagttcctccagctttttatgtctgatatgccaaagcctgccttcatgaagcagaacctggatgagcttggaataggaacgtaccacaacattgccttcatacatccagacactcccatcatcaaagccttgaacatatttgtggaaagacgaatatcagctctgcctgttgtggatgagtcaggaaaagttgtagatatttattccaaatttgatgtaattaatcttgctgctgagaaaacatacaataacctagatatcacggtgacccaggcccttcagcaccgttcacagtattttgaaggtgttgtgaagtgcaataagctggaaatactggagaccatcgtggacagaatagtaagagctgaggtccatcggctggtggtggtaaatgaagcagatagtattgtgggtattatttccctgtcggacattctgcaagccctgatcctcacaccagcaggtgccaaacaaaaggagacagaaacggagtgaccgccgtgaatgtagacgccctaggaggagaacttgaacaaagtctctgggtcacgttttgcctcatgaacactggctgcaagtggttaagaatgtatatcagggtttaacaataggtatttcttccagtgatgttgaaattaagcttaaaaaagaaagattttatgtgcttgaagattcaggcttgcattaaaagactgttttcagacctttgtctgaaggattttaaatgctgtatgtcattaaagtgcactgtgtcctgaagttttcattatttttcatttcaaagaattcactggtatggaacaggtgatgtggcataaggtgagtgcacggtatgttcagatcacagtgccttatgtccgaatacagcaatatgtcaccgccgcagccggggcgcacgcgtgtgaaacaacaccgagcttgaatgtggaagtctttgaaccttttaccaaatcagtttgttttctttagatttgtcaaaaagttgtaatttgaatataaataattactttaaaattgtaatgacacttttacacgtaagtgttttgttctgggctaccgtgtcaacgaggctgctttacaacagctttatttatttttactttcatgcaatttttttacacatcttttggtggagtaaacttcaccacatccatgaataaactctcagttattttgaaatggcaaatttctcattatttaagtttggatctggaaaggacatgacttctgaaatagccgctgctgggttttaaaagctgaggtctctcaaagtgtggaggagacgttgccgtcaggcgggagccaagtgccgggaagatgtctattttttttcttgtgtattgaaatgtaaaatcatgatgtttgttatgactgctgatgcgattgtttttgtaaattttattgtggcatatacagtattgtcatacagttgaagagaaacaatgtttcctaatgtaagtgctctgaaaatgttgacactgtatatatatatatgaggatagtttgttttttttttgttttgggttttttttttt

SEQ ID NO: 170769 - DNA, 564 bp, Homo sapiens
  Payload ID: 13610
  Gene Symbol: PRKAG2
  Gene Name: protein kinase, AMP-activated, gamma 2 non-catalytic subunit
  ENST ID: ENST00000478989
  CDS Start-End: 5-361
aggaatgctaacaattacagatttcataaatatactacatagatactataaatcacctatggtacagatttatgaattagaggaacataaaattgaaacatggagggagctttatttacaagaaacatttaagcctttagtgaatatatctccagatgcaagcctcttcgatgctgtatactccttgatcaaaaataaaatccacagattgcccgttattgaccctatcagtgggaatgcactttatatacttacccacaaaagaatcctcaagttcctccagctttttgtacaccaggaggatggaatcaactataccctttataaaagatgtctgatatgccaaagcctgccttcatgaagcagaacctggatgagcttggaataggaacgtaccacaacattgccttcatacatccagacactcccatcatcaaagccttgaacatatttgtggaaagacgaatatcagctctgcctgttgtggatgagtcaggaaaagttgtagatatttattccaaatttgatgtaattaatcttgctgctgagaaaacatacaataac

SEQ ID NO: 170770 - DNA, 1413 bp, Homo sapiens
  Payload ID: 13610
  Gene Symbol: PRKAG2
  Gene Name: protein kinase, AMP-activated, gamma 2 non-catalytic subunit
  ENST ID: ENST00000488258
  CDS Start-End: 229-918
gatttgcctacgagggttccgtaggaaaggacgcttgaattcggcgcttcggcggcggcggcggccgcgcgagttccctgctcaccctccctctccgcggaagtccccacgaggtggcttcagggtgtaacagagcgcgcggctccagtccgaaggcagcggccgggggagggaaggaggggaccgaacccccgaggagtttcgcagaatcaacttctggttagagttatgggaagcgcggttatggacaccaagaagaaaaaagatgtttccagccccggcgggagcggcggcaagaaaaatgccagccagaagaggcgttcgctgcgcgtgcacattccggacctgagctccttcgccatgccgctcctggacggagacctggagggttccggaaagcattcctctcgaaaggtggacagccccttcggcccgggcagcccctccaaagggttcttctccagaggcccccagccccggccctccagccccatgtctgcacctgtgaggcccaagaccagccccggctctcccaaaaccgtgttcccgttctcctaccaggagtccccgccacgctcccctcgacgcatgagcttcagtgggatcttccgctcctcctccaaagagtcttcccccaactccaaccctgctacctcgcccgggggcatcaggtttttctcccgctccagaaaaacctccggcctctcctcctctccgtcaacacccacccaagtgaccaagcagcacacgtttcccctggaatcctataagcacgagcctgaacggttagagaatcgcatctatgcctcgtcttcccccccggacacagggcagaggttctgcccgtcttccttccagagcccgaccaggcctccactggcatcaccgacacactatgctccctccaaagcccagtagaagactcagaaagtggtgtttacatgcgattcatgaggtcacacaagtgttatgacatcgttccaaccagttcaaagcttgttgtctttgatactacattacaagttaaaaaggccttctttgctttggtagccaacggtgtccgagcagcgccactgtgggagagtaaaaaacaaagttttgtaggaatgctaacaattacagatttcataaatatactacatagatactataaatcacctatggtacagatttatgaattagaggaacataaaattgaaacatggagggagctttatttacaagaaacatttaagcctttagtgaatatatctccagatgcaagcctcttcgatgctgtatactccttgatcaaaaataaaatccacagattgcccgttattgaccctatcagtgggaatgcactttatatacttacccacaaaagaatcctcaagttcctccagctttttgtaagtagtttttagcgtttct

SEQ ID NO: 170771 - DNA, 2326 bp, Homo sapiens
  Payload ID: 13611
  Gene Symbol: PRKAG3
  Gene Name: protein kinase, AMP-activated, gamma 3 non-catalytic subunit
  Uniprot ID: Q9UGI9
  ENST ID: ENST00000233944
  CDS Start-End: 47-1516
gccacagtgtcgcacacttgctctcagttggtctggggctggccacatggagcccgggctggagcacgcactgcgcaggaccccttcctggagcagccttgggggttctgagcatcaagagatgagcttcctagagcaagaaaacagcagctcatggccatcaccagctgtgaccagcagctcagaaagaatccgtgggaaacggagggccaaagccttgagatggacaaggcagaagtcggtggaggaaggggagccaccaggtcagggggaaggtccccggtccaggccagctgctgagtccaccgggctggaggccacattccccaagaccacacccttggctcaagctgatcctgccggggtgggcactccaccaacagggtgggactgcctcccctctgactgtacagcctcagctgcaggctccagcacagatgatgtggagctggccacggagttcccagccacagaggcctgggagtgtgagctagaaggcctgctggaagagaggcctgccctgtgcctgtccccgcaggccccatttcccaagctgggctgggatgacgaactgcggaaacccggcgcccagatctacatgcgcttcatgcaggagcacacctgctacgatgccatggcaactagctccaagctagtcatcttcgacaccatgctggagatcaagaaggccttctttgctctggtggccaacggtgtgcgggcagcccctctatgggacagcaagaagcagagctttgtggggatgctgaccatcactgacttcatcctggtgctgcatcgctactacaggtcccccctggtccagatctatgagattgaacaacataagattgagacctggagggagatctacctgcaaggctgcttcaagcctctggtctccatctctcctaatgatagcctgtttgaagctgtctacaccctcatcaagaaccggatccatcgcctgcctgttcttgacccggtgtcaggcaacgtactccacatcctcacacacaaacgcctgctcaagttcctgcacatctttggttccctgctgccccggccctccttcctctaccgcactatccaagatttgggcatcggcacattccgagacttggctgtggtgctggagacagcacccatcctgactgcactggacatctttgtggaccggcgtgtgtctgcactgcctgtggtcaacgaatgtggtcaggtcgtgggcctctattcccgctttgatgtgattcacctggctgcccagcaaacctacaaccacctggacatgagtgtgggagaagccctgaggcagaggacactatgtctggagggagtcctttcctgccagccccacgagagcttgggggaagtgatcgacaggattgctcgggagcaggtacacaggctggtgctagtggacgagacccagcatctcttgggcgtggtctccctctccgacatccttcaggcactggtgctcagccctgctggcatcgatgccctcggggcctgagaagatctgagtcctcaatcccaagccacctgcacacctggaagccaatgaagggaactggagaactcagccttcatcttcccccacccccatttgctggttcagctatgattcaggcttcttcagccctcccaaattgcccttgccctacctgtgctcccagaagccctcgggcatgcccagtgcaccatgggatgatgaaattaaggagaacagctgagtcaagcttggaggtccctgaaccagaggcactaggattaccccagggccatctgtgctccatgcccgcccatccccttgccgcctgactgggtcggatggccccagtgggtttagtcagggcttctggattcctcggtttctgggctacctatggcttcagccttcagctcctgggagtcccagctgttgttcccagcaacgtcgccactgccctcctactctccaggctttgtcatttcaaggctgctgaaatgctgcatttcaggggccaccatggagcagccgttatttatagaactgcctgttggaggtggggagtcctccctccattcttgtccagaaaactccttagctctcgcagtgagccatgttcttagtctccagggatggatggccttgtatatggacccctgagaatgagcaattgagaaaacaaaacaaaaggaacaatccatgaacttagattttattggtttcactcaaaatgctgcagtcatttgacctgaacttgtggcaagagacttgtgctttctaaattcaaagactagaaggaaaatggataaaaatcacaagtgccgtttctcttgc

SEQ ID NO: 170772 - DNA, 2301 bp, Homo sapiens
  Payload ID: 13611
  Gene Symbol: PRKAG3
  Gene Name: protein kinase, AMP-activated, gamma 3 non-catalytic subunit
  Uniprot ID: Q9UGI9
  ENST ID: ENST00000439262
  CDS Start-End: 22-1491
agttggtctggggctggccacatggagcccgggctggagcacgcactgcgcaggaccccttcctggagcagccttgggggttctgagcatcaagagatgagcttcctagagcaagaaaacagcagctcatggccatcaccagctgtgaccagcagctcagaaagaatccgtgggaaacggagggccaaagccttgagatggacaaggcagaagtcggtggaggaaggggagccaccaggtcagggggaaggtccccggtccaggccagctgctgagtccaccgggctggaggccacattccccaagaccacacccttggctcaagctgatcctgccggggtgggcactccaccaacagggtgggactgcctcccctctgactgtacagcctcagctgcaggctccagcacagatgatgtggagctggccacggagttcccagccacagaggcctgggagtgtgagctagaaggcctgctggaagagaggcctgccctgtgcctgtccccgcaggccccatttcccaagctgggctgggatgacgaactgcggaaacccggcgcccagatctacatgcgcttcatgcaggagcacacctgctacgatgccatggcaactagctccaagctagtcatcttcgacaccatgctggagatcaagaaggccttctttgctctggtggccaacggtgtgcgggcagcccctctatgggacagcaagaagcagagctttgtggggatgctgaccatcactgacttcatcctggtgctgcatcgctactacaggtcccccctggtccagatctatgagattgaacaacataagattgagacctggagggagatctacctgcaaggctgcttcaagcctctggtctccatctctcctaatgatagcctgtttgaagctgtctacaccctcatcaagaaccggatccatcgcctgcctgttcttgacccggtgtcaggcaacgtactccacatcctcacacacaaacgcctgctcaagttcctgcacatctttggttccctgctgccccggccctccttcctctaccgcactatccaagatttgggcatcggcacattccgagacttggctgtggtgctggagacagcacccatcctgactgcactggacatctttgtggaccggcgtgtgtctgcactgcctgtggtcaacgaatgtggtcaggtcgtgggcctctattcccgctttgatgtgattcacctggctgcccagcaaacctacaaccacctggacatgagtgtgggagaagccctgaggcagaggacactatgtctggagggagtcctttcctgccagccccacgagagcttgggggaagtgatcgacaggattgctcgggagcaggtacacaggctggtgctagtggacgagacccagcatctcttgggcgtggtctccctctccgacatccttcaggcactggtgctcagccctgctggcatcgatgccctcggggcctgagaagatctgagtcctcaatcccaagccacctgcacacctggaagccaatgaagggaactggagaactcagccttcatcttcccccacccccatttgctggttcagctatgattcaggcttcttcagccctcccaaattgcccttgccctacctgtgctcccagaagccctcgggcatgcccagtgcaccatgggatgatgaaattaaggagaacagctgagtcaagcttggaggtccctgaaccagaggcactaggattaccccagggccatctgtgctccatgcccgcccatccccttgccgcctgactgggtcggatggccccagtgggtttagtcagggcttctggattcctcggtttctgggctacctatggcttcagccttcagctcctgggagtcccagctgttgttcccagcaacgtcgccactgccctcctactctccaggctttgtcatttcaaggctgctgaaatgctgcatttcaggggccaccatggagcagccgttatttatagaactgcctgttggaggtggggagtcctccctccattcttgtccagaaaactccttagctctcgcagtgagccatgttcttagtctccagggatggatggccttgtatatggacccctgagaatgagcaattgagaaaacaaaacaaaaggaacaatccatgaacttagattttattggtttcactcaaaatgctgcagtcatttgacctgaacttgtggcaagagacttgtgctttctaaattcaaagactagaaggaaaatggataaaaatcacaagtgccgtttctcttgc

SEQ ID NO: 170773 - DNA, 331 bp, Homo sapiens
  Payload ID: 13611
  Gene Symbol: PRKAG3
  Gene Name: protein kinase, AMP-activated, gamma 3 non-catalytic subunit
  ENST ID: ENST00000430489
  CDS Start-End: 32-331
acttgctctcagttggtctggggctggccacatggagcccgggctggagcacgcactgcgcaggaccccttcctggagcagccttgggggttctgagcatcaagagatgagcttcctagagcaagaaaacagcagctcatggccatcaccagctgtgaccagcagctcagaaagaatccgtgggaaacggagggccaaagccttgagatggacaaggcagaagtcggtggaggaaggggagccaccaggtccccggtccaggccagctgctgagtccaccgggctggaggccacattccccaagaccacacccttggctcaagctgatcct

SEQ ID NO: 170774 - DNA, 1199 bp, Homo sapiens
  Payload ID: 13611
  Gene Symbol: PRKAG3
  Gene Name: protein kinase, AMP-activated, gamma 3 non-catalytic subunit
  ENST ID: ENST00000470307
  CDS Start-End: 34-1095
acacttgctctcagttggtctggggctggccacatggagcccgggctggagcacgcactgcgcaggaccccttcctggagcagccttgggggttctgagcatcaagagatgagcttcctagagcaagaaaacagcagctcatggccatcaccagctgtgaccagcagctcagaaagaatccgtgggaaacggagggccaaagccttgagatggacaaggcagaagtcggtggaggaaggggagccaccaggtcagggggaaggtccccggtccaggccagctgctgagtccaccgggctggaggccacattccccaagaccacacccttggctcaagctgatcctgccggggtgggcactccaccaacagggtgggactgcctcccctctgactgtacagcctcagctgcaggctccagcacagatgatgtggagctggccacggagttcccagccacagaggcctgggagtgtgagctagaaggcctgctggaagagaggcctgccctgtgcctgtccccgcaggccccatttcccaagctgggctgggatgacgaactgcggaaacccggcgcccagatctacatgcgcttcatgcaggagcacacctgctacgatgccatggcaactagctccaagctagtcatcttcgacaccatgctggagatcaagaaggccttctttgctctggtggccaacggtgtgcgggcagcccctctatgggacagcaagaagcagagctttgtggggatgctgaccatcactgacttcatcctggtgctgcatcgctactacaggtcccccctgagatctacctgcaaggctgcttcaagcctctggtctccatctctcctaatgatagcctgtttgaagctgtctacaccctcatcaagaaccggatccatcgcctgcctgttcttgacccggtgtcaggcaacgtactccacatcctcacacacaaacgcctgctcaagttcctgcacatctttggttccctgctgccccggccctccttcctctaccgcactatccaagatttgggcatcggcacattccgagacttggctgtggtgctggagacagcacccatcctgactgcactggacatctttgtggaccggcgtgtgtctgcactgcctgtggtcaacgaatgtggtcaggtcgtgggcctctattcccgctttgatgtgattcacctg

SEQ ID NO: 170775 - DNA, 2222 bp, Homo sapiens
  Payload ID: 13611
  Gene Symbol: PRKAG3
  Gene Name: protein kinase, AMP-activated, gamma 3 non-catalytic subunit
  Uniprot ID: Q9UGI9
  ENST ID: ENST00000529249
  CDS Start-End: 317-1786
ctgctcaatgaccatgttcccacatgctccaagccacatcccctcaaaaagggtccctctagcttgtcctcagtgacccaggaggcagctgaggaccaagtacccagattatccggtgcgccccttccctcccagcaacccccagccttcagggctgtagcagctgagcaaatgggggcccctccctctcattgcctgacacccaatcagagagaaaccgatcctggcagggcagggtgcccggggccgggcccagaatagtgcagcccagccacagtgtcgcacacttgctctcagttggtctggggctggccacatggagcccgggctggagcacgcactgcgcaggaccccttcctggagcagccttgggggttctgagcatcaagagatgagcttcctagagcaagaaaacagcagctcatggccatcaccagctgtgaccagcagctcagaaagaatccgtgggaaacggagggccaaagccttgagatggacaaggcagaagtcggtggaggaaggggagccaccaggtcagggggaaggtccccggtccaggccagctgctgagtccaccgggctggaggccacattccccaagaccacacccttggctcaagctgatcctgccggggtgggcactccaccaacagggtgggactgcctcccctctgactgtacagcctcagctgcaggctccagcacagatgatgtggagctggccacggagttcccagccacagaggcctgggagtgtgagctagaaggcctgctggaagagaggcctgccctgtgcctgtccccgcaggccccatttcccaagctgggctgggatgacgaactgcggaaacccggcgcccagatctacatgcgcttcatgcaggagcacacctgctacgatgccatggcaactagctccaagctagtcatcttcgacaccatgctggagatcaagaaggccttctttgctctggtggccaacggtgtgcgggcagcccctctatgggacagcaagaagcagagctttgtggggatgctgaccatcactgacttcatcctggtgctgcatcgctactacaggtcccccctggtccagatctatgagattgaacaacataagattgagacctggagggagatctacctgcaaggctgcttcaagcctctggtctccatctctcctaatgatagcctgtttgaagctgtctacaccctcatcaagaaccggatccatcgcctgcctgttcttgacccggtgtcaggcaacgtactccacatcctcacacacaaacgcctgctcaagttcctgcacatctttggttccctgctgccccggccctccttcctctaccgcactatccaagatttgggcatcggcacattccgagacttggctgtggtgctggagacagcacccatcctgactgcactggacatctttgtggaccggcgtgtgtctgcactgcctgtggtcaacgaatgtggtcaggtcgtgggcctctattcccgctttgatgtgattcacctggctgcccagcaaacctacaaccacctggacatgagtgtgggagaagccctgaggcagaggacactatgtctggagggagtcctttcctgccagccccacgagagcttgggggaagtgatcgacaggattgctcgggagcaggtacacaggctggtgctagtggacgagacccagcatctcttgggcgtggtctccctctccgacatccttcaggcactggtgctcagccctgctggcatcgatgccctcggggcctgagaagatctgagtcctcaatcccaagccacctgcacacctggaagccaatgaagggaactggagaactcagccttcatcttcccccacccccatttgctggttcagctatgattcaggtaggctctgccctgggccatgacaccagcctcttagtcttcctgatttcctggatctcagattgggacaccctgaggatgggagtggccaagctcaaagctgagcagccctgtgaaaactgcaagtgtaaggactcacaggtccccactttgtcccattttcagctgaggtcatggagactgtcctagaagggagggacaaagccccggctaaaagctaaggctgcgatgtgacttcagacactctgggaagatttacttgttccctcacaattcaatttccacctgctggaaatccccttagaaggaagcaagctata

SEQ ID NO: 170776 - DNA, 2677 bp, Homo sapiens
  Payload ID: 13612
  Gene Symbol: PRKACA
  Gene Name: protein kinase, cAMP-dependent, catalytic, alpha
  Uniprot ID: P17612
  ENST ID: ENST00000308677
  CDS Start-End: 198-1253
cttgggctgaggttcccgggcgggcgggcgcggagagacgcgggaagcaggggctgggcgggggtcgcggcgccgcagctagcgcagccagcccgagggccgccgccgccgccgcccagcgcgctccggggccgccggccgcagccagcacccgccgcgccgcagctccgggaccggccccggccgccgccgccgcgatgggcaacgccgccgccgccaagaagggcagcgagcaggagagcgtgaaagaattcttagccaaagccaaagaagattttcttaaaaaatgggaaagtcccgctcagaacacagcccacttggatcagtttgaacgaatcaagaccctcggcacgggctccttcgggcgggtgatgctggtgaaacacaaggagaccgggaaccactatgccatgaagatcctcgacaaacagaaggtggtgaaactgaaacagatcgaacacaccctgaatgaaaagcgcatcctgcaagctgtcaactttccgttcctcgtcaaactcgagttctccttcaaggacaactcaaacttatacatggtcatggagtacgtgcccggcggggagatgttctcacacctacggcggatcggaaggttcagtgagccccatgcccgtttctacgcggcccagatcgtcctgacctttgagtatctgcactcgctggatctcatctacagggacctgaagccggagaatctgctcattgaccagcagggctacattcaggtgacagacttcggtttcgccaagcgcgtgaagggccgcacttggaccttgtgcggcacccctgagtacctggcccctgagattatcctgagcaaaggctacaacaaggccgtggactggtgggccctgggggttcttatctatgaaatggccgctggctacccgcccttcttcgcagaccagcccatccagatctatgagaagatcgtctctgggaaggtgcgcttcccttcccacttcagctctgacttgaaggacctgctgcggaacctcctgcaggtagatctcaccaagcgctttgggaacctcaagaatggggtcaacgatatcaagaaccacaagtggtttgccacaactgactggattgccatctaccagaggaaggtggaagctcccttcataccaaagtttaaaggccctggggatacgagtaactttgacgactatgaggaagaagaaatccgggtctccatcaatgagaagtgtggcaaggagttttctgagttttaggggcatgcctgtgcccccatgggttttcttttttcttttttcttttttttggtcgggggggtgggagggttggattgaacagccagagggccccagagttccttgcatctaatttcacccccaccccaccctccagggttagggggagcaggaagcccagataatcagagggacagaaacaccagctgctccccctcatccccttcaccctcctgccccctctcccacttttcccttcctctttccccacagccccccagcccctcagccctcccagcccacttctgcctgttttaaacgagtttctcaactccagtcagaccaggtcttgctggtgtatccagggacagggtatggaaagaggggctcacgcttaactccagcccccacccacacccccatcccacccaaccacaggccccacttgctaagggcaaatgaacgaagcgccaaccttcctttcggagtaatcctgcctgggaaggagagatttttagtgacatgttcagtgggttgcttgctagaatttttttaaaaaaacaacaatttaaaatcttatttaagttccaccagtgcctccctccctccttcctctactcccacccctcccatgtccccccattcctcaaatccattttaaagagaagcagactgactttggaaagggaggcgctggggtttgaacctccccgctgctaatctcccctgggcccctccccggggaatcctctctgccaatcctgcgagggtctaggcccctttaggaagcctccgctctctttttccccaacagacctgtcttcacccttgggctttgaaagccagacaaagcagctgcccctctccctgccaaagaggagtcatcccccaaaaagacagagggggagccccaagcccaagtctttcctcccagcagcgtttccccccaactccttaattttattctccgctagattttaacgtccagccttccctcagctgagtggggagggcatccctgcaaaagggaacagaagaggccaagtccccccaagccacggcccggggttcaaggctagagctgctggggaggggctgcctgttttactcacccaccagcttccgcctcccccatcctgggcgcccctcctccagcttagctgtcagctgtccatcacctctcccccactttctcatttgtgcttttttctctcgtaatagaaaagtggggagccgctggggagccaccccattcatccccgtatttccccctctcataacttctccccatcccaggaggagttctcaggcctggggtggggccccgggtgggtgcgggggcgattcaacctgtgtgctgcgaaggacgagacttcctcttgaacagtgtgctgttgtaaacatatttgaaaactattaccaataaagttttgtttaaaaaaaaa

SEQ ID NO: 170777 - DNA, 922 bp, Homo sapiens
  Payload ID: 13612
  Gene Symbol: PRKACA
  Gene Name: protein kinase, cAMP-dependent, catalytic, alpha
  ENST ID: ENST00000593092
  CDS Start-End: 1-624
gaattcttagccaaagccaaagaagattttcttaaaaaatgggaaagtcccgctcagaacacagcccacttggatcagtttgaacgaatcaagaccctcggcacgggctccttcgggcgggtgatgctggtgaaacacaaggagaccgggaaccactatgccatgaagatcctcgacaaacagaaggtggtgaaactgaaacagatcgaacacaccctgaatgaaaagcgcatcctgcaagctgtcaactttccgttcctcgtcaaactcgagttctccttcaaggacaactcaaacttatacatggtcatggagtacgtgcccggcggggagatgttctcacacctacggcggatcggaaggttcagtgagccccatgcccgtttctacgcggcccagatcgtcctgacctttgagtatctgcactcgctggatctcatctacagggacctgaagccggagaatctgctcattgaccagcagggctacattcaggtgacagacttcggtttcgccaagcgcgtgaagggccgcacttggaccttgtgcggcacccctgagtacctggcccctgagattatcctgagcaaagtaggagcctccccagccctccccttcccctgaggccggctctgctctcctgctctcgcctcctcctcaccctgtgcccccccatcttgctccagggctacaacaaggccgtggactggtgggccctgggggttcttatctatgaaatggccgctggctacccgcccttcttcgcagaccagcccatccagatctatgagaagatcgtctctgggaaggtgaggtccggatgtggggacacagccctggaagaaacagaccgttccctgctcacccatcctattccctggggagccctgcttgttgtcagaataatctagaagttccttaa

SEQ ID NO: 170778 - DNA, 1127 bp, Homo sapiens
  Payload ID: 13612
  Gene Symbol: PRKACA
  Gene Name: protein kinase, cAMP-dependent, catalytic, alpha
  Uniprot ID: P17612
  ENST ID: ENST00000589994
  CDS Start-End: 34-1065
gtagtgccggtgccctgagaacaggactgagtgatggcttccaactccagcgatgtgaaagaattcttagccaaagccaaagaagattttcttaaaaaatgggaaagtcccgctcagaacacagcccacttggatcagtttgaacgaatcaagaccctcggcacgggctccttcgggcgggtgatgctggtgaaacacaaggagaccgggaaccactatgccatgaagatcctcgacaaacagaaggtggtgaaactgaaacagatcgaacacaccctgaatgaaaagcgcatcctgcaagctgtcaactttccgttcctcgtcaaactcgagttctccttcaaggacaactcaaacttatacatggtcatggagtacgtgcccggcggggagatgttctcacacctacggcggatcggaaggttcagtgagccccatgcccgtttctacgcggcccagatcgtcctgacctttgagtatctgcactcgctggatctcatctacagggacctgaagccggagaatctgctcattgaccagcagggctacattcaggtgacagacttcggtttcgccaagcgcgtgaagggccgcacttggaccttgtgcggcacccctgagtacctggcccctgagattatcctgagcaaaggctacaacaaggccgtggactggtgggccctgggggttcttatctatgaaatggccgctggctacccgcccttcttcgcagaccagcccatccagatctatgagaagatcgtctctgggaaggtgcgcttcccttcccacttcagctctgacttgaaggacctgctgcggaacctcctgcaggtagatctcaccaagcgctttgggaacctcaagaatggggtcaacgatatcaagaaccacaagtggtttgccacaactgactggattgccatctaccagaggaaggtggaagctcccttcataccaaagtttaaaggccctggggatacgagtaactttgacgactatgaggaagaagaaatccgggtctccatcaatgagaagtgtggcaaggagttttctgagttttaggggcatgcctgtgcccccatgggttttcttttttcttttttcttttttttggtcgggggggt

SEQ ID NO: 170779 - DNA, 403 bp, Homo sapiens
  Payload ID: 13612
  Gene Symbol: PRKACA
  Gene Name: protein kinase, cAMP-dependent, catalytic, alpha
  ENST ID: ENST00000589284
  CDS Start-End: 327-403
agactgcgtctccgccccgccctctcacccccggattgacactgagcgttctgctggggggcttggcggacccggcacctccgccaatcggcggcctcgcagggcggaccccgggcccagtccagcgtctcggccaatcggacgcgtctgcccgcccagctgcggcctcgcgagcgagtgaatggccgagagtccgcgtgaaagaattcttagccaaagccaaagaagattttcttaaaaaatgggaaagtcccgctcagaacacagcccacttggatcagtttgaacgaatcaagaccctcggcacgggctccttcgggcgggtgatgctggtgaaacacaaggagaccgggaaccactatgccatgaagatcctcgacaaacagaaggtggtgaaactgaa

SEQ ID NO: 170780 - DNA, 1101 bp, Homo sapiens
  Payload ID: 13612
  Gene Symbol: PRKACA
  Gene Name: protein kinase, cAMP-dependent, catalytic, alpha
  ENST ID: ENST00000590853
  CDS Start-End: 186-560
ttcccgggcgggcgggcgcggagagacgcgggaagcaggggctgggcgggggtcgcggcgccgcagctagcgcagccagcccgagggccgccgccgccgccgcccagcgcgctccggggccgccggccgcagccagcacccgccgcgccgcagctccgggaccggccccggccgccgccgccgcgatgggcaacgccgccgccgccaagaagggcagcgagcaggagagcgtgaaagaattcttagccaaagccaaagaagattttcttaaaaaatgggaaagtcccgctcagccctcccagcccacttctgcctgttttaaacgagtttctcaactccagtcagaccaggtcttgctggtgtatccagggacagggtatggaaagaggggctcacgcttaactccagcccccacccacacccccatcccacccaaccacaggccccacttgctaagggcaaatgaacgaagcgccaaccttcctttcggagtaatcctgcctgggaaggagagatttttagtgacatgttcagtgggttgcttgctagaatttttttaaaaaaacaacaatttaaaatcttatttaagttccaccagtgcctccctccctccttcctctactcccacccctcccatgtccccccattcctcaaatccattttaaagagaagcagactgactttggaaagggaggcgctggggtttgaacctccccgctgctaatctcccctgggcccctccccggggaatcctctctgccaatcctgcgagggtctaggcccctttaggaagcctccgctctctttttccccaacagacctgtcttcacccttgggctttgaaagccagacaaagcagctgcccctctccctgccaaagaggagtcatcccccaaaaagacagagggggagccccaagcccaagtctttcctcccagcagcgtttccccccaactccttaattttattctccgctagattttaacgtccagccttccctcagctgagtggggagggcatccctgcaaaagggaacagaagaggccaagtccccccaagccacggcccggggttcaaggctagagctgctggggaggggct

SEQ ID NO: 170781 - DNA, 824 bp, Homo sapiens
  Payload ID: 13612
  Gene Symbol: PRKACA
  Gene Name: protein kinase, cAMP-dependent, catalytic, alpha
  ENST ID: ENST00000587372
  CDS Start-End: 1-755
gaatcaagaccctcggcacgggctccttcgggcgggtgatgctggtgaaacacaaggagaccgggaaccactatgccatgaagatcctcgacaaacagaaggtggtgaaactgaaacagatcgaacacaccctgaatgaaaagcgcatcctgcaagctgtcaactttccgttcctcgtcaaactcgagttctccttcaaggacaactcaaacttatacatggtcatggagtacgtgcccggcggggagatgttctcacacctacggcggatcggaaggttcagtgagccccatgcccgtttctacgcggcccagatcgtcctgacctttgagtatctgcactcgctggatctcatctacagggacctgaagccggagaatctgctcattgaccagcagggctacattcaggtgacagacttcggtttcgccaagcgcgtgaagggccgcacttggaccttgtgcggcacccctgagtacctggcccctgagattatcctgagcaaaggctacaacaaggccgtggactggtgggccctgggggttcttatctatgaaatggccgctggctacccgcccttcttcgcagaccagcccatccagatctatgagaagatcgtctctgggaaggtggaagctcccttcataccaaagtttaaaggccctggggatacgagtaactttgacgactatgaggaagaagaaatccgggtctccatcaatgagaagtgtggcaaggagttttctgagttttaggggcatgcctgtgcccccatgggttttcttttttcttttttcttttttttggtcgggggggtgggaggg

SEQ ID NO: 170782 - DNA, 1914 bp, Homo sapiens
  Payload ID: 13613
  Gene Symbol: PRKACB
  Gene Name: protein kinase, cAMP-dependent, catalytic, beta
  ENST ID: ENST00000370680
  CDS Start-End: 313-1107
ccattttgagttgttctagtggtatatgaaggaggctgggataactagcttgaaagaaattcagtctagttatagacatctttggcattaatctgatgtttactagtgatatctcatgctaggcagttatgctttgcttctaggggcttctctttttaaaacaaaagaaagctcttttcgttttctgtgtgctgcatgctccagtgtgtgtgtttacaccatcggttcttctccctctagagattagcataactccctttgctgttggattgttattttgagcaatatgttttggaaaggttggttttcatcatgagtgcacgcaaatcatcagatgcatctgcttgctcctcttcagaaatatctgattcctttgtgaaagagtttctagccaaagccaaagaagactttttgaaaaaatgggagaatccaactcagaataatgccggacttgaagattttgaaaggaaaaaaacccttggaacaggttcatttggaagagtcatgttggtaaaacacaaagccactgaacagtattatgccatgaagatcttagataagcagaaggttgttaaactgaagcaaatagagcatactttgaatgagaaaagaatattacaggcagtgaattttcctttccttgttcgactggagtatgcttttaaggataattctaatttatacatggttatggaatatgtccctgggggtgaaatgttttcacatctaagaagaattggaaggttcagtgagccccatgcacggttctatgcagctcagatagtgctaacattcgagtacctccattcactagacctcatctacagagatctaaaacctgaaaatctcttaattgaccatcaaggctatatccaggtcacagactttgggtttgccaaaagagttaaaggcagaacttggacattatgtggaactccagagtatttggctccagaaataattctcagcaagggctacaataaggcagtggattggtgggcattaggagtgctaatctatgaaatggcagctggctatcccccattctttgcagaccaaccaattcagatttatgaaaagattgtttctggaaagcagaacttttgatatgaacaaaacaaaactttgagaaaaattaacagacaaggcagtgatttatttttgaagaatttgagaagtgtagactctcaagaggactaaaggtcatatgaagaatgatgagagaaccaaaatacattaaaatcacaaatggaagaagaatattttactaatacaaaaactaagaatgtaaatgttataataattgtttcaaatcatttaattgacagtaattataaagttcttgaatctttactatattacttttatttatattcatataagaaatccaattttctaacaaggatactgtcataactaaatttacatttattaagaaaaactgctttagttaaaattaatgtgtcttcatttttatgcattggcctcgatttgccaatcattctctattggttaaattttatattcagctgtttatgaatatatattcattttatatcaaactttaaaattttgtatctaataatcagcatatattctaaaatcataacagtctaaatcctgggcaccttagaagaatgacaccagaaaaccttattatatcacaatattctgttttccccttcatttatttagaaatatgacaggatatttggtgtacttttgttttttaactaaaagtaccagattatctctccccatgtgggatataaaattatccccatctcttactccctttactcatctaaagtagaagtcatgaaagtggaatttttgccattaaaaggctctgtattatgtgaagttagattgtattaaccatttcccaataaatcatctgtttcaaaactcaaa

SEQ ID NO: 170783 - DNA, 4288 bp, Homo sapiens
  Payload ID: 13613
  Gene Symbol: PRKACB
  Gene Name: protein kinase, cAMP-dependent, catalytic, beta
  Uniprot ID: P22694
  ENST ID: ENST00000370682
  CDS Start-End: 32-1099
attctgctgtttgctccttgccaggttcaacatgggattgtcacgcaaatcatcagatgcatctgcttgctcctcttcagaaatatctgtgaaagagtttctagccaaagccaaagaagactttttgaaaaaatgggagaatccaactcagaataatgccggacttgaagattttgaaaggaaaaaaacccttggaacaggttcatttggaagagtcatgttggtaaaacacaaagccactgaacagtattatgccatgaagatcttagataagcagaaggttgttaaactgaagcaaatagagcatactttgaatgagaaaagaatattacaggcagtgaattttcctttccttgttcgactggagtatgcttttaaggataattctaatttatacatggttatggaatatgtccctgggggtgaaatgttttcacatctaagaagaattggaaggttcagtgagccccatgcacggttctatgcagctcagatagtgctaacattcgagtacctccattcactagacctcatctacagagatctaaaacctgaaaatctcttaattgaccatcaaggctatatccaggtcacagactttgggtttgccaaaagagttaaaggcagaacttggacattatgtggaactccagagtatttggctccagaaataattctcagcaagggctacaataaggcagtggattggtgggcattaggagtgctaatctatgaaatggcagctggctatcccccattctttgcagaccaaccaattcagatttatgaaaagattgtttctggaaaggtccgattcccatcccacttcagttcagatctcaaggaccttctacggaacctgctgcaggtggatttgaccaagagatttggaaatctaaagaatggtgtcagtgatataaaaactcacaagtggtttgccacgacagattggattgctatttaccagaggaaggttgaagctccattcataccaaagtttagaggctctggagataccagcaactttgatgactatgaagaagaagatatccgtgtctctataacagaaaaatgtgcaaaagaatttggtgaattttaaagaggaacaagatgacatctgagctcacactcagtgtttgcactctgttgagagataaggtagagctgagaccgtccttgttgaagcagttacctagttccttcattccaacgactgagtgaggtctttattgccatcatcccgtgtgcgcactctgcatccacctatgtaacaaggcaccgctaagcaagcattgtctgtgccataacacagtactagaccactttcttacttctctttgggttgtctttctcctctcctatatccatttcttccttttccaatttcattggttttctctaaacagtgctccattttattttgttggtgtttcagatgggcagtgttatggctacgtgatatttgaagggaaggataagtgttgctttcagtagttattgccaatattgttgttggtcaatggcttgaagataaactttctaataattattatttctttgagtagctcagacttggttttgccaaaactcttggtaatttttgaagatagactgtcttatcaccaaggaaatttatacaaattaagactaactttcttggaattcactattctggcaataaattttggtagactaatacagtacagctagacccagaaatttggaaggctgtagatcagaggttctagttccctttccctccttttatatcctcctctccttgagtaatgaagtgaccagcctgtgtagtgtgacaaacgtgtctcattcagcaggaaaaactaatgatatggatcatcacccagattctctcacttggtaccagcatttctgtaggtattagagaagagttctaagttttctaaaccttaactgttccttaaggattttagccagtattttaatagaacatgattaatgaaagtgacaaattttaaattttctctaatagtcctcatcataaactttttaaaggaaaataagcaaactaaaaagaacattggtttagataaatacttatactttgcaaagtcaaaaatggcttgatttttggaaacaatatagaggtattcatatttaaatgagggtttacatttgttttgttttgtaaccgttaaaaagaagttgtttccagctaattattgtggtgtactatatttgtgagcctagggtaggggcactgctgcaacttctgctttcatcccatgcctcatcaatgaggaaagggaacaaagtgtataaaactgccacaattgtattttaattttgaggtatgatattttcagatatttcataatttctaacctctgttctctcagtaaacagaatgtctgatcgatcatgcagatacaatgttggtatttgagaggttagtttttttcctacacttttttttgccaactgacttaacaacattgctgtcaggtggaaatttcaagcacttttgcacatttagttcagtgtttgttgagaatccatggcttaacccacttgttttgctatttttttctttgcttttaattttccccatctgattttatctctgcgtttcagtgacctaccttaaaacaacacacgagaagagttaaactgggttcattttaatgatcaatttacctgcatataaaatttatttttaatcaagctgatcttaatgtatataatcattctatttgctttattatcggtgcaggtaggtcattaacaccacttcttttcatctgtaccacaccctggtgaaacctttgaagacataaaaaaaacctgtctgagatgttctttctaccaatctatatgtctttcggttatcaagtgtttctgcatggtaatgtcatgtaaatgctgatattgatttcactggtccatctatatttaaaacgtgcaagaaaaaaataaaatactctgctctagcaagttttgtgtaacaaaggcatatcgtcatgttaataaatttaaaacatcattcgtataaaatattttaattttcttgtatttcatttagacccaagaacatgctgaccaatgtgttctatatgtaaactacaaattctatggtagctttgttgtatattattgtaaaattattttaataagtcatggggatgacaatttgattattacaatttagttttcagtaatcaaaaagatttctatgaattctaaaaaatatttttttctatgaaattactagtgcccagctgtagaatctaccttaggtagatgatccctagacatacgttggttttgagggctattcagccattccattttactctctatttaaaggccgtgagcaagcttgtcatgagcaaatatgtcaagggagtcaatttctgaccaatcaagtacactaaattagaatatttttaaagtatgtaacattcccagtttcagccacaatttagccaagaataagataaaaacttgaataagaagtaagtagcataaatcagtatttaacctaaaattacatatttgaaacagaagatattatgttatgctcagtaaataattaagagatggcattgtgtaagaaggagccctagactgaaagtcaagacatctgaatttcaggctggaaaactatcagtatgatctcagcctcagttctcttgtctgtaaaatggaagaactggattaggcagtttgtaagattcctcctaactttcacagtcgatgacaagattgtctttttatctgatattttgaagggtatattgctttgaagtaagtctcaataaggcaatatattttagggcatctttcttcttatctctgacagtgttcttaaaattatttgaatatcataagagccttggtgtctgtcctaattcctttctcactcaccgatgctgaatacccagttgaatcaaactgtcaacctaccaaaaacgatattgtggcttatgggtattgctgtctcattcttggtatattcttgtgttaactgcccattggcctgaaaatactcattgtaagcctgaaaaaaaaaatctttcccactgttttttctgcttgttgtaagaatcaaatgaaataatgtatgtgaaagcaccttgtaaactgtaacctatcaatgtaaaatgttaaggtgtgttgttatttcattaattacttctttgtttagaatggaatttcctatgcactactgtagctaggaaatgctgaaaacaactgtgttttttaattaatcaataactgcaaaattaaagtaccttcaatggataag

SEQ ID NO: 170784 - DNA, 869 bp, Homo sapiens
  Payload ID: 13613
  Gene Symbol: PRKACB
  Gene Name: protein kinase, cAMP-dependent, catalytic, beta
  ENST ID: ENST00000370684
  CDS Start-End: 97-834
aatatcagtgaggtccacagctagcagtaagagctggtgtaattgaaagacgtttaggtgcaatcattctgctgtttgctccttgccaggttcaacatgggattgttgaaagagtttctagccaaagccaaagaagactttttgaaaaaatgggagaatccaactcagaataatgccggacttgaagattttgaaaggaaaaaaacccttggaacaggttcatttggaagagtcatgttggtaaaacacaaagccactgaacagtattatgccatgaagatcttagataagcagaaggttgttaaactgaagcaaatagagcatactttgaatgagaaaagaatattacaggcagtgaattttcctttccttgttcgactggagtatgcttttaaggataattctaatttatacatggttatggaatatgtccctgggggtgaaatgttttcacatctaagaagaattggaaggttcagtgagccccatgcacggttctatgcagctcagatagtgctaacattcgagtacctccattcactagacctcatctacagagatctaaaacctgaaaatctcttaattgaccatcaaggctatatccaggtcacagactttgggtttgccaaaagagttaaaggcagaacttggacattatgtggaactccagagtatttggctccagaaataattctcagcaagggctacaataaggcagtggattggtgggcattaggagtgctaatctatgaaatggcagctggctatcccccattctttgcagaccaaccaattcagatttatgaaaagattgtttctggaaagaacttttgatatgaacaaaacaaaactttgagaaaaattaacag

SEQ ID NO: 170785 - DNA, 4481 bp, Homo sapiens
  Payload ID: 13613
  Gene Symbol: PRKACB
  Gene Name: protein kinase, cAMP-dependent, catalytic, beta
  Uniprot ID: P22694
  ENST ID: ENST00000370685
  CDS Start-End: 92-1288
acatgcatagctcttagcttctgtgtaagaagttgtgagctccttctggaaacatttgcagttacattaagtaaagtgtaaatgcacatgaatggcagcttatagagaaccaccttgtaaccagtatacaggtacaactacagctcttcagaaattggaaggttttgctagccggttatttcatagacactctaaaggtactgcacatgatcagaaaacagctctggaaaatgacagccttcatttctctgaacatactgccttatgggacagatcaatgaaagagtttctagccaaagccaaagaagactttttgaaaaaatgggagaatccaactcagaataatgccggacttgaagattttgaaaggaaaaaaacccttggaacaggttcatttggaagagtcatgttggtaaaacacaaagccactgaacagtattatgccatgaagatcttagataagcagaaggttgttaaactgaagcaaatagagcatactttgaatgagaaaagaatattacaggcagtgaattttcctttccttgttcgactggagtatgcttttaaggataattctaatttatacatggttatggaatatgtccctgggggtgaaatgttttcacatctaagaagaattggaaggttcagtgagccccatgcacggttctatgcagctcagatagtgctaacattcgagtacctccattcactagacctcatctacagagatctaaaacctgaaaatctcttaattgaccatcaaggctatatccaggtcacagactttgggtttgccaaaagagttaaaggcagaacttggacattatgtggaactccagagtatttggctccagaaataattctcagcaagggctacaataaggcagtggattggtgggcattaggagtgctaatctatgaaatggcagctggctatcccccattctttgcagaccaaccaattcagatttatgaaaagattgtttctggaaaggtccgattcccatcccacttcagttcagatctcaaggaccttctacggaacctgctgcaggtggatttgaccaagagatttggaaatctaaagaatggtgtcagtgatataaaaactcacaagtggtttgccacgacagattggattgctatttaccagaggaaggttgaagctccattcataccaaagtttagaggctctggagataccagcaactttgatgactatgaagaagaagatatccgtgtctctataacagaaaaatgtgcaaaagaatttggtgaattttaaagaggaacaagatgacatctgagctcacactcagtgtttgcactctgttgagagataaggtagagctgagaccgtccttgttgaagcagttacctagttccttcattccaacgactgagtgaggtctttattgccatcatcccgtgtgcgcactctgcatccacctatgtaacaaggcaccgctaagcaagcattgtctgtgccataacacagtactagaccactttcttacttctctttgggttgtctttctcctctcctatatccatttcttccttttccaatttcattggttttctctaaacagtgctccattttattttgttggtgtttcagatgggcagtgttatggctacgtgatatttgaagggaaggataagtgttgctttcagtagttattgccaatattgttgttggtcaatggcttgaagataaactttctaataattattatttctttgagtagctcagacttggttttgccaaaactcttggtaatttttgaagatagactgtcttatcaccaaggaaatttatacaaattaagactaactttcttggaattcactattctggcaataaattttggtagactaatacagtacagctagacccagaaatttggaaggctgtagatcagaggttctagttccctttccctccttttatatcctcctctccttgagtaatgaagtgaccagcctgtgtagtgtgacaaacgtgtctcattcagcaggaaaaactaatgatatggatcatcacccagattctctcacttggtaccagcatttctgtaggtattagagaagagttctaagttttctaaaccttaactgttccttaaggattttagccagtattttaatagaacatgattaatgaaagtgacaaattttaaattttctctaatagtcctcatcataaactttttaaaggaaaataagcaaactaaaaagaacattggtttagataaatacttatactttgcaaagtcaaaaatggcttgatttttggaaacaatatagaggtattcatatttaaatgagggtttacatttgttttgttttgtaaccgttaaaaagaagttgtttccagctaattattgtggtgtactatatttgtgagcctagggtaggggcactgctgcaacttctgctttcatcccatgcctcatcaatgaggaaagggaacaaagtgtataaaactgccacaattgtattttaattttgaggtatgatattttcagatatttcataatttctaacctctgttctctcagtaaacagaatgtctgatcgatcatgcagatacaatgttggtatttgagaggttagtttttttcctacacttttttttgccaactgacttaacaacattgctgtcaggtggaaatttcaagcacttttgcacatttagttcagtgtttgttgagaatccatggcttaacccacttgttttgctatttttttctttgcttttaattttccccatctgattttatctctgcgtttcagtgacctaccttaaaacaacacacgagaagagttaaactgggttcattttaatgatcaatttacctgcatataaaatttatttttaatcaagctgatcttaatgtatataatcattctatttgctttattatcggtgcaggtaggtcattaacaccacttcttttcatctgtaccacaccctggtgaaacctttgaagacataaaaaaaacctgtctgagatgttctttctaccaatctatatgtctttcggttatcaagtgtttctgcatggtaatgtcatgtaaatgctgatattgatttcactggtccatctatatttaaaacgtgcaagaaaaaaataaaatactctgctctagcaagttttgtgtaacaaaggcatatcgtcatgttaataaatttaaaacatcattcgtataaaatattttaattttcttgtatttcatttagacccaagaacatgctgaccaatgtgttctatatgtaaactacaaattctatggtagctttgttgtatattattgtaaaattattttaataagtcatggggatgacaatttgattattacaatttagttttcagtaatcaaaaagatttctatgaattctaaaaaatatttttttctatgaaattactagtgcccagctgtagaatctaccttaggtagatgatccctagacatacgttggttttgagggctattcagccattccattttactctctatttaaaggccgtgagcaagcttgtcatgagcaaatatgtcaagggagtcaatttctgaccaatcaagtacactaaattagaatatttttaaagtatgtaacattcccagtttcagccacaatttagccaagaataagataaaaacttgaataagaagtaagtagcataaatcagtatttaacctaaaattacatatttgaaacagaagatattatgttatgctcagtaaataattaagagatggcattgtgtaagaaggagccctagactgaaagtcaagacatctgaatttcaggctggaaaactatcagtatgatctcagcctcagttctcttgtctgtaaaatggaagaactggattaggcagtttgtaagattcctcctaactttcacagtcgatgacaagattgtctttttatctgatattttgaagggtatattgctttgaagtaagtctcaataaggcaatatattttagggcatctttcttcttatctctgacagtgttcttaaaattatttgaatatcataagagccttggtgtctgtcctaattcctttctcactcaccgatgctgaatacccagttgaatcaaactgtcaacctaccaaaaacgatattgtggcttatgggtattgctgtctcattcttggtatattcttgtgttaactgcccattggcctgaaaatactcattgtaagcctgaaaaaaaaaatctttcccactgttttttctgcttgttgtaagaatcaaatgaaataatgtatgtgaaagcaccttgtaaactgtaacctatcaatgtaaaatgttaaggtgtgttgttatttcattaattacttctttgtttagaatggaatttcctatgcactactgtagctaggaaatgctgaaaacaactgtgttttttaattaatcaataactgcaaaattaaagtaccttcaatggataagacaa

SEQ ID NO: 170786 - DNA, 1905 bp, Homo sapiens
  Payload ID: 13613
  Gene Symbol: PRKACB
  Gene Name: protein kinase, cAMP-dependent, catalytic, beta
  Uniprot ID: P22694
  ENST ID: ENST00000370688
  CDS Start-End: 183-956
gttcgctggagccctttcctcagacccggcccggtcttcgcgcccggactcctggcgccagcgctaggcgcactcaccgctctgacgggtgcagacgcgggagttgtcccagactgtggagtggcgggcacggccccagccccccttcccttccctgaccccttcttgccatcgccccagacatggggaacgcggcgaccgccaagaaaggcagcgaggtggagagcgtgaaagagtttctagccaaagccaaagaagactttttgaaaaaatgggagaatccaactcagaataatgccggacttgaagattttgaaaggaaaaaaacccttggaacaggttcatttggaagagtcatgttggtaaaacacaaagccactgaacagtattatgccatgaagatcttagataagcagaaggttgttaaactgaagcaaatagagcatactttgaatgagaaaagaatattacaggcagtgaattttcctttccttgttcgactggagtatgcttttaaggataattctaatttatacatggttatggaatatgtccctgggggtgaaatgttttcacatctaagaagaattggaaggttcagtgagccccatgcacggttctatgcagctcagatagtgctaacattcgagtacctccattcactagacctcatctacagagatctaaaacctgaaaatctcttaattgaccatcaaggctatatccaggtcacagactttgggtttgccaaaagagttaaaggcagaacttggacattatgtggaactccagagtatttggctccagaaataattctcagcaagggctacaataaggcagtggattggtgggcattaggagtgctaatctatgaaatggcagctggctatcccccattctttgcagaccaaccaattcagatttatgaaaagattgtttctggaaagaacttttgatatgaacaaaacaaaactttgagaaaaattaacagacaaggcagtgatttatttttgaagaatttgagaagtgtagactctcaagaggactaaaggtcatatgaagaatgatgagagaaccaaaatacattaaaatcacaaatggaagaagaatattttactaatacaaaaactaagaatgtaaatgttataataattgtttcaaatcatttaattgacagtaattataaagttcttgaatctttactatattacttttatttatattcatataagaaatccaattttctaacaaggatactgtcataactaaatttacatttattaagaaaaactgctttagttaaaattaatgtgtcttcatttttatgcattggcctcgatttgccaatcattctctattggttaaattttatattcagctgtttatgaatatatattcattttatatcaaactttaaaattttgtatctaataatcagcatatattctaaaatcataacagtctaaatcctgggcaccttagaagaatgacaccagaaaaccttattatatcacaatattctgttttccccttcatttatttagaaatatgacaggatatttggtgtacttttgttttttaactaaaagtaccagattatctctccccatgtgggatataaaattatccccatctcttactccctttactcatctaaagtagaagtcatgaaagtggaatttttgccattaaaaggctctgtattatgtgaagttagattgtattaaccatttcccaataaatcatctgtttcaaaactcaaattcaaactagaatgtgtctctattcacattgcaaaaatattattgtctctctggttagtggctaaaagccaaattggaaactaactagttttttaaattttttaaattgtgcaaattattaaaaatccaatttggtcttata

SEQ ID NO: 170787 - DNA, 4513 bp, Homo sapiens
  Payload ID: 13613
  Gene Symbol: PRKACB
  Gene Name: protein kinase, cAMP-dependent, catalytic, beta
  Uniprot ID: P22694
  ENST ID: ENST00000370689
  CDS Start-End: 265-1320
gtctgcccgccgccgccactgctgctgccaccgccgtcgccgccgccgccgccgccgccgctgctgctgccggtgctaaggagttcgctggagccctttcctcagacccggcccggtcttcgcgcccggactcctggcgccagcgctaggcgcactcaccgctctgacgggtgcagacgcgggagttgtcccagactgtggagtggcgggcacggccccagccccccttcccttccctgaccccttcttgccatcgccccagacatggggaacgcggcgaccgccaagaaaggcagcgaggtggagagcgtgaaagagtttctagccaaagccaaagaagactttttgaaaaaatgggagaatccaactcagaataatgccggacttgaagattttgaaaggaaaaaaacccttggaacaggttcatttggaagagtcatgttggtaaaacacaaagccactgaacagtattatgccatgaagatcttagataagcagaaggttgttaaactgaagcaaatagagcatactttgaatgagaaaagaatattacaggcagtgaattttcctttccttgttcgactggagtatgcttttaaggataattctaatttatacatggttatggaatatgtccctgggggtgaaatgttttcacatctaagaagaattggaaggttcagtgagccccatgcacggttctatgcagctcagatagtgctaacattcgagtacctccattcactagacctcatctacagagatctaaaacctgaaaatctcttaattgaccatcaaggctatatccaggtcacagactttgggtttgccaaaagagttaaaggcagaacttggacattatgtggaactccagagtatttggctccagaaataattctcagcaagggctacaataaggcagtggattggtgggcattaggagtgctaatctatgaaatggcagctggctatcccccattctttgcagaccaaccaattcagatttatgaaaagattgtttctggaaaggtccgattcccatcccacttcagttcagatctcaaggaccttctacggaacctgctgcaggtggatttgaccaagagatttggaaatctaaagaatggtgtcagtgatataaaaactcacaagtggtttgccacgacagattggattgctatttaccagaggaaggttgaagctccattcataccaaagtttagaggctctggagataccagcaactttgatgactatgaagaagaagatatccgtgtctctataacagaaaaatgtgcaaaagaatttggtgaattttaaagaggaacaagatgacatctgagctcacactcagtgtttgcactctgttgagagataaggtagagctgagaccgtccttgttgaagcagttacctagttccttcattccaacgactgagtgaggtctttattgccatcatcccgtgtgcgcactctgcatccacctatgtaacaaggcaccgctaagcaagcattgtctgtgccataacacagtactagaccactttcttacttctctttgggttgtctttctcctctcctatatccatttcttccttttccaatttcattggttttctctaaacagtgctccattttattttgttggtgtttcagatgggcagtgttatggctacgtgatatttgaagggaaggataagtgttgctttcagtagttattgccaatattgttgttggtcaatggcttgaagataaactttctaataattattatttctttgagtagctcagacttggttttgccaaaactcttggtaatttttgaagatagactgtcttatcaccaaggaaatttatacaaattaagactaactttcttggaattcactattctggcaataaattttggtagactaatacagtacagctagacccagaaatttggaaggctgtagatcagaggttctagttccctttccctccttttatatcctcctctccttgagtaatgaagtgaccagcctgtgtagtgtgacaaacgtgtctcattcagcaggaaaaactaatgatatggatcatcacccagattctctcacttggtaccagcatttctgtaggtattagagaagagttctaagttttctaaaccttaactgttccttaaggattttagccagtattttaatagaacatgattaatgaaagtgacaaattttaaattttctctaatagtcctcatcataaactttttaaaggaaaataagcaaactaaaaagaacattggtttagataaatacttatactttgcaaagtcaaaaatggcttgatttttggaaacaatatagaggtattcatatttaaatgagggtttacatttgttttgttttgtaaccgttaaaaagaagttgtttccagctaattattgtggtgtactatatttgtgagcctagggtaggggcactgctgcaacttctgctttcatcccatgcctcatcaatgaggaaagggaacaaagtgtataaaactgccacaattgtattttaattttgaggtatgatattttcagatatttcataatttctaacctctgttctctcagtaaacagaatgtctgatcgatcatgcagatacaatgttggtatttgagaggttagtttttttcctacacttttttttgccaactgacttaacaacattgctgtcaggtggaaatttcaagcacttttgcacatttagttcagtgtttgttgagaatccatggcttaacccacttgttttgctatttttttctttgcttttaattttccccatctgattttatctctgcgtttcagtgacctaccttaaaacaacacacgagaagagttaaactgggttcattttaatgatcaatttacctgcatataaaatttatttttaatcaagctgatcttaatgtatataatcattctatttgctttattatcggtgcaggtaggtcattaacaccacttcttttcatctgtaccacaccctggtgaaacctttgaagacataaaaaaaacctgtctgagatgttctttctaccaatctatatgtctttcggttatcaagtgtttctgcatggtaatgtcatgtaaatgctgatattgatttcactggtccatctatatttaaaacgtgcaagaaaaaaataaaatactctgctctagcaagttttgtgtaacaaaggcatatcgtcatgttaataaatttaaaacatcattcgtataaaatattttaattttcttgtatttcatttagacccaagaacatgctgaccaatgtgttctatatgtaaactacaaattctatggtagctttgttgtatattattgtaaaattattttaataagtcatggggatgacaatttgattattacaatttagttttcagtaatcaaaaagatttctatgaattctaaaaaatatttttttctatgaaattactagtgcccagctgtagaatctaccttaggtagatgatccctagacatacgttggttttgagggctattcagccattccattttactctctatttaaaggccgtgagcaagcttgtcatgagcaaatatgtcaagggagtcaatttctgaccaatcaagtacactaaattagaatatttttaaagtatgtaacattcccagtttcagccacaatttagccaagaataagataaaaacttgaataagaagtaagtagcataaatcagtatttaacctaaaattacatatttgaaacagaagatattatgttatgctcagtaaataattaagagatggcattgtgtaagaaggagccctagactgaaagtcaagacatctgaatttcaggctggaaaactatcagtatgatctcagcctcagttctcttgtctgtaaaatggaagaactggattaggcagtttgtaagattcctcctaactttcacagtcgatgacaagattgtctttttatctgatattttgaagggtatattgctttgaagtaagtctcaataaggcaatatattttagggcatctttcttcttatctctgacagtgttcttaaaattatttgaatatcataagagccttggtgtctgtcctaattcctttctcactcaccgatgctgaatacccagttgaatcaaactgtcaacctaccaaaaacgatattgtggcttatgggtattgctgtctcattcttggtatattcttgtgttaactgcccattggcctgaaaatactcattgtaagcctgaaaaaaaaaatctttcccactgttttttctgcttgttgtaagaatcaaatgaaataatgtatgtgaaagcaccttgtaaactgtaacctatcaatgtaaaatgttaaggtgtgttgttatttcattaattacttctttgtttagaatggaatttcctatgcactactgtagctaggaaatgctgaaaacaactgtgttttttaattaatcaataactgcaaaattaaagtaccttcaatggataagacaa

SEQ ID NO: 170788 - DNA, 4294 bp, Homo sapiens
  Payload ID: 13613
  Gene Symbol: PRKACB
  Gene Name: protein kinase, cAMP-dependent, catalytic, beta
  ENST ID: ENST00000394838
  CDS Start-End: 32-1105
attctgctgtttgctccttgccaggttcaacatgggattgtcacgcaaatcatcagatgcatctgcttgctcctcttcagaaatatctgattttgtgaaagagtttctagccaaagccaaagaagactttttgaaaaaatgggagaatccaactcagaataatgccggacttgaagattttgaaaggaaaaaaacccttggaacaggttcatttggaagagtcatgttggtaaaacacaaagccactgaacagtattatgccatgaagatcttagataagcagaaggttgttaaactgaagcaaatagagcatactttgaatgagaaaagaatattacaggcagtgaattttcctttccttgttcgactggagtatgcttttaaggataattctaatttatacatggttatggaatatgtccctgggggtgaaatgttttcacatctaagaagaattggaaggttcagtgagccccatgcacggttctatgcagctcagatagtgctaacattcgagtacctccattcactagacctcatctacagagatctaaaacctgaaaatctcttaattgaccatcaaggctatatccaggtcacagactttgggtttgccaaaagagttaaaggcagaacttggacattatgtggaactccagagtatttggctccagaaataattctcagcaagggctacaataaggcagtggattggtgggcattaggagtgctaatctatgaaatggcagctggctatcccccattctttgcagaccaaccaattcagatttatgaaaagattgtttctggaaaggtccgattcccatcccacttcagttcagatctcaaggaccttctacggaacctgctgcaggtggatttgaccaagagatttggaaatctaaagaatggtgtcagtgatataaaaactcacaagtggtttgccacgacagattggattgctatttaccagaggaaggttgaagctccattcataccaaagtttagaggctctggagataccagcaactttgatgactatgaagaagaagatatccgtgtctctataacagaaaaatgtgcaaaagaatttggtgaattttaaagaggaacaagatgacatctgagctcacactcagtgtttgcactctgttgagagataaggtagagctgagaccgtccttgttgaagcagttacctagttccttcattccaacgactgagtgaggtctttattgccatcatcccgtgtgcgcactctgcatccacctatgtaacaaggcaccgctaagcaagcattgtctgtgccataacacagtactagaccactttcttacttctctttgggttgtctttctcctctcctatatccatttcttccttttccaatttcattggttttctctaaacagtgctccattttattttgttggtgtttcagatgggcagtgttatggctacgtgatatttgaagggaaggataagtgttgctttcagtagttattgccaatattgttgttggtcaatggcttgaagataaactttctaataattattatttctttgagtagctcagacttggttttgccaaaactcttggtaatttttgaagatagactgtcttatcaccaaggaaatttatacaaattaagactaactttcttggaattcactattctggcaataaattttggtagactaatacagtacagctagacccagaaatttggaaggctgtagatcagaggttctagttccctttccctccttttatatcctcctctccttgagtaatgaagtgaccagcctgtgtagtgtgacaaacgtgtctcattcagcaggaaaaactaatgatatggatcatcacccagattctctcacttggtaccagcatttctgtaggtattagagaagagttctaagttttctaaaccttaactgttccttaaggattttagccagtattttaatagaacatgattaatgaaagtgacaaattttaaattttctctaatagtcctcatcataaactttttaaaggaaaataagcaaactaaaaagaacattggtttagataaatacttatactttgcaaagtcaaaaatggcttgatttttggaaacaatatagaggtattcatatttaaatgagggtttacatttgttttgttttgtaaccgttaaaaagaagttgtttccagctaattattgtggtgtactatatttgtgagcctagggtaggggcactgctgcaacttctgctttcatcccatgcctcatcaatgaggaaagggaacaaagtgtataaaactgccacaattgtattttaattttgaggtatgatattttcagatatttcataatttctaacctctgttctctcagtaaacagaatgtctgatcgatcatgcagatacaatgttggtatttgagaggttagtttttttcctacacttttttttgccaactgacttaacaacattgctgtcaggtggaaatttcaagcacttttgcacatttagttcagtgtttgttgagaatccatggcttaacccacttgttttgctatttttttctttgcttttaattttccccatctgattttatctctgcgtttcagtgacctaccttaaaacaacacacgagaagagttaaactgggttcattttaatgatcaatttacctgcatataaaatttatttttaatcaagctgatcttaatgtatataatcattctatttgctttattatcggtgcaggtaggtcattaacaccacttcttttcatctgtaccacaccctggtgaaacctttgaagacataaaaaaaacctgtctgagatgttctttctaccaatctatatgtctttcggttatcaagtgtttctgcatggtaatgtcatgtaaatgctgatattgatttcactggtccatctatatttaaaacgtgcaagaaaaaaataaaatactctgctctagcaagttttgtgtaacaaaggcatatcgtcatgttaataaatttaaaacatcattcgtataaaatattttaattttcttgtatttcatttagacccaagaacatgctgaccaatgtgttctatatgtaaactacaaattctatggtagctttgttgtatattattgtaaaattattttaataagtcatggggatgacaatttgattattacaatttagttttcagtaatcaaaaagatttctatgaattctaaaaaatatttttttctatgaaattactagtgcccagctgtagaatctaccttaggtagatgatccctagacatacgttggttttgagggctattcagccattccattttactctctatttaaaggccgtgagcaagcttgtcatgagcaaatatgtcaagggagtcaatttctgaccaatcaagtacactaaattagaatatttttaaagtatgtaacattcccagtttcagccacaatttagccaagaataagataaaaacttgaataagaagtaagtagcataaatcagtatttaacctaaaattacatatttgaaacagaagatattatgttatgctcagtaaataattaagagatggcattgtgtaagaaggagccctagactgaaagtcaagacatctgaatttcaggctggaaaactatcagtatgatctcagcctcagttctcttgtctgtaaaatggaagaactggattaggcagtttgtaagattcctcctaactttcacagtcgatgacaagattgtctttttatctgatattttgaagggtatattgctttgaagtaagtctcaataaggcaatatattttagggcatctttcttcttatctctgacagtgttcttaaaattatttgaatatcataagagccttggtgtctgtcctaattcctttctcactcaccgatgctgaatacccagttgaatcaaactgtcaacctaccaaaaacgatattgtggcttatgggtattgctgtctcattcttggtatattcttgtgttaactgcccattggcctgaaaatactcattgtaagcctgaaaaaaaaaatctttcccactgttttttctgcttgttgtaagaatcaaatgaaataatgtatgtgaaagcaccttgtaaactgtaacctatcaatgtaaaatgttaaggtgtgttgttatttcattaattacttctttgtttagaatggaatttcctatgcactactgtagctaggaaatgctgaaaacaactgtgttttttaattaatcaataactgcaaaattaaagtaccttcaatggataag

SEQ ID NO: 170789 - DNA, 4200 bp, Homo sapiens
  Payload ID: 13613
  Gene Symbol: PRKACB
  Gene Name: protein kinase, cAMP-dependent, catalytic, beta
  Uniprot ID: P22694
  ENST ID: ENST00000394839
  CDS Start-End: 42-1007
gttattttgagcaatatgttttggaaaggttggttttcatcatgagtgcacgcaaatcatcagatgcatctgcttgctcctcttcagaaatatctgtgaaagagtttctagccaaagccaaagaagactttttgaaaaaatgggagaatccaactcagaataatgccggacttgaagattttgaaaggaaaaaaacccttggaacaggttcatttggaagagtcatgttggtaaaacacaaagccactgaacagtattatgccatgaagatcttagataagcagaaggataattctaatttatacatggttatggaatatgtccctgggggtgaaatgttttcacatctaagaagaattggaaggttcagtgagccccatgcacggttctatgcagctcagatagtgctaacattcgagtacctccattcactagacctcatctacagagatctaaaacctgaaaatctcttaattgaccatcaaggctatatccaggtcacagactttgggtttgccaaaagagttaaaggcagaacttggacattatgtggaactccagagtatttggctccagaaataattctcagcaagggctacaataaggcagtggattggtgggcattaggagtgctaatctatgaaatggcagctggctatcccccattctttgcagaccaaccaattcagatttatgaaaagattgtttctggaaaggtccgattcccatcccacttcagttcagatctcaaggaccttctacggaacctgctgcaggtggatttgaccaagagatttggaaatctaaagaatggtgtcagtgatataaaaactcacaagtggtttgccacgacagattggattgctatttaccagaggaaggttgaagctccattcataccaaagtttagaggctctggagataccagcaactttgatgactatgaagaagaagatatccgtgtctctataacagaaaaatgtgcaaaagaatttggtgaattttaaagaggaacaagatgacatctgagctcacactcagtgtttgcactctgttgagagataaggtagagctgagaccgtccttgttgaagcagttacctagttccttcattccaacgactgagtgaggtctttattgccatcatcccgtgtgcgcactctgcatccacctatgtaacaaggcaccgctaagcaagcattgtctgtgccataacacagtactagaccactttcttacttctctttgggttgtctttctcctctcctatatccatttcttccttttccaatttcattggttttctctaaacagtgctccattttattttgttggtgtttcagatgggcagtgttatggctacgtgatatttgaagggaaggataagtgttgctttcagtagttattgccaatattgttgttggtcaatggcttgaagataaactttctaataattattatttctttgagtagctcagacttggttttgccaaaactcttggtaatttttgaagatagactgtcttatcaccaaggaaatttatacaaattaagactaactttcttggaattcactattctggcaataaattttggtagactaatacagtacagctagacccagaaatttggaaggctgtagatcagaggttctagttccctttccctccttttatatcctcctctccttgagtaatgaagtgaccagcctgtgtagtgtgacaaacgtgtctcattcagcaggaaaaactaatgatatggatcatcacccagattctctcacttggtaccagcatttctgtaggtattagagaagagttctaagttttctaaaccttaactgttccttaaggattttagccagtattttaatagaacatgattaatgaaagtgacaaattttaaattttctctaatagtcctcatcataaactttttaaaggaaaataagcaaactaaaaagaacattggtttagataaatacttatactttgcaaagtcaaaaatggcttgatttttggaaacaatatagaggtattcatatttaaatgagggtttacatttgttttgttttgtaaccgttaaaaagaagttgtttccagctaattattgtggtgtactatatttgtgagcctagggtaggggcactgctgcaacttctgctttcatcccatgcctcatcaatgaggaaagggaacaaagtgtataaaactgccacaattgtattttaattttgaggtatgatattttcagatatttcataatttctaacctctgttctctcagtaaacagaatgtctgatcgatcatgcagatacaatgttggtatttgagaggttagtttttttcctacacttttttttgccaactgacttaacaacattgctgtcaggtggaaatttcaagcacttttgcacatttagttcagtgtttgttgagaatccatggcttaacccacttgttttgctatttttttctttgcttttaattttccccatctgattttatctctgcgtttcagtgacctaccttaaaacaacacacgagaagagttaaactgggttcattttaatgatcaatttacctgcatataaaatttatttttaatcaagctgatcttaatgtatataatcattctatttgctttattatcggtgcaggtaggtcattaacaccacttcttttcatctgtaccacaccctggtgaaacctttgaagacataaaaaaaacctgtctgagatgttctttctaccaatctatatgtctttcggttatcaagtgtttctgcatggtaatgtcatgtaaatgctgatattgatttcactggtccatctatatttaaaacgtgcaagaaaaaaataaaatactctgctctagcaagttttgtgtaacaaaggcatatcgtcatgttaataaatttaaaacatcattcgtataaaatattttaattttcttgtatttcatttagacccaagaacatgctgaccaatgtgttctatatgtaaactacaaattctatggtagctttgttgtatattattgtaaaattattttaataagtcatggggatgacaatttgattattacaatttagttttcagtaatcaaaaagatttctatgaattctaaaaaatatttttttctatgaaattactagtgcccagctgtagaatctaccttaggtagatgatccctagacatacgttggttttgagggctattcagccattccattttactctctatttaaaggccgtgagcaagcttgtcatgagcaaatatgtcaagggagtcaatttctgaccaatcaagtacactaaattagaatatttttaaagtatgtaacattcccagtttcagccacaatttagccaagaataagataaaaacttgaataagaagtaagtagcataaatcagtatttaacctaaaattacatatttgaaacagaagatattatgttatgctcagtaaataattaagagatggcattgtgtaagaaggagccctagactgaaagtcaagacatctgaatttcaggctggaaaactatcagtatgatctcagcctcagttctcttgtctgtaaaatggaagaactggattaggcagtttgtaagattcctcctaactttcacagtcgatgacaagattgtctttttatctgatattttgaagggtatattgctttgaagtaagtctcaataaggcaatatattttagggcatctttcttcttatctctgacagtgttcttaaaattatttgaatatcataagagccttggtgtctgtcctaattcctttctcactcaccgatgctgaatacccagttgaatcaaactgtcaacctaccaaaaacgatattgtggcttatgggtattgctgtctcattcttggtatattcttgtgttaactgcccattggcctgaaaatactcattgtaagcctgaaaaaaaaaatctttcccactgttttttctgcttgttgtaagaatcaaatgaaataatgtatgtgaaagcaccttgtaaactgtaacctatcaatgtaaaatgttaaggtgtgttgttatttcattaattacttctttgtttagaatggaatttcctatgcactactgtagctaggaaatgctgaaaacaactgtgttttttaattaatcaataactgcaaaattaaagtaccttcaatggataagacaa

SEQ ID NO: 170790 - DNA, 648 bp, Homo sapiens
  Payload ID: 13613
  Gene Symbol: PRKACB
  Gene Name: protein kinase, cAMP-dependent, catalytic, beta
  ENST ID: ENST00000436133
  CDS Start-End: 91-648
agtgaggtccacagctagcagtaagagctggtgtaattgaaagacgtttaggtgcaatcattctgctgtttgctccttgccaggttcaacatgggattgtcacgcaaatcatcagatgcatctgcttgctcctcttcagaaatatctgtgaaagagtttctagccaaagccaaagaagactttttgaaaaaatgggagaatccaactcagaataatgccggacttgaagattttgaaaggaaaaaaacccttggaacaggttcatttggaagagtcatgttggtaaaacacaaagccactgaacagtattatgccatgaagatcttagataagcagaaggttgttaaactgaagcaaatagagcatactttgaatgagaaaagaatattacaggcagtgaattttcctttccttgttcgactggagtatgcttttaaggataattctaatttatacatggttatggaatatgtccctgggggtgaaatgttttcacatctaagaagaattggaaggttcagtgagccccatgcacggttctatgcagctcagatagtgctaacattcgagtacctccattcactagacctcatctacagagatctaaaacctgaaaatctcttaattgaccatcaaggctatatccag

SEQ ID NO: 170791 - DNA, 662 bp, Homo sapiens
  Payload ID: 13613
  Gene Symbol: PRKACB
  Gene Name: protein kinase, cAMP-dependent, catalytic, beta
  ENST ID: ENST00000432111
  CDS Start-End: 20-662
gctccttgccaggttcaacatgggattgtcttgctcctcttcagaaatatctgtgaaagagtttctagccaaagccaaagaagactttttgaaaaaatgggagaatccaactcagaataatgccggacttgaagattttgaaaggaaaaaaacccttggaacaggttcatttggaagagtcatgttggtaaaacacaaagccactgaacagtattatgccatgaagatcttagataagcagaaggttgttaaactgaagcaaatagagcatactttgaatgagaaaagaatattacaggcagtgaattttcctttccttgttcgactggagtatgcttttaaggataattctaatttatacatggttatggaatatgtccctgggggtgaaatgttttcacatctaagaagaattggaaggttcagtgagccccatgcacggttctatgcagctcagatagtgctaacattcgagtacctccattcactagacctcatctacagagatctaaaacctgaaaatctcttaattgaccatcaaggctatatccaggtcacagactttgggtttgccaaaagagttaaaggcagaacttggacattatgtggaactccagagtatttggctccagaaataattctcagcaagggctacaataagg

SEQ ID NO: 170792 - DNA, 944 bp, Homo sapiens
  Payload ID: 13613
  Gene Symbol: PRKACB
  Gene Name: protein kinase, cAMP-dependent, catalytic, beta
  ENST ID: ENST00000450730
  CDS Start-End: 327-944
acattttctccctgccattttgagttgttctagtggtatatgaaggaggctgggataactagcttgaaagaaattcagtctagttatagacatctttggcattaatctgatgtttactagtgatatctcatgctaggcagttatgctttgcttctaggggcttctctttttaaaacaaaagaaagctcttttcgttttctgtgtgctgcatgctccagtgtgtgtgtttacaccatcggttcttctccctctagagattagcataactccctttgctgttggattgttattttgagcaatatgttttggaaaggttggttttcatcatgagtgcacgcaaatcatcagatgcatctgcttgctcctcttcagaaatatctgtgaaagagtttctagccaaagccaaagaagactttttgaaaaaatgggagaatccaactcagaataatgccggacttgaagattttgaaaggaaaaaaacccttggaacaggttcatttggaagagtcatgttggtaaaacacaaagccactgaacagtattatgccatgaagatcttagataagcagaaggttgttaaactgaagcaaatagagcatactttgaatgagaaaagaatattacaggcagtgaattttcctttccttgttcgactggagtatgcttttaaggataattctaatttatacatggttatggaatatgtccctgggggtgaaatgttttcacatctaagaagaattggaaggttcagtgagccccatgcacggttctatgcagctcagatagtgctaacattcgagtacctccattcactagacctcatctacagagatctaaaacctgaaaatctcttaattgaccatcaaggctatatccaggtcacagactttgggtttgccaaaagagttaaaggcagaacttggacattatgtggaactcca

SEQ ID NO: 170793 - DNA, 730 bp, Homo sapiens
  Payload ID: 13613
  Gene Symbol: PRKACB
  Gene Name: protein kinase, cAMP-dependent, catalytic, beta
  ENST ID: ENST00000413538
  CDS Start-End: 104-730
gtgtttacaccatcggttcttctccctctagagattagcataactccctttgctgttggattgttattttgagcaatatgttttggaaaggttggttttcatcatgagtgcttgctcctcttcagaaatatctgtgaaagagtttctagccaaagccaaagaagactttttgaaaaaatgggagaatccaactcagaataatgccggacttgaagattttgaaaggaaaaaaacccttggaacaggttcatttggaagagtcatgttggtaaaacacaaagccactgaacagtattatgccatgaagatcttagataagcagaaggttgttaaactgaagcaaatagagcatactttgaatgagaaaagaatattacaggcagtgaattttcctttccttgttcgactggagtatgcttttaaggataattctaatttatacatggttatggaatatgtccctgggggtgaaatgttttcacatctaagaagaattggaaggttcagtgagccccatgcacggttctatgcagctcagatagtgctaacattcgagtacctccattcactagacctcatctacagagatctaaaacctgaaaatctcttaattgaccatcaaggctatatccaggtcacagactttgggtttgccaaaagagttaaaggcagaacttggacattatgtggaactccagagtatttggctccagaaataattctcagcaag

SEQ ID NO: 170794 - DNA, 686 bp, Homo sapiens
  Payload ID: 13613
  Gene Symbol: PRKACB
  Gene Name: protein kinase, cAMP-dependent, catalytic, beta
  ENST ID: ENST00000417530
  CDS Start-End: 96-686
accatcggttcttctccctctagagattagcataactccctttgctgttggattgttattttgagcaatatgttttggaaaggttggttttcatcatgagtgtgaaagagtttctagccaaagccaaagaagactttttgaaaaaatgggagaatccaactcagaataatgccggacttgaagattttgaaaggaaaaaaacccttggaacaggttcatttggaagagtcatgttggtaaaacacaaagccactgaacagtattatgccatgaagatcttagataagcagaaggttgttaaactgaagcaaatagagcatactttgaatgagaaaagaatattacaggcagtgaattttcctttccttgttcgactggagtatgcttttaaggataattctaatttatacatggttatggaatatgtccctgggggtgaaatgttttcacatctaagaagaattggaaggttcagtgagccccatgcacggttctatgcagctcagatagtgctaacattcgagtacctccattcactagacctcatctacagagatctaaaacctgaaaatctcttaattgaccatcaaggctatatccaggtcacagactttgggtttgccaaaagagttaaaggcagaacttggacattatgtggaactccagagtatttggctccagaaata

SEQ ID NO: 170795 - DNA, 1112 bp, Homo sapiens
  Payload ID: 13613
  Gene Symbol: PRKACB
  Gene Name: protein kinase, cAMP-dependent, catalytic, beta
  Uniprot ID: P22694
  ENST ID: ENST00000446538
  CDS Start-End: 32-1108
attctgctgtttgctccttgccaggttcaacatgggattgtcacgcaaatcatcagatgcatctgcttgctcctcttcagaaatatctgattcctttgtgaaagagtttctagccaaagccaaagaagactttttgaaaaaatgggagaatccaactcagaataatgccggacttgaagattttgaaaggaaaaaaacccttggaacaggttcatttggaagagtcatgttggtaaaacacaaagccactgaacagtattatgccatgaagatcttagataagcagaaggttgttaaactgaagcaaatagagcatactttgaatgagaaaagaatattacaggcagtgaattttcctttccttgttcgactggagtatgcttttaaggataattctaatttatacatggttatggaatatgtccctgggggtgaaatgttttcacatctaagaagaattggaaggttcagtgagccccatgcacggttctatgcagctcagatagtgctaacattcgagtacctccattcactagacctcatctacagagatctaaaacctgaaaatctcttaattgaccatcaaggctatatccaggtcacagactttgggtttgccaaaagagttaaaggcagaacttggacattatgtggaactccagagtatttggctccagaaataattctcagcaagggctacaataaggcagtggattggtgggcattaggagtgctaatctatgaaatggcagctggctatcccccattctttgcagaccaaccaattcagatttatgaaaagattgtttctggaaaggtccgattcccatcccacttcagttcagatctcaaggaccttctacggaacctgctgcaggtggatttgaccaagagatttggaaatctaaagaatggtgtcagtgatataaaaactcacaagtggtttgccacgacagattggattgctatttaccagaggaaggttgaagctccattcataccaaagtttagaggctctggagataccagcaactttgatgactatgaagaagaagatatccgtgtctctataacagaaaaatgtgcaaaagaatttggtgaattttaaagag

SEQ ID NO: 170796 - DNA, 4206 bp, Homo sapiens
  Payload ID: 13613
  Gene Symbol: PRKACB
  Gene Name: protein kinase, cAMP-dependent, catalytic, beta
  ENST ID: ENST00000610457
  CDS Start-End: 1-1017
atgctgctactatctagttctataagcttatataaagacagaaatgaagcaagactgatttcttcacagaataatgccggacttgaagattttgaaaggaaaaaaacccttggaacaggttcatttggaagagtcatgttggtaaaacacaaagccactgaacagtattatgccatgaagatcttagataagcagaaggttgttaaactgaagcaaatagagcatactttgaatgagaaaagaatattacaggcagtgaattttcctttccttgttcgactggagtatgcttttaaggataattctaatttatacatggttatggaatatgtccctgggggtgaaatgttttcacatctaagaagaattggaaggttcagtgagccccatgcacggttctatgcagctcagatagtgctaacattcgagtacctccattcactagacctcatctacagagatctaaaacctgaaaatctcttaattgaccatcaaggctatatccaggtcacagactttgggtttgccaaaagagttaaaggcagaacttggacattatgtggaactccagagtatttggctccagaaataattctcagcaagggctacaataaggcagtggattggtgggcattaggagtgctaatctatgaaatggcagctggctatcccccattctttgcagaccaaccaattcagatttatgaaaagattgtttctggaaaggtccgattcccatcccacttcagttcagatctcaaggaccttctacggaacctgctgcaggtggatttgaccaagagatttggaaatctaaagaatggtgtcagtgatataaaaactcacaagtggtttgccacgacagattggattgctatttaccagaggaaggttgaagctccattcataccaaagtttagaggctctggagataccagcaactttgatgactatgaagaagaagatatccgtgtctctataacagaaaaatgtgcaaaagaatttggtgaattttaaagaggaacaagatgacatctgagctcacactcagtgtttgcactctgttgagagataaggtagagctgagaccgtccttgttgaagcagttacctagttccttcattccaacgactgagtgaggtctttattgccatcatcccgtgtgcgcactctgcatccacctatgtaacaaggcaccgctaagcaagcattgtctgtgccataacacagtactagaccactttcttacttctctttgggttgtctttctcctctcctatatccatttcttccttttccaatttcattggttttctctaaacagtgctccattttattttgttggtgtttcagatgggcagtgttatggctacgtgatatttgaagggaaggataagtgttgctttcagtagttattgccaatattgttgttggtcaatggcttgaagataaactttctaataattattatttctttgagtagctcagacttggttttgccaaaactcttggtaatttttgaagatagactgtcttatcaccaaggaaatttatacaaattaagactaactttcttggaattcactattctggcaataaattttggtagactaatacagtacagctagacccagaaatttggaaggctgtagatcagaggttctagttccctttccctccttttatatcctcctctccttgagtaatgaagtgaccagcctgtgtagtgtgacaaacgtgtctcattcagcaggaaaaactaatgatatggatcatcacccagattctctcacttggtaccagcatttctgtaggtattagagaagagttctaagttttctaaaccttaactgttccttaaggattttagccagtattttaatagaacatgattaatgaaagtgacaaattttaaattttctctaatagtcctcatcataaactttttaaaggaaaataagcaaactaaaaagaacattggtttagataaatacttatactttgcaaagtcaaaaatggcttgatttttggaaacaatatagaggtattcatatttaaatgagggtttacatttgttttgttttgtaaccgttaaaaagaagttgtttccagctaattattgtggtgtactatatttgtgagcctagggtaggggcactgctgcaacttctgctttcatcccatgcctcatcaatgaggaaagggaacaaagtgtataaaactgccacaattgtattttaattttgaggtatgatattttcagatatttcataatttctaacctctgttctctcagtaaacagaatgtctgatcgatcatgcagatacaatgttggtatttgagaggttagtttttttcctacacttttttttgccaactgacttaacaacattgctgtcaggtggaaatttcaagcacttttgcacatttagttcagtgtttgttgagaatccatggcttaacccacttgttttgctatttttttctttgcttttaattttccccatctgattttatctctgcgtttcagtgacctaccttaaaacaacacacgagaagagttaaactgggttcattttaatgatcaatttacctgcatataaaatttatttttaatcaagctgatcttaatgtatataatcattctatttgctttattatcggtgcaggtaggtcattaacaccacttcttttcatctgtaccacaccctggtgaaacctttgaagacataaaaaaaacctgtctgagatgttctttctaccaatctatatgtctttcggttatcaagtgtttctgcatggtaatgtcatgtaaatgctgatattgatttcactggtccatctatatttaaaacgtgcaagaaaaaaataaaatactctgctctagcaagttttgtgtaacaaaggcatatcgtcatgttaataaatttaaaacatcattcgtataaaatattttaattttcttgtatttcatttagacccaagaacatgctgaccaatgtgttctatatgtaaactacaaattctatggtagctttgttgtatattattgtaaaattattttaataagtcatggggatgacaatttgattattacaatttagttttcagtaatcaaaaagatttctatgaattctaaaaaatatttttttctatgaaattactagtgcccagctgtagaatctaccttaggtagatgatccctagacatacgttggttttgagggctattcagccattccattttactctctatttaaaggccgtgagcaagcttgtcatgagcaaatatgtcaagggagtcaatttctgaccaatcaagtacactaaattagaatatttttaaagtatgtaacattcccagtttcagccacaatttagccaagaataagataaaaacttgaataagaagtaagtagcataaatcagtatttaacctaaaattacatatttgaaacagaagatattatgttatgctcagtaaataattaagagatggcattgtgtaagaaggagccctagactgaaagtcaagacatctgaatttcaggctggaaaactatcagtatgatctcagcctcagttctcttgtctgtaaaatggaagaactggattaggcagtttgtaagattcctcctaactttcacagtcgatgacaagattgtctttttatctgatattttgaagggtatattgctttgaagtaagtctcaataaggcaatatattttagggcatctttcttcttatctctgacagtgttcttaaaattatttgaatatcataagagccttggtgtctgtcctaattcctttctcactcaccgatgctgaatacccagttgaatcaaactgtcaacctaccaaaaacgatattgtggcttatgggtattgctgtctcattcttggtatattcttgtgttaactgcccattggcctgaaaatactcattgtaagcctgaaaaaaaaaatctttcccactgttttttctgcttgttgtaagaatcaaatgaaataatgtatgtgaaagcaccttgtaaactgtaacctatcaatgtaaaatgttaaggtgtgttgttatttcattaattacttctttgtttagaatggaatttcctatgcactactgtagctaggaaatgctgaaaacaactgtgttttttaattaatcaataactgcaaaattaaagtaccttcaatggataag

SEQ ID NO: 170797 - DNA, 4306 bp, Homo sapiens
  Payload ID: 13613
  Gene Symbol: PRKACB
  Gene Name: protein kinase, cAMP-dependent, catalytic, beta
  Uniprot ID: P22694
  ENST ID: ENST00000614872
  CDS Start-End: 42-1115
gttattttgagcaatatgttttggaaaggttggttttcatcatgagtgcacgcaaatcatcagatgcatctgcttgctcctcttcagaaatatctgattcctttgtgaaagagtttctagccaaagccaaagaagactttttgaaaaaatgggagaatccaactcagaataatgccggacttgaagattttgaaaggaaaaaaacccttggaacaggttcatttggaagagtcatgttggtaaaacacaaagccactgaacagtattatgccatgaagatcttagataagcagaaggttgttaaactgaagcaaatagagcatactttgaatgagaaaagaatattacaggcagtgaattttcctttccttgttcgactggagtatgcttttaaggataattctaatttatacatggttatggaatatgtccctgggggtgaaatgttttcacatctaagaagaattggaaggttcagtgagccccatgcacggttctatgcagctcagatagtgctaacattcgagtacctccattcactagacctcatctacagagatctaaaacctgaaaatctcttaattgaccatcaaggctatatccaggtcacagactttgggtttgccaaaagagttaaaggcagaacttggacattatgtggaactccagagtatttggctccagaaataattctcagcaagggctacaataaggcagtggattggtgggcattaggagtgctaatctatgaaatggcagctggctatcccccattctttgcagaccaaccaattcagatttatgaaaagattgtttctggaaaggtccgattcccatcccacttcagttcagatctcaaggaccttctacggaacctgctgcaggtggatttgaccaagagatttggaaatctaaagaatggtgtcagtgatataaaaactcacaagtggtttgccacgacagattggattgctatttaccagaggaaggttgaagctccattcataccaaagtttagaggctctggagataccagcaactttgatgactatgaagaagaagatatccgtgtctctataacagaaaaatgtgcaaaagaatttggtgaattttaaagaggaacaagatgacatctgagctcacactcagtgtttgcactctgttgagagataaggtagagctgagaccgtccttgttgaagcagttacctagttccttcattccaacgactgagtgaggtctttattgccatcatcccgtgtgcgcactctgcatccacctatgtaacaaggcaccgctaagcaagcattgtctgtgccataacacagtactagaccactttcttacttctctttgggttgtctttctcctctcctatatccatttcttccttttccaatttcattggttttctctaaacagtgctccattttattttgttggtgtttcagatgggcagtgttatggctacgtgatatttgaagggaaggataagtgttgctttcagtagttattgccaatattgttgttggtcaatggcttgaagataaactttctaataattattatttctttgagtagctcagacttggttttgccaaaactcttggtaatttttgaagatagactgtcttatcaccaaggaaatttatacaaattaagactaactttcttggaattcactattctggcaataaattttggtagactaatacagtacagctagacccagaaatttggaaggctgtagatcagaggttctagttccctttccctccttttatatcctcctctccttgagtaatgaagtgaccagcctgtgtagtgtgacaaacgtgtctcattcagcaggaaaaactaatgatatggatcatcacccagattctctcacttggtaccagcatttctgtaggtattagagaagagttctaagttttctaaaccttaactgttccttaaggattttagccagtattttaatagaacatgattaatgaaagtgacaaattttaaattttctctaatagtcctcatcataaactttttaaaggaaaataagcaaactaaaaagaacattggtttagataaatacttatactttgcaaagtcaaaaatggcttgatttttggaaacaatatagaggtattcatatttaaatgagggtttacatttgttttgttttgtaaccgttaaaaagaagttgtttccagctaattattgtggtgtactatatttgtgagcctagggtaggggcactgctgcaacttctgctttcatcccatgcctcatcaatgaggaaagggaacaaagtgtataaaactgccacaattgtattttaattttgaggtatgatattttcagatatttcataatttctaacctctgttctctcagtaaacagaatgtctgatcgatcatgcagatacaatgttggtatttgagaggttagtttttttcctacacttttttttgccaactgacttaacaacattgctgtcaggtggaaatttcaagcacttttgcacatttagttcagtgtttgttgagaatccatggcttaacccacttgttttgctatttttttctttgcttttaattttccccatctgattttatctctgcgtttcagtgacctaccttaaaacaacacacgagaagagttaaactgggttcattttaatgatcaatttacctgcatataaaatttatttttaatcaagctgatcttaatgtatataatcattctatttgctttattatcggtgcaggtaggtcattaacaccacttcttttcatctgtaccacaccctggtgaaacctttgaagacataaaaaaaacctgtctgagatgttctttctaccaatctatatgtctttcggttatcaagtgtttctgcatggtaatgtcatgtaaatgctgatattgatttcactggtccatctatatttaaaacgtgcaagaaaaaaataaaatactctgctctagcaagttttgtgtaacaaaggcatatcgtcatgttaataaatttaaaacatcattcgtataaaatattttaattttcttgtatttcatttagacccaagaacatgctgaccaatgtgttctatatgtaaactacaaattctatggtagctttgttgtatattattgtaaaattattttaataagtcatggggatgacaatttgattattacaatttagttttcagtaatcaaaaagatttctatgaattctaaaaaatatttttttctatgaaattactagtgcccagctgtagaatctaccttaggtagatgatccctagacatacgttggttttgagggctattcagccattccattttactctctatttaaaggccgtgagcaagcttgtcatgagcaaatatgtcaagggagtcaatttctgaccaatcaagtacactaaattagaatatttttaaagtatgtaacattcccagtttcagccacaatttagccaagaataagataaaaacttgaataagaagtaagtagcataaatcagtatttaacctaaaattacatatttgaaacagaagatattatgttatgctcagtaaataattaagagatggcattgtgtaagaaggagccctagactgaaagtcaagacatctgaatttcaggctggaaaactatcagtatgatctcagcctcagttctcttgtctgtaaaatggaagaactggattaggcagtttgtaagattcctcctaactttcacagtcgatgacaagattgtctttttatctgatattttgaagggtatattgctttgaagtaagtctcaataaggcaatatattttagggcatctttcttcttatctctgacagtgttcttaaaattatttgaatatcataagagccttggtgtctgtcctaattcctttctcactcaccgatgctgaatacccagttgaatcaaactgtcaacctaccaaaaacgatattgtggcttatgggtattgctgtctcattcttggtatattcttgtgttaactgcccattggcctgaaaatactcattgtaagcctgaaaaaaaaaatctttcccactgttttttctgcttgttgtaagaatcaaatgaaataatgtatgtgaaagcaccttgtaaactgtaacctatcaatgtaaaatgttaaggtgtgttgttatttcattaattacttctttgtttagaatggaatttcctatgcactactgtagctaggaaatgctgaaaacaactgtgttttttaattaatcaataactgcaaaattaaagtaccttcaatggataagac

SEQ ID NO: 170798 - DNA, 4240 bp, Homo sapiens
  Payload ID: 13613
  Gene Symbol: PRKACB
  Gene Name: protein kinase, cAMP-dependent, catalytic, beta
  Uniprot ID: P22694
  ENST ID: ENST00000610703
  CDS Start-End: 32-1051
attctgctgtttgctccttgccaggttcaacatgggattgttgaaagagtttctagccaaagccaaagaagactttttgaaaaaatgggagaatccaactcagaataatgccggacttgaagattttgaaaggaaaaaaacccttggaacaggttcatttggaagagtcatgttggtaaaacacaaagccactgaacagtattatgccatgaagatcttagataagcagaaggttgttaaactgaagcaaatagagcatactttgaatgagaaaagaatattacaggcagtgaattttcctttccttgttcgactggagtatgcttttaaggataattctaatttatacatggttatggaatatgtccctgggggtgaaatgttttcacatctaagaagaattggaaggttcagtgagccccatgcacggttctatgcagctcagatagtgctaacattcgagtacctccattcactagacctcatctacagagatctaaaacctgaaaatctcttaattgaccatcaaggctatatccaggtcacagactttgggtttgccaaaagagttaaaggcagaacttggacattatgtggaactccagagtatttggctccagaaataattctcagcaagggctacaataaggcagtggattggtgggcattaggagtgctaatctatgaaatggcagctggctatcccccattctttgcagaccaaccaattcagatttatgaaaagattgtttctggaaaggtccgattcccatcccacttcagttcagatctcaaggaccttctacggaacctgctgcaggtggatttgaccaagagatttggaaatctaaagaatggtgtcagtgatataaaaactcacaagtggtttgccacgacagattggattgctatttaccagaggaaggttgaagctccattcataccaaagtttagaggctctggagataccagcaactttgatgactatgaagaagaagatatccgtgtctctataacagaaaaatgtgcaaaagaatttggtgaattttaaagaggaacaagatgacatctgagctcacactcagtgtttgcactctgttgagagataaggtagagctgagaccgtccttgttgaagcagttacctagttccttcattccaacgactgagtgaggtctttattgccatcatcccgtgtgcgcactctgcatccacctatgtaacaaggcaccgctaagcaagcattgtctgtgccataacacagtactagaccactttcttacttctctttgggttgtctttctcctctcctatatccatttcttccttttccaatttcattggttttctctaaacagtgctccattttattttgttggtgtttcagatgggcagtgttatggctacgtgatatttgaagggaaggataagtgttgctttcagtagttattgccaatattgttgttggtcaatggcttgaagataaactttctaataattattatttctttgagtagctcagacttggttttgccaaaactcttggtaatttttgaagatagactgtcttatcaccaaggaaatttatacaaattaagactaactttcttggaattcactattctggcaataaattttggtagactaatacagtacagctagacccagaaatttggaaggctgtagatcagaggttctagttccctttccctccttttatatcctcctctccttgagtaatgaagtgaccagcctgtgtagtgtgacaaacgtgtctcattcagcaggaaaaactaatgatatggatcatcacccagattctctcacttggtaccagcatttctgtaggtattagagaagagttctaagttttctaaaccttaactgttccttaaggattttagccagtattttaatagaacatgattaatgaaagtgacaaattttaaattttctctaatagtcctcatcataaactttttaaaggaaaataagcaaactaaaaagaacattggtttagataaatacttatactttgcaaagtcaaaaatggcttgatttttggaaacaatatagaggtattcatatttaaatgagggtttacatttgttttgttttgtaaccgttaaaaagaagttgtttccagctaattattgtggtgtactatatttgtgagcctagggtaggggcactgctgcaacttctgctttcatcccatgcctcatcaatgaggaaagggaacaaagtgtataaaactgccacaattgtattttaattttgaggtatgatattttcagatatttcataatttctaacctctgttctctcagtaaacagaatgtctgatcgatcatgcagatacaatgttggtatttgagaggttagtttttttcctacacttttttttgccaactgacttaacaacattgctgtcaggtggaaatttcaagcacttttgcacatttagttcagtgtttgttgagaatccatggcttaacccacttgttttgctatttttttctttgcttttaattttccccatctgattttatctctgcgtttcagtgacctaccttaaaacaacacacgagaagagttaaactgggttcattttaatgatcaatttacctgcatataaaatttatttttaatcaagctgatcttaatgtatataatcattctatttgctttattatcggtgcaggtaggtcattaacaccacttcttttcatctgtaccacaccctggtgaaacctttgaagacataaaaaaaacctgtctgagatgttctttctaccaatctatatgtctttcggttatcaagtgtttctgcatggtaatgtcatgtaaatgctgatattgatttcactggtccatctatatttaaaacgtgcaagaaaaaaataaaatactctgctctagcaagttttgtgtaacaaaggcatatcgtcatgttaataaatttaaaacatcattcgtataaaatattttaattttcttgtatttcatttagacccaagaacatgctgaccaatgtgttctatatgtaaactacaaattctatggtagctttgttgtatattattgtaaaattattttaataagtcatggggatgacaatttgattattacaatttagttttcagtaatcaaaaagatttctatgaattctaaaaaatatttttttctatgaaattactagtgcccagctgtagaatctaccttaggtagatgatccctagacatacgttggttttgagggctattcagccattccattttactctctatttaaaggccgtgagcaagcttgtcatgagcaaatatgtcaagggagtcaatttctgaccaatcaagtacactaaattagaatatttttaaagtatgtaacattcccagtttcagccacaatttagccaagaataagataaaaacttgaataagaagtaagtagcataaatcagtatttaacctaaaattacatatttgaaacagaagatattatgttatgctcagtaaataattaagagatggcattgtgtaagaaggagccctagactgaaagtcaagacatctgaatttcaggctggaaaactatcagtatgatctcagcctcagttctcttgtctgtaaaatggaagaactggattaggcagtttgtaagattcctcctaactttcacagtcgatgacaagattgtctttttatctgatattttgaagggtatattgctttgaagtaagtctcaataaggcaatatattttagggcatctttcttcttatctctgacagtgttcttaaaattatttgaatatcataagagccttggtgtctgtcctaattcctttctcactcaccgatgctgaatacccagttgaatcaaactgtcaacctaccaaaaacgatattgtggcttatgggtattgctgtctcattcttggtatattcttgtgttaactgcccattggcctgaaaatactcattgtaagcctgaaaaaaaaaatctttcccactgttttttctgcttgttgtaagaatcaaatgaaataatgtatgtgaaagcaccttgtaaactgtaacctatcaatgtaaaatgttaaggtgtgttgttatttcattaattacttctttgtttagaatggaatttcctatgcactactgtagctaggaaatgctgaaaacaactgtgttttttaattaatcaataactgcaaaattaaagtaccttcaatggataag

SEQ ID NO: 170799 - DNA, 1609 bp, Homo sapiens
  Payload ID: 13614
  Gene Symbol: PRKACG
  Gene Name: protein kinase, cAMP-dependent, catalytic, gamma
  Uniprot ID: P22612
  ENST ID: ENST00000377276
  CDS Start-End: 22-1077
gcccctgccgccgccaccgccatgggcaacgcccccgccaagaaggacaccgagcaggaggagagcgtgaacgagttcctagccaaagccagaggagatttcctctacagatggggaaaccccgctcaaaacaccgccagctcggatcagttcgaacggctcaggacgctgggcatgggctccttcgggcgggtgatgctggtgaggcaccaggagaccggcggccactacgccatgaagatcctcaacaagcagaaggtggtgaagatgaagcaggtcgagcacatactgaacgagaagcgcatcctgcaggcgatcgactttccgttcctcgtcaagctccagttctcctttaaggacaactcctacctgtacctggtgatggagtacgtgccgggtggggagatgttctcccgcctacagcgcgtcggaaggtttagcgagccccatgcctgtttctatgccgcccaggtcgtcctggccgtccagtacctacactcgctcgacctcatccaccgcgacctgaagcccgagaatctcctcatcgaccagcagggctacctgcaggtgacggacttcggtttcgccaagcgcgtgaagggccgcacttggaccttgtgcgggaccccagagtacctggcccccgagatcatcctgagcaaaggctacaacaaggccgtggactggtgggccctaggggtgctcatctatgagatggccgtgggcttcccacccttctacgccgaccagcccatccagatctacgagaagatcgtctctgggagggtgcggtttccctccaaactcagctctgacctcaagcatctgctgcggagcctgctgcaggtggacctcaccaagcgcttcggaaacctcaggaacggggttggcgacatcaagaaccacaagtggttcgccacaaccagctggatcgccatctatgagaagaaggtggaagctcccttcatcccgaagtacacaggccctggggatgccagtaactttgacgactacgaggaggaagagctccggatctccatcaatgagaagtgtgccaaggagttttctgagttttaggggtgtgcttgtgcccctgtgggttttctttcctttttgtttttggtggtttgggggatgggagggttggattgaacagccagagggccccagagttccttgtatctaatttcatcctcaccccaccctccagggttgggggagcaggaagcccagatatttggaggaacagaaacaccagctgctccctcacccccccccatgccttcctggtccctctgtgcttctctctttctcctcccacagggtcccccttgccccagcccccttctgcctgttttaaacgagtttctcagctctattcaggccaggtcttgctgttgtatcaagggacacggtgtggaaagaggggctcaaacttaactccagccctgaacaggcaccacttactaagagaggatgaatgaaaagcacacctaccctttggcgtaatcctgcctgggaaggagagaggtttagtgccatgttcagtgggctgtttgctagaataaaaaattaaaacaaaaaacaattaaaatcttatttaagttcc

SEQ ID NO: 170800 - DNA, 3576 bp, Homo sapiens
  Payload ID: 13615
  Gene Symbol: PRKAR1A
  Gene Name: protein kinase, cAMP-dependent, regulatory, type I, alpha
  Uniprot ID: P10644
  ENST ID: ENST00000358598
  CDS Start-End: 118-1263
ggtggacagaggagcggagggacgagagggaagcgcacgatagctgcgcggagagagagcgaagagcaggcggaggaacaaaggcgacccaagacacccagagagggacagagaaccatggagtctggcagtaccgccgccagtgaggaggcacgcagccttcgagaatgtgagctctacgtccagaagcataacattcaagcgctgctcaaagattctattgtgcagttgtgcactgctcgacctgagagacccatggcattcctcagggaatactttgagaggttggagaaggaggaggcaaaacagattcagaatctgcagaaagcaggcactcgtacagactcaagggaggatgagatttctcctcctccacccaacccagtggttaaaggtaggaggcgacgaggtgctatcagcgctgaggtctacacggaggaagatgcggcatcctatgttagaaaggttataccaaaagattacaagacaatggccgctttagccaaagccattgaaaagaatgtgctgttttcacatcttgatgataatgagagaagtgatatttttgatgccatgttttcggtctcctttatcgcaggagagactgtgattcagcaaggtgatgaaggggataacttctatgtgattgatcaaggagagacggatgtctatgttaacaatgaatgggcaaccagtgttggggaaggagggagctttggagaacttgctttgatttatggaacaccgagagcagccactgtcaaagcaaagacaaatgtgaaattgtggggcatcgaccgagacagctatagaagaatcctcatgggaagcacactgagaaagcggaagatgtatgaggaattccttagtaaagtctctattttagagtctctggacaagtgggaacgtcttacggtagctgatgcattggaaccagtgcagtttgaagatgggcagaagattgtggtgcagggagaaccaggggatgagttcttcattattttagaggggtcagctgctgtgctacaacgtcggtcagaaaatgaagagtttgttgaagtgggaagattggggccttctgattattttggtgaaattgcactactgatgaatcgtcctcgtgctgccacagttgttgctcgtggccccttgaagtgcgttaagctggaccgacctagatttgaacgtgttcttggcccatgctcagacatcctcaaacgaaacatccagcagtacaacagttttgtgtcactgtctgtctgaaatctgcctcctgtgcctcccttttctcctctccccaatccatgcttcactcatgcaaactgctttattttccctacttgcagcgccaagtggccactggcatcgcagcttcctgtctgtttatatattgaaagttgcttttattgcaccattttcaatttggagcattaactaaatgctcatacacagttaaataaatagaaagagttctatggagactttgctgttactgcttctctttgtgcagtgttagtattcaccctgggcagtgagtgccatgctttttggtgagggcagatcccagcacctattgaattaccatagagtaatgatgtaacagtgcaagattttttttttaagtgacataattgtccagttataagcgtatttagactgtggccatatatgctgtatttctttgtagaataaatggtttctcattaaactctaaagattagggaaaatggatatagaaaatcttagtatagtagaaagacatctgcctgtaattaaactagtttaagggtggaaaaatgcccatttttgctaattatcaatgggatatgattggttcagtttttttttttccagagttgttgtttgccaagctaatctgcctggttttatttatatcttgttattaatgtttcttctccaattctgaaatacttttgagtatggctatctatacctgccttttaagtttgaaactaactcatagattgcaaatattggttagtatttaactacatctgcctcggctcacaaattccgattagacctttatccagctagtgccaaataattgatcagatgctgaattgagaataagaatttgaggtctacattcttggttgttaatttagagcgtttggttaaagtatgtccttcagctgactccagtataatctcctctgctcattaaactgattccaggagattggatttgctgtgactagatacagatggagcaaatgtcctaacagagaaatagaggtgatgctgctaaagggagaaatgccaggcggacaaagttcagtgtcgggaattttccccgtgacattcactggggcatgagattttggaagaagttttttactttggtttagtctttttttccttcctttttattcagctagaatttctggtgggttgatggtagggtataatgtgtctgtgttgcttcaaattggtctgaaaggctatcctgctgaaagtcctgctttcctatctagcatttatttctctggcaaacttttctttcttttcttttttaaagtaaacttgtgtattgagtcttaactgtatttcagtattttccagccttatgtgttacattattccaatgatacccaacagtttatttttattatttttttaaacaaaatttcacagttctgtaatgtaggcacttttattttcattgtgatttatatataaggtaatgtagggttatatttgggagtgactgcaagcatttttccatctgtgtgcaactaactgactctgttattgatcccttctcctgccctttcccaggtaatttaaattggtcatggtagatttttttcatagatttgaaaaacttttaggttgttaccaagtatgaagtataaatctggggaagaggttttatttacattttagggtgggtaagaaagccaccttgttacaaattttttaatttccaaaataatctatattaaatgagggtttctgatctgtactttgtgtttagctacctttttatatttaaaaaattaaaaatgaaaattacgttcttacaagcttaaagcttgatttgatctttgtttaaatgccaaaatgtacttaaatgagttacttagaatgccataaaattgcagtttcatgtatgtatataatcatgctcatgtatatttagttacgtataatgctttctgagtgagttttactcttaaatcatttggttaaatcatttggcttgctgtttactcccttctgtagtttttaattaaaaactttaaagataagtctacattaaacaatgatcacatctaaagctttatctttgtgtaatctaagtatatgtgagaaatcagaattggcataatttgtcttagttgatattcaaggctttaaaagtcattattcctgggcttggtaagtgaatttatgagatttactgctctagaaagtatagatggccaaaggaccgttttgtattgcttcctgattaccagtctgattataccatgtgtgctaatatactttttttgttatagattgtcttaatggtaggtcaagtaataaaaagagatgaaataatttaaa

SEQ ID NO: 170801 - DNA, 3551 bp, Homo sapiens
  Payload ID: 13615
  Gene Symbol: PRKAR1A
  Gene Name: protein kinase, cAMP-dependent, regulatory, type I, alpha
  ENST ID: ENST00000392710
  CDS Start-End: 106-480
atcgcagagtggagcggggctgggagcaaagcgctgagggagctcggtacgccgccgcctcgcacccgcagcctcgcgcccgccgccgcccgtccccagagaaccatggagtctggcagtaccgccgccagtgaggaggcacgcagccttcgagaatgtgagctctacgtccagaagcataacattcaagcgctgctcaaagattctattgtgcagttgtgcactgctcgacctgagagacccatggcattcctcagggaatactttgagaggaggaggcaaaacagattcagaatctgcagaaagcaggcactcgtacagactcaagggaggatgagatttctcctcctccacccaacccagtggttaaaggtaggaggcgacgaggtgctatcagcgctgaggtctacacggaggaagatgcggcatcctatgttagaaaggttataccaaaagattacaagacaatggccgctttagccaaagccattgaaaagaatgtgctgttttcacatcttgatgataatgagagaagtgatatttttgatgccatgttttcggtctcctttatcgcaggagagactgtgattcagcaaggtgatgaaggggataacttctatgtgattgatcaaggagagacggatgtctatgttaacaatgaatgggcaaccagtgttggggaaggagggagctttggagaacttgctttgatttatggaacaccgagagcagccactgtcaaagcaaagacaaatgtgaaattgtggggcatcgaccgagacagctatagaagaatcctcatgggaagcacactgagaaagcggaagatgtatgaggaattccttagtaaagtctctattttagagtctctggacaagtgggaacgtcttacggtagctgatgcattggaaccagtgcagtttgaagatgggcagaagattgtggtgcagggagaaccaggggatgagttcttcattattttagaggggtcagctgctgtgctacaacgtcggtcagaaaatgaagagtttgttgaagtgggaagattggggccttctgattattttggtgaaattgcactactgatgaatcgtcctcgtgctgccacagttgttgctcgtggccccttgaagtgcgttaagctggaccgacctagatttgaacgtgttcttggcccatgctcagacatcctcaaacgaaacatccagcagtacaacagttttgtgtcactgtctgtctgaaatctgcctcctgtgcctcccttttctcctctccccaatccatgcttcactcatgcaaactgctttattttccctacttgcagcgccaagtggccactggcatcgcagcttcctgtctgtttatatattgaaagttgcttttattgcaccattttcaatttggagcattaactaaatgctcatacacagttaaataaatagaaagagttctatggagactttgctgttactgcttctctttgtgcagtgttagtattcaccctgggcagtgagtgccatgctttttggtgagggcagatcccagcacctattgaattaccatagagtaatgatgtaacagtgcaagattttttttttaagtgacataattgtccagttataagcgtatttagactgtggccatatatgctgtatttctttgtagaataaatggtttctcattaaactctaaagattagggaaaatggatatagaaaatcttagtatagtagaaagacatctgcctgtaattaaactagtttaagggtggaaaaatgcccatttttgctaattatcaatgggatatgattggttcagtttttttttttccagagttgttgtttgccaagctaatctgcctggttttatttatatcttgttattaatgtttcttctccaattctgaaatacttttgagtatggctatctatacctgccttttaagtttgaaactaactcatagattgcaaatattggttagtatttaactacatctgcctcggctcacaaattccgattagacctttatccagctagtgccaaataattgatcagatgctgaattgagaataagaatttgaggtctacattcttggttgttaatttagagcgtttggttaaagtatgtccttcagctgactccagtataatctcctctgctcattaaactgattccaggagattggatttgctgtgactagatacagatggagcaaatgtcctaacagagaaatagaggtgatgctgctaaagggagaaatgccaggcggacaaagttcagtgtcgggaattttccccgtgacattcactggggcatgagattttggaagaagttttttactttggtttagtctttttttccttcctttttattcagctagaatttctggtgggttgatggtagggtataatgtgtctgtgttgcttcaaattggtctgaaaggctatcctgctgaaagtcctgctttcctatctagcatttatttctctggcaaacttttctttcttttcttttttaaagtaaacttgtgtattgagtcttaactgtatttcagtattttccagccttatgtgttacattattccaatgatacccaacagtttatttttattatttttttaaacaaaatttcacagttctgtaatgtaggcacttttattttcattgtgatttatatataaggtaatgtagggttatatttgggagtgactgcaagcatttttccatctgtgtgcaactaactgactctgttattgatcccttctcctgccctttcccaggtaatttaaattggtcatggtagatttttttcatagatttgaaaaacttttaggttgttaccaagtatgaagtataaatctggggaagaggttttatttacattttagggtgggtaagaaagccaccttgttacaaattttttaatttccaaaataatctatattaaatgagggtttctgatctgtactttgtgtttagctacctttttatatttaaaaaattaaaaatgaaaattacgttcttacaagcttaaagcttgatttgatctttgtttaaatgccaaaatgtacttaaatgagttacttagaatgccataaaattgcagtttcatgtatgtatataatcatgctcatgtatatttagttacgtataatgctttctgagtgagttttactcttaaatcatttggttaaatcatttggcttgctgtttactcccttctgtagtttttaattaaaaactttaaagataagtctacattaaacaatgatcacatctaaagctttatctttgtgtaatctaagtatatgtgagaaatcagaattggcataatttgtcttagttgatattcaaggctttaaaagtcattattcctgggcttggtaagtgaatttatgagatttactgctctagaaagtatagatggccaaaggaccgttttgtattgcttcctgattaccagtctgattataccatgtgtgctaatatactttttttgttatagattgtcttaatggtaggtcaagtaataaaaagagatgaaataattt

SEQ ID NO: 170802 - DNA, 4327 bp, Homo sapiens
  Payload ID: 13615
  Gene Symbol: PRKAR1A
  Gene Name: protein kinase, cAMP-dependent, regulatory, type I, alpha
  Uniprot ID: P10644
  ENST ID: ENST00000392711
  CDS Start-End: 208-1353
attgacgtcagtagccgaacgctgattggctgcggccaggccgtttccggtggagctgtcgcctagccgctatcgcagagtggagcggggctgggagcaaagcgctgagggagctcggtacgccgccgcctcgcacccgcagcctcgcgcccgccgccgcccgtccccaggtgagtggggtcggccgggggctcaggcgagagaaccatggagtctggcagtaccgccgccagtgaggaggcacgcagccttcgagaatgtgagctctacgtccagaagcataacattcaagcgctgctcaaagattctattgtgcagttgtgcactgctcgacctgagagacccatggcattcctcagggaatactttgagaggttggagaaggaggaggcaaaacagattcagaatctgcagaaagcaggcactcgtacagactcaagggaggatgagatttctcctcctccacccaacccagtggttaaaggtaggaggcgacgaggtgctatcagcgctgaggtctacacggaggaagatgcggcatcctatgttagaaaggttataccaaaagattacaagacaatggccgctttagccaaagccattgaaaagaatgtgctgttttcacatcttgatgataatgagagaagtgatatttttgatgccatgttttcggtctcctttatcgcaggagagactgtgattcagcaaggtgatgaaggggataacttctatgtgattgatcaaggagagacggatgtctatgttaacaatgaatgggcaaccagtgttggggaaggagggagctttggagaacttgctttgatttatggaacaccgagagcagccactgtcaaagcaaagacaaatgtgaaattgtggggcatcgaccgagacagctatagaagaatcctcatgggaagcacactgagaaagcggaagatgtatgaggaattccttagtaaagtctctattttagagtctctggacaagtgggaacgtcttacggtagctgatgcattggaaccagtgcagtttgaagatgggcagaagattgtggtgcagggagaaccaggggatgagttcttcattattttagaggggtcagctgctgtgctacaacgtcggtcagaaaatgaagagtttgttgaagtgggaagattggggccttctgattattttggtgaaattgcactactgatgaatcgtcctcgtgctgccacagttgttgctcgtggccccttgaagtgcgttaagctggaccgacctagatttgaacgtgttcttggcccatgctcagacatcctcaaacgaaacatccagcagtacaacagttttgtgtcactgtctgtctgaaatctgcctcctgtgcctcccttttctcctctccccaatccatgcttcactcatgcaaactgctttattttccctacttgcagcgccaagtggccactggcatcgcagcttcctgtctgtttatatattgaaagttgcttttattgcaccattttcaatttggagcattaactaaatgctcatacacagttaaataaatagaaagagttctatggagactttgctgttactgcttctctttgtgcagtgttagtattcaccctgggcagtgagtgccatgctttttggtgagggcagatcccagcacctattgaattaccatagagtaatgatgtaacagtgcaagattttttttttaagtgacataattgtccagttataagcgtatttagactgtggccatatatgctgtatttctttgtagaataaatggtttctcattaaactctaaagattagggaaaatggatatagaaaatcttagtatagtagaaagacatctgcctgtaattaaactagtttaagggtggaaaaatgcccatttttgctaattatcaatgggatatgattggttcagtttttttttttccagagttgttgtttgccaagctaatctgcctggttttatttatatcttgttattaatgtttcttctccaattctgaaatacttttgagtatggctatctatacctgccttttaagtttgaaactaactcatagattgcaaatattggttagtatttaactacatctgcctcggctcacaaattccgattagacctttatccagctagtgccaaataattgatcagatgctgaattgagaataagaatttgaggtctacattcttggttgttaatttagagcgtttggttaaagtatgtccttcagctgactccagtataatctcctctgctcattaaactgattccaggagattggatttgctgtgactagatacagatggagcaaatgtcctaacagagaaatagaggtgatgctgctaaagggagaaatgccaggcggacaaagttcagtgtcgggaattttccccgtgacattcactggggcatgagattttggaagaagttttttactttggtttagtctttttttccttcctttttattcagctagaatttctggtgggttgatggtagggtataatgtgtctgtgttgcttcaaattggtctgaaaggctatcctgctgaaagtcctgctttcctatctagcatttatttctctggcaaacttttctttcttttcttttttaaagtaaacttgtgtattgagtcttaactgtatttcagtattttccagccttatgtgttacattattccaatgatacccaacagtttatttttattatttttttaaacaaaatttcacagttctgtaatgtaggcacttttattttcattgtgatttatatataaggtaatgtagggttatatttgggagtgactgcaagcatttttccatctgtgtgcaactaactgactctgttattgatcccttctcctgccctttcccaggtaatttaaattggtcatggtagatttttttcatagatttgaaaaacttttaggttgttaccaagtatgaagtataaatctggggaagaggttttatttacattttagggtgggtaagaaagccaccttgttacaaattttttaatttccaaaataatctatattaaatgagggtttctgatctgtactttgtgtttagctacctttttatatttaaaaaattaaaaatgaaaattacgttcttacaagcttaaagcttgatttgatctttgtttaaatgccaaaatgtacttaaatgagttacttagaatgccataaaattgcagtttcatgtatgtatataatcatgctcatgtatatttagttacgtataatgctttctgagtgagttttactcttaaatcatttggttaaatcatttggcttgctgtttactcccttctgtagtttttaattaaaaactttaaagataagtctacattaaacaatgatcacatctaaagctttatctttgtgtaatctaagtatatgtgagaaatcagaattggcataatttgtcttagttgatattcaaggctttaaaagtcattattcctgggcttggtaagtgaatttatgagatttactgctctagaaagtatagatggccaaaggaccgttttgtattgcttcctgattaccagtctgattataccatgtgtgctaatatactttttttgttatagattgtcttaatggtaggtcaagtaataaaaagagatgaaataatttaaattcttaaatgaatcagtttttcttccctttctcctttccgtctttcctctctctgtccttccccgaaagtctactcgggtgggcaaaaatgaaaagggggaaagtgaattatgggatcggtgttttgaaagagcaatgtttattttcagtgcttttcagtttgtcaaagagtggatctcaaaatcttgcttaaagggtaattgagatgtagcagatttatttacttagtcatggaaagaaaaaaattcagtcaaaagctaaagatttccttttgattgaagacagattggttctgtggccttggaactttcccagacttaatggggaaacatcatttctagattagcatactctttggtttaaatttaatatatacatttaatgttacttagggatacttttatattttgcatatataaagcctcatatataaagccttatttctgatgctcttagatttctgaggagtgagatgattaagttgtattcattagtgtattggtatttcttcacatccagtgaaattggagatatgttgtatgttagaagagcattctttaaattgtgttgctttgaacatgtgtaccttttctagattcagtaatcccttccccccgtcctctggagtatgaaacctttagagtcacaataaaatgtaact

SEQ ID NO: 170803 - DNA, 3697 bp, Homo sapiens
  Payload ID: 13615
  Gene Symbol: PRKAR1A
  Gene Name: protein kinase, cAMP-dependent, regulatory, type I, alpha
  Uniprot ID: P10644
  ENST ID: ENST00000536854
  CDS Start-End: 239-1384
atcgcagagtggagcggggctgggagcaaagcgctgagggagctcggtacgccgccgcctcgcacccgcagcctcgcgcccgccgccgcccgtccccagttgacttttgtgccctggtaattctgtatcctgtttaccgtttacctacttcccacgtcatcatgatttcttttgagggagaactgaatgaaattcccttaagggcctgacttcagcacccgtctctgcagagagaaccatggagtctggcagtaccgccgccagtgaggaggcacgcagccttcgagaatgtgagctctacgtccagaagcataacattcaagcgctgctcaaagattctattgtgcagttgtgcactgctcgacctgagagacccatggcattcctcagggaatactttgagaggttggagaaggaggaggcaaaacagattcagaatctgcagaaagcaggcactcgtacagactcaagggaggatgagatttctcctcctccacccaacccagtggttaaaggtaggaggcgacgaggtgctatcagcgctgaggtctacacggaggaagatgcggcatcctatgttagaaaggttataccaaaagattacaagacaatggccgctttagccaaagccattgaaaagaatgtgctgttttcacatcttgatgataatgagagaagtgatatttttgatgccatgttttcggtctcctttatcgcaggagagactgtgattcagcaaggtgatgaaggggataacttctatgtgattgatcaaggagagacggatgtctatgttaacaatgaatgggcaaccagtgttggggaaggagggagctttggagaacttgctttgatttatggaacaccgagagcagccactgtcaaagcaaagacaaatgtgaaattgtggggcatcgaccgagacagctatagaagaatcctcatgggaagcacactgagaaagcggaagatgtatgaggaattccttagtaaagtctctattttagagtctctggacaagtgggaacgtcttacggtagctgatgcattggaaccagtgcagtttgaagatgggcagaagattgtggtgcagggagaaccaggggatgagttcttcattattttagaggggtcagctgctgtgctacaacgtcggtcagaaaatgaagagtttgttgaagtgggaagattggggccttctgattattttggtgaaattgcactactgatgaatcgtcctcgtgctgccacagttgttgctcgtggccccttgaagtgcgttaagctggaccgacctagatttgaacgtgttcttggcccatgctcagacatcctcaaacgaaacatccagcagtacaacagttttgtgtcactgtctgtctgaaatctgcctcctgtgcctcccttttctcctctccccaatccatgcttcactcatgcaaactgctttattttccctacttgcagcgccaagtggccactggcatcgcagcttcctgtctgtttatatattgaaagttgcttttattgcaccattttcaatttggagcattaactaaatgctcatacacagttaaataaatagaaagagttctatggagactttgctgttactgcttctctttgtgcagtgttagtattcaccctgggcagtgagtgccatgctttttggtgagggcagatcccagcacctattgaattaccatagagtaatgatgtaacagtgcaagattttttttttaagtgacataattgtccagttataagcgtatttagactgtggccatatatgctgtatttctttgtagaataaatggtttctcattaaactctaaagattagggaaaatggatatagaaaatcttagtatagtagaaagacatctgcctgtaattaaactagtttaagggtggaaaaatgcccatttttgctaattatcaatgggatatgattggttcagtttttttttttccagagttgttgtttgccaagctaatctgcctggttttatttatatcttgttattaatgtttcttctccaattctgaaatacttttgagtatggctatctatacctgccttttaagtttgaaactaactcatagattgcaaatattggttagtatttaactacatctgcctcggctcacaaattccgattagacctttatccagctagtgccaaataattgatcagatgctgaattgagaataagaatttgaggtctacattcttggttgttaatttagagcgtttggttaaagtatgtccttcagctgactccagtataatctcctctgctcattaaactgattccaggagattggatttgctgtgactagatacagatggagcaaatgtcctaacagagaaatagaggtgatgctgctaaagggagaaatgccaggcggacaaagttcagtgtcgggaattttccccgtgacattcactggggcatgagattttggaagaagttttttactttggtttagtctttttttccttcctttttattcagctagaatttctggtgggttgatggtagggtataatgtgtctgtgttgcttcaaattggtctgaaaggctatcctgctgaaagtcctgctttcctatctagcatttatttctctggcaaacttttctttcttttcttttttaaagtaaacttgtgtattgagtcttaactgtatttcagtattttccagccttatgtgttacattattccaatgatacccaacagtttatttttattatttttttaaacaaaatttcacagttctgtaatgtaggcacttttattttcattgtgatttatatataaggtaatgtagggttatatttgggagtgactgcaagcatttttccatctgtgtgcaactaactgactctgttattgatcccttctcctgccctttcccaggtaatttaaattggtcatggtagatttttttcatagatttgaaaaacttttaggttgttaccaagtatgaagtataaatctggggaagaggttttatttacattttagggtgggtaagaaagccaccttgttacaaattttttaatttccaaaataatctatattaaatgagggtttctgatctgtactttgtgtttagctacctttttatatttaaaaaattaaaaatgaaaattacgttcttacaagcttaaagcttgatttgatctttgtttaaatgccaaaatgtacttaaatgagttacttagaatgccataaaattgcagtttcatgtatgtatataatcatgctcatgtatatttagttacgtataatgctttctgagtgagttttactcttaaatcatttggttaaatcatttggcttgctgtttactcccttctgtagtttttaattaaaaactttaaagataagtctacattaaacaatgatcacatctaaagctttatctttgtgtaatctaagtatatgtgagaaatcagaattggcataatttgtcttagttgatattcaaggctttaaaagtcattattcctgggcttggtaagtgaatttatgagatttactgctctagaaagtatagatggccaaaggaccgttttgtattgcttcctgattaccagtctgattataccatgtgtgctaatatactttttttgttatagattgtcttaatggtaggtcaagtaataaaaagagatgaaataatttaaa

SEQ ID NO: 170804 - DNA, 622 bp, Homo sapiens
  Payload ID: 13615
  Gene Symbol: PRKAR1A
  Gene Name: protein kinase, cAMP-dependent, regulatory, type I, alpha
  ENST ID: ENST00000588702
  CDS Start-End: 120-622
ggctgggagcaaagcgctgagggagctcggtacgccgccgcctcgcacccgcagcctcgcgcccgccgccgcccgtccccaggtgagtggggtcggccgggggctcaggcgagagaaccatggagtctggcagtaccgccgccagtgaggaggcacgcagccttcgagaatgtgagctctacgtccagaagcataacattcaagcgctgctcaaagattctattgtgcagttgtgcactgctcgacctgagagacccatggcattcctcagggaatactttgagaggttggagaaggaggaggcaaaacagattcagaatctgcagaaagcaggcactcgtacagactcaagggaggatgagatttctcctcctccacccaacccagtggttaaaggtaggaggcgacgaggtgctatcagcgctgaggtctacacggaggaagatgcggcatcctatgttagaaaggttataccaaaagattacaagacaatggccgctttagccaaagccattgaaaagaatgtgctgttttcacatcttgatgataatgagagaagtgatatttttgatgccatgttttcggtctcctttatcgcaggagagactgtgattcagcaagg

SEQ ID NO: 170805 - DNA, 557 bp, Homo sapiens
  Payload ID: 13615
  Gene Symbol: PRKAR1A
  Gene Name: protein kinase, cAMP-dependent, regulatory, type I, alpha
  ENST ID: ENST00000585427
  CDS Start-End: 87-557
aggccgtttccggtggagctgtcgcctagccgctatcgcagagtggagcggggctgggagcaaagcgctgagggagctcgagaaccatggagtctggcagtaccgccgccagtgaggaggcacgcagccttcgagaatgtgagctctacgtccagaagcataacattcaagcgctgctcaaagattctattgtgcagttgtgcactgctcgacctgagagacccatggcattcctcagggaatactttgagaggttggagaaggaggaggcaaaacagattcagaatctgcagaaagcaggcactcgtacagactcaagggaggatgagatttctcctcctccacccaacccagtggttaaaggtaggaggcgacgaggtgctatcagcgctgaggtctacacggaggaagatgcggcatcctatgttagaaaggttataccaaaagattacaagacaatggccgctttagccaaagccattgaaaagaatgtgctgttttcacatcttgatgataatgagagaagtgatatttttgatgccatgttttcggtctcc

SEQ ID NO: 170806 - DNA, 4256 bp, Homo sapiens
  Payload ID: 13615
  Gene Symbol: PRKAR1A
  Gene Name: protein kinase, cAMP-dependent, regulatory, type I, alpha
  Uniprot ID: P10644
  ENST ID: ENST00000589228
  CDS Start-End: 129-1274
ggtggagctgtcgcctagccgctatcgcagagtggagcggggctgggagcaaagcgctgagggagctcggtacgccgccgcctcgcacccgcagcctcgcgcccgccgccgcccgtccccagagaaccatggagtctggcagtaccgccgccagtgaggaggcacgcagccttcgagaatgtgagctctacgtccagaagcataacattcaagcgctgctcaaagattctattgtgcagttgtgcactgctcgacctgagagacccatggcattcctcagggaatactttgagaggttggagaaggaggaggcaaaacagattcagaatctgcagaaagcaggcactcgtacagactcaagggaggatgagatttctcctcctccacccaacccagtggttaaaggtaggaggcgacgaggtgctatcagcgctgaggtctacacggaggaagatgcggcatcctatgttagaaaggttataccaaaagattacaagacaatggccgctttagccaaagccattgaaaagaatgtgctgttttcacatcttgatgataatgagagaagtgatatttttgatgccatgttttcggtctcctttatcgcaggagagactgtgattcagcaaggtgatgaaggggataacttctatgtgattgatcaaggagagacggatgtctatgttaacaatgaatgggcaaccagtgttggggaaggagggagctttggagaacttgctttgatttatggaacaccgagagcagccactgtcaaagcaaagacaaatgtgaaattgtggggcatcgaccgagacagctatagaagaatcctcatgggaagcacactgagaaagcggaagatgtatgaggaattccttagtaaagtctctattttagagtctctggacaagtgggaacgtcttacggtagctgatgcattggaaccagtgcagtttgaagatgggcagaagattgtggtgcagggagaaccaggggatgagttcttcattattttagaggggtcagctgctgtgctacaacgtcggtcagaaaatgaagagtttgttgaagtgggaagattggggccttctgattattttggtgaaattgcactactgatgaatcgtcctcgtgctgccacagttgttgctcgtggccccttgaagtgcgttaagctggaccgacctagatttgaacgtgttcttggcccatgctcagacatcctcaaacgaaacatccagcagtacaacagttttgtgtcactgtctgtctgaaatctgcctcctgtgcctcccttttctcctctccccaatccatgcttcactcatgcaaactgctttattttccctacttgcagcgccaagtggccactggcatcgcagcttcctgtctgtttatatattgaaagttgcttttattgcaccattttcaatttggagcattaactaaatgctcatacacagttaaataaatagaaagagttctatggagactttgctgttactgcttctctttgtgcagtgttagtattcaccctgggcagtgagtgccatgctttttggtgagggcagatcccagcacctattgaattaccatagagtaatgatgtaacagtgcaagattttttttttaagtgacataattgtccagttataagcgtatttagactgtggccatatatgctgtatttctttgtagaataaatggtttctcattaaactctaaagattagggaaaatggatatagaaaatcttagtatagtagaaagacatctgcctgtaattaaactagtttaagggtggaaaaatgcccatttttgctaattatcaatgggatatgattggttcagtttttttttttccagagttgttgtttgccaagctaatctgcctggttttatttatatcttgttattaatgtttcttctccaattctgaaatacttttgagtatggctatctatacctgccttttaagtttgaaactaactcatagattgcaaatattggttagtatttaactacatctgcctcggctcacaaattccgattagacctttatccagctagtgccaaataattgatcagatgctgaattgagaataagaatttgaggtctacattcttggttgttaatttagagcgtttggttaaagtatgtccttcagctgactccagtataatctcctctgctcattaaactgattccaggagattggatttgctgtgactagatacagatggagcaaatgtcctaacagagaaatagaggtgatgctgctaaagggagaaatgccaggcggacaaagttcagtgtcgggaattttccccgtgacattcactggggcatgagattttggaagaagttttttactttggtttagtctttttttccttcctttttattcagctagaatttctggtgggttgatggtagggtataatgtgtctgtgttgcttcaaattggtctgaaaggctatcctgctgaaagtcctgctttcctatctagcatttatttctctggcaaacttttctttcttttcttttttaaagtaaacttgtgtattgagtcttaactgtatttcagtattttccagccttatgtgttacattattccaatgatacccaacagtttatttttattatttttttaaacaaaatttcacagttctgtaatgtaggcacttttattttcattgtgatttatatataaggtaatgtagggttatatttgggagtgactgcaagcatttttccatctgtgtgcaactaactgactctgttattgatcccttctcctgccctttcccaggtaatttaaattggtcatggtagatttttttcatagatttgaaaaacttttaggttgttaccaagtatgaagtataaatctggggaagaggttttatttacattttagggtgggtaagaaagccaccttgttacaaattttttaatttccaaaataatctatattaaatgagggtttctgatctgtactttgtgtttagctacctttttatatttaaaaaattaaaaatgaaaattacgttcttacaagcttaaagcttgatttgatctttgtttaaatgccaaaatgtacttaaatgagttacttagaatgccataaaattgcagtttcatgtatgtatataatcatgctcatgtatatttagttacgtataatgctttctgagtgagttttactcttaaatcatttggttaaatcatttggcttgctgtttactcccttctgtagtttttaattaaaaactttaaagataagtctacattaaacaatgatcacatctaaagctttatctttgtgtaatctaagtatatgtgagaaatcagaattggcataatttgtcttagttgatattcaaggctttaaaagtcattattcctgggcttggtaagtgaatttatgagatttactgctctagaaagtatagatggccaaaggaccgttttgtattgcttcctgattaccagtctgattataccatgtgtgctaatatactttttttgttatagattgtcttaatggtaggtcaagtaataaaaagagatgaaataatttaaattcttaaatgaatcagtttttcttccctttctcctttccgtctttcctctctctgtccttccccgaaagtctactcgggtgggcaaaaatgaaaagggggaaagtgaattatgggatcggtgttttgaaagagcaatgtttattttcagtgcttttcagtttgtcaaagagtggatctcaaaatcttgcttaaagggtaattgagatgtagcagatttatttacttagtcatggaaagaaaaaaattcagtcaaaagctaaagatttccttttgattgaagacagattggttctgtggccttggaactttcccagacttaatggggaaacatcatttctagattagcatactctttggtttaaatttaatatatacatttaatgttacttagggatacttttatattttgcatatataaagcctcatatataaagccttatttctgatgctcttagatttctgaggagtgagatgattaagttgtattcattagtgtattggtatttcttcacatccagtgaaattggagatatgttgtatgttagaagagcattctttaaattgtgttgctttgaacatgtgtaccttttctagattcagtaatcccttccccccgtcctctggagtatgaaacctttagagtcacaataaaatgtaactaaagaaaa

SEQ ID NO: 170807 - DNA, 583 bp, Homo sapiens
  Payload ID: 13615
  Gene Symbol: PRKAR1A
  Gene Name: protein kinase, cAMP-dependent, regulatory, type I, alpha
  ENST ID: ENST00000588178
  CDS Start-End: 37-583
agtggctcatacttcctcccaggagctgagagaaccatggagtctggcagtaccgccgccagtgaggaggcacgcagccttcgagaatgtgagctctacgtccagaagcataacattcaagcgctgctcaaagattctattgtgcagttgtgcactgctcgacctgagagacccatggcattcctcagggaatactttgagaggttggagaaggaggaggcaaaacagattcagaatctgcagaaagcaggcactcgtacagactcaagggaggatgagatttctcctcctccacccaacccagtggttaaaggtaggaggcgacgaggtgctatcagcgctgaggtctacacggaggaagatgcggcatcctatgttagaaaggttataccaaaagattacaagacaatggccgctttagccaaagccattgaaaagaatgtgctgttttcacatcttgatgataatgagagaagtgatatttttgatgccatgttttcggtctcctttatcgcaggagagactgtgattcagcaaggtgatgaaggggataacttctatgtgattgatcaaggagagacgg

SEQ ID NO: 170808 - DNA, 1116 bp, Homo sapiens
  Payload ID: 13615
  Gene Symbol: PRKAR1A
  Gene Name: protein kinase, cAMP-dependent, regulatory, type I, alpha
  ENST ID: ENST00000589017
  CDS Start-End: 503-1116
gagcgcatcccggccatccgcccgcgctcggccccgcagcgcagctgctgcagatccgcgggggccgccacctcctccgggggctggcagcgacaggactctccccgccccggcccggggccctcccttgcaggggctgcggggaggagtcgcccacctgtcatctgagacgccccacgtgggtcggccagggagggggtggaaaggagggagaaaaggcagaggcgtcaagggaggccggagggagagtggggtggacagaggagcggagggacgagagggaagcgcacgatagctgcgcggagagagagcgaagagcaggcggaggaacaaaggcgacccaagacacccagagagggacagttgacttttgtgccctggtaattctgtatcctgtttaccgtttacctacttcccacgtcatcatgatttcttttgagggagaactgaatgaaattcccttaagggcctgacttcagcacccgtctctgcagagagaaccatggagtctggcagtaccgccgccagtgaggaggcacgcagccttcgagaatgtgagctctacgtccagaagcataacattcaagcgctgctcaaagattctattgtgcagttgtgcactgctcgacctgagagacccatggcattcctcagggaatactttgagaggttggagaaggaggaggcaaaacagattcagaatctgcagaaagcaggcactcgtacagactcaagggaggatgagatttctcctcctccacccaacccagtggttaaaggtaggaggcgacgaggtgctatcagcgctgaggtctacacggaggaagatgcggcatcctatgttagaaaggttataccaaaagattacaagacaatggccgctttagccaaagccattgaaaagaatgtgctgttttcacatcttgatgataatgagagaagtgatatttttgatgccatgttttcggtctcctttatcgcaggagagactgtgattcagcaaggtgatgaaggggataacttctatgtgattgatcaaggagagacggatgtctatgttaacaatgaatgggcaaccagtgttggggaaggagggagctttggagaacttgcttt

SEQ ID NO: 170809 - DNA, 570 bp, Homo sapiens
  Payload ID: 13615
  Gene Symbol: PRKAR1A
  Gene Name: protein kinase, cAMP-dependent, regulatory, type I, alpha
  ENST ID: ENST00000586541
  CDS Start-End: 1-106
cgaccgagacagctatagaagaatcctcatgggaagcacactgagaaagcggaagatgtatgaggaattccttagtaaagtctctattttagttggtataaattaacctagccactgggctaccgaagtaaggatctaagggctatctgcaggcagtatgagaatcctgctcagactagagagtctctggacaagtgggaacgtcttacggtagctgatgcattggaaccagtgcagtttgaagatgggcagaagattgtggtgcagggagaaccaggggatgagttcttcattattttagaggggtcagctgctgtgctacaacgtcggtcagaaaatgaagagtttgttgaagtgggaagattggggccttctgattattttggtgaaattgcactactgatgaatcgtcctcgtgctgccacagttgttgctcgtggccccttgaagtgcgttaagctggaccgacctagatttgaacgtgttcttggcccatgctcagacatcctcaaacgaaacatccagcagtacaacagttttgtgtcactgtctgtctgaaatctgcctcct

SEQ ID NO: 170810 - DNA, 1036 bp, Homo sapiens
  Payload ID: 13615
  Gene Symbol: PRKAR1A
  Gene Name: protein kinase, cAMP-dependent, regulatory, type I, alpha
  ENST ID: ENST00000592800
  CDS Start-End: 1-460
agggagctttggagaacttgctttgatttatggaacaccgagagcagccactgtcaaagcaaagacaaatgtgaaattgtggggcatcgaccgagacagctatagaagaatcctcatgggaagcacactgagaaagcggaagatgtatgaggaattccttagtaaagtctctattttagagtctctggacaagtgggaacgtcttacggtagctgatgcattggaaccagtgcagtttgaagatgggcagaagattgtggtgcagggagaaccaggggatgagttcttcattattttagaggggtcagctgctgtgctacaacgtcggtcagaaaatgaagagtttgttgaagtgggaagattggggccttctgattattttggtatgtatgaattccctcacaataaatacatggtttctttaagtcacctctcagtgagatattgtagtcttccataattttgtcttctcctgaattttattttctaactgcagtcttttttggctctgagagggaaggtgtgagattttgatctttactcatttaatgaaattactgattgtctcatatctattgtcttctttctcagaagtgcactgctttaaggaaatgtttttcatagaagttagcctgttacccatctttgctttctccaggtgaaattgcactactgatgaatcgtcctcgtgctgccacagttgttgctcgtggccccttgaagtgcgttaagctggaccgacctagatttgaacgtgttcttggcccatgctcagacatcctcaaacgaaacatccagcagtacaacagttttgtgtcactgtctgtctgaaatctgcctcctgtgcctcccttttctcctctccccaatccatgcttcactcatgcaaactgctttattttccctacttgcagcgccaagtggccactggcatcgcagcttcctgtctgtttatatattgaaagttgcttttattgcaccattttcaatttggagcattaactaaatgctcatacacagttaaataaatagaaag

SEQ ID NO: 170811 - DNA, 1940 bp, Homo sapiens
  Payload ID: 13615
  Gene Symbol: PRKAR1A
  Gene Name: protein kinase, cAMP-dependent, regulatory, type I, alpha
  Uniprot ID: P10644
  ENST ID: ENST00000586397
  CDS Start-End: 580-1725
taattttcttgtgtgtttttaaaaattttgattatgctagtagttggctaatcagatcctcactccagtggtttgctctgtgacgttaggatactcccatgggatagaagttacgtatagggaatgtcagatattcttcattgtgctgacttgctttcgcttacagttgacttttgtgccctggtaattctgtatcctgtttaccgtttacctacttcccacgtcatcatgatttcttttgagggagaactgaatgaaattcccttaagggcctgacttcagcacccgtctctgcagaggttagtggctcatacttcctcccaggagctgaggttatcgactctcactgttgcctacagagcacagatcctgaactaaatgaaacatttacttggaataatgctaattctgtacatattttattccctagtccccacttccctgtttaaaaacaaaatctacttagaaaaaaatccctgtgaatcagttgtctaatgaatttagcaagttaaatgccagattgacattttgctttatagtttatacaagcatgtgtgtgtttttttctcgcagagaaccatggagtctggcagtaccgccgccagtgaggaggcacgcagccttcgagaatgtgagctctacgtccagaagcataacattcaagcgctgctcaaagattctattgtgcagttgtgcactgctcgacctgagagacccatggcattcctcagggaatactttgagaggttggagaaggaggaggcaaaacagattcagaatctgcagaaagcaggcactcgtacagactcaagggaggatgagatttctcctcctccacccaacccagtggttaaaggtaggaggcgacgaggtgctatcagcgctgaggtctacacggaggaagatgcggcatcctatgttagaaaggttataccaaaagattacaagacaatggccgctttagccaaagccattgaaaagaatgtgctgttttcacatcttgatgataatgagagaagtgatatttttgatgccatgttttcggtctcctttatcgcaggagagactgtgattcagcaaggtgatgaaggggataacttctatgtgattgatcaaggagagacggatgtctatgttaacaatgaatgggcaaccagtgttggggaaggagggagctttggagaacttgctttgatttatggaacaccgagagcagccactgtcaaagcaaagacaaatgtgaaattgtggggcatcgaccgagacagctatagaagaatcctcatgggaagcacactgagaaagcggaagatgtatgaggaattccttagtaaagtctctattttagagtctctggacaagtgggaacgtcttacggtagctgatgcattggaaccagtgcagtttgaagatgggcagaagattgtggtgcagggagaaccaggggatgagttcttcattattttagaggggtcagctgctgtgctacaacgtcggtcagaaaatgaagagtttgttgaagtgggaagattggggccttctgattattttggtgaaattgcactactgatgaatcgtcctcgtgctgccacagttgttgctcgtggccccttgaagtgcgttaagctggaccgacctagatttgaacgtgttcttggcccatgctcagacatcctcaaacgaaacatccagcagtacaacagttttgtgtcactgtctgtctgaaatctgcctcctgtgcctcccttttctcctctccccaatccatgcttcactcatgcaaactgctttattttccctacttgcagcgccaagtggccactggcatcgcagcttcctgtctgtttatatattgaaagttgcttttattgcaccattttcaatttggagcattaactaaatgctcatacacagttaaataaatagaaagagttctatgg

SEQ ID NO: 170812 - DNA, 549 bp, Homo sapiens
  Payload ID: 13615
  Gene Symbol: PRKAR1A
  Gene Name: protein kinase, cAMP-dependent, regulatory, type I, alpha
  ENST ID: ENST00000589480
  CDS Start-End: 211-549
tttcctgaaggacaacggctctattttactggggtccgccatcgtctcgtccgccggtcctggctcttcttttgacttttgtgccctggtaattctgtatcctgtttaccgtttacctacttcccacgtcatcatgatttcttttgagggagaactgaatgaaattcccttaagggcctgacttcagcacccgtctctgcagagagaaccatggagtctggcagtaccgccgccagtgaggaggcacgcagccttcgagaatgtgagctctacgtccagaagcataacattcaagcgctgctcaaagattctattgtgcagttgtgcactgctcgacctgagagacccatggcattcctcagggaatactttgagaggttggagaaggaggaggcaaaacagattcagaatctgcagaaagcaggcactcgtacagactcaagggaggatgagatttctcctcctccacccaacccagtggttaaaggtaggaggcgacgaggtgctatcagcgctgaggtctacacggaggaagatgcggcatcctat

SEQ ID NO: 170813 - DNA, 848 bp, Homo sapiens
  Payload ID: 13615
  Gene Symbol: PRKAR1A
  Gene Name: protein kinase, cAMP-dependent, regulatory, type I, alpha
  ENST ID: ENST00000585608
  CDS Start-End: 130-525
cggtggagctgtcgcctagccgctatcgcagagtggagcggggctgggagcaaagcgctgagggagctcggtacgccgccgcctcgcacccgcagcctcgcgcccgccgccgcccgtccccagagaaccatggagtctggcagtaccgccgccagtgaggaggcacgcagccttcgagaatgtgagctctacgtccagaagcataacattcaagcgctgctcaaagattctattgtgcagttgtgcactgctcgacctgagagacccatggcattcctcagggaatactttgagaggttggagaaggaggaggcaaaacagattcagaatctgcagaaagcaggcactcgtacagactcaagggaggatgagatttctcctcctccacccaacccagtggttaaaggtaggaggcgacgaggtgctatcagcgctgaggtctacacggaggaagatgcggcatcctatgttagaaagttcttttctaggttataccaaaagattacaagacaatggccgctttagccaaagccattgaaaagaatgtgctgttttcacatcttgatgataatgagagaagtgatatttttgatgccatgttttcggtctcctttatcgcaggagagactgtgattcagcaaggtgatgaaggggataacttctatgtgattgatcaaggagagacggatgtctatgttaacaatgaatgggcaaccagtgttggggaaggagggagctttggagaacttgctttgatttatggaacaccgagagcagccactgtcaaagcaaagacaaatgtgaaattgtggggcatcgaccgagacagctatagaagaatcctcatg

SEQ ID NO: 170814 - DNA, 995 bp, Homo sapiens
  Payload ID: 13615
  Gene Symbol: PRKAR1A
  Gene Name: protein kinase, cAMP-dependent, regulatory, type I, alpha
  ENST ID: ENST00000585981
  CDS Start-End: 104-995
ttcgctcaccctcccccatttcctgaaggacaacggctctattttactggggtccgccatcgtctcgtccgccggtcctggctcttcttgtaagccgagaaccatggagtctggcagtaccgccgccagtgaggaggcacgcagccttcgagaatgtgagctctacgtccagaagcataacattcaagcgctgctcaaagattctattgtgcagttgtgcactgctcgacctgagagacccatggcattcctcagggaatactttgagaggttggagaaggaggaggcaaaacagattcagaatctgcagaaagcaggcactcgtacagactcaagggaggatgagatttctcctcctccacccaacccagtggttaaaggtaggaggcgacgaggtgctatcagcgctgaggtctacacggaggaagatgcggcatcctatgttagaaaggttataccaaaagattacaagacaatggccgctttagccaaagccattgaaaagaatgtgctgttttcacatcttgatgataatgagagaagtgatatttttgatgccatgttttcggtctcctttatcgcaggagagactgtgattcagcaaggtgatgaaggggataacttctatgtgattgatcaaggagagacggatgtctatgttaacaatgaatgggcaaccagtgttggggaaggagggagctttggagaacttgctttgatttatggaacaccgagagcagccactgtcaaagcaaagacaaatgtgaaattgtggggcatcgaccgagacagctatagaagaatcctcatgggaagcacactgagaaagcggaagatgtatgaggaattccttagtaaagtctctattttagagtctctggacaagtgggaacgtcttacggtagctgatgcattggaaccagtgcagtttgaagatgggcagaagattgtggtgcagggagaaccaggggatgagttcttcattattttagagg

SEQ ID NO: 170815 - DNA, 407 bp, Homo sapiens
  Payload ID: 13615
  Gene Symbol: PRKAR1A
  Gene Name: protein kinase, cAMP-dependent, regulatory, type I, alpha
  ENST ID: ENST00000589309
  CDS Start-End: 271-407
gggagctcggtacgccgccgcctcgcacccgcagcctcgcgcccgccgccgcccgtccccaggacaacggctctattttactggggtccgccatcgtctcgtccgccggtcctggctcttcttgtaagccgttgacttttgtgccctggtaattctgtatcctgtttaccgtttacctacttcccacgtcatcatgatttcttttgagggagaactgaatgaaattcccttaagggcctgacttcagcacccgtctctgcagagagaaccatggagtctggcagtaccgccgccagtgaggaggcacgcagccttcgagaatgtgagctctacgtccagaagcataacattcaagcgctgctcaaagattctattgtgcagttgtgcactgctcgacctgagagacc

SEQ ID NO: 170816 - DNA, 553 bp, Homo sapiens
  Payload ID: 13615
  Gene Symbol: PRKAR1A
  Gene Name: protein kinase, cAMP-dependent, regulatory, type I, alpha
  ENST ID: ENST00000585815
  CDS Start-End: 358-553
tattttactggggtccgccatcgtctcgtccgccggtcctggctcttcttgtaagccggtagttttcctctccacttttgacgactcgtcattgctagcagtagcctttcctcttcatagcggagtgatctttcccccaacacgacggtcttagtcgggctcctgaatttcctcttgtcccctttcacctctctccctttcccaattttgcccccctgaggcctcctcgccaccactgtggccttccgactggcgtagcttgaagtctcggcttcccttcattttgtggtcatgaccgtggcctacgtgaagtgaagggcattttcctgcccttcttctagaaaatacacgagaaccatggagtctggcagtaccgccgccagtgaggaggcacgcagccttcgagaatgtgagctctacgtccagaagcataacattcaagcgctgctcaaagattctattgtgcagttgtgcactgctcgacctgagagacccatggcattcctcagggaatactttgagaggttggagaaggaggaggcaaaacagattc

SEQ ID NO: 170817 - DNA, 1209 bp, Homo sapiens
  Payload ID: 13615
  Gene Symbol: PRKAR1A
  Gene Name: protein kinase, cAMP-dependent, regulatory, type I, alpha
  Uniprot ID: P10644
  ENST ID: ENST00000588188
  CDS Start-End: 1-1014
atggagtctggcagtaccgccgccagtgaggaggcacgcagccttcgagaatgtgagctctacgtccagaagcataacattcaagcgctgctcaaagattctattgtgcagttgtgcactgctcgacctgagagacccatggcattcctcagggaatactttgagaggttggagaaggaggaggcaaaacagattcagaatctgcagaaagcaggcactcgtacagactcaagggaggatgagatttctcctcctccacccaacccagtggttaaaggtaggaggcgacgaggtgctatcagcgctgaggtctacacggaggaagatgcggcatcctatgttagaaaggttataccaaaagattacaagacaatggccgctttagccaaagccattgaaaagaatgtgctgttttcacatcttgatgataatgagagaagtgatatttttgatgccatgttttcggtctcctttatcgcaggagagactgtgattcagcaaggtgatgaaggggataacttctatgtgattgatcaaggagagacggatgtctatgttaacaatgaatgggcaaccagtgttggggaaggagggagctttggagaacttgctttgatttatggaacaccgagagcagccactgtcaaagcaaagacaaatgtgaaattgtggggcatcgaccgagacagctatagaagaatcctcatgggaagcacactgagaaagcggaagatgtatgaggaattccttagtaaagtctctattttagagtctctggacaagtgggaacgtcttacggtagctgatgcattggaaccagtgcagtttgaagatgggcagaagattgtggtgcagggagaaccaggggatgagttcttcattattttagaggggtcagctgctgtgctacaacgtcggtcagaaaatgaagagtttgttgaagtgggaagattggggccttctgattattttggtcacctcatcatctcaaggaggagcattcccctgggctaaggcactggggccgaactctaggagaccctaacctgtgggctgcagatcctttgggggccagaaacccaaactcacaccaagctctgtctaaggactcaatacatattatttcactcatctctatgtttcacaaaattttcaaggcatgtagttgctgttgttatgaataaaatataaattaatgtaaacatgtaa

SEQ ID NO: 170818 - DNA, 2007 bp, Homo sapiens
  Payload ID: 13616
  Gene Symbol: PRKAR1B
  Gene Name: protein kinase, cAMP-dependent, regulatory, type I, beta
  Uniprot ID: P31321
  ENST ID: ENST00000360274
  CDS Start-End: 182-1327
gcgggcggcgttgggggtgcagcagctgcgcgcggcgcgggggcgggcgtggagggcggcgccgctgcagtgcggggacccgctcgctcgctcgccagccgtccccgcgccccgcgtccccgcgcagccgcctcctggcctcgggcgccgcgcatccaggaaggaagcagccaccctcgccatggcctccccgcccgcctgcccctcggaggaggacgagagcctgaagggctgtgagctgtacgtgcagctgcacgggatccagcaggtcctcaaagactgtatcgtccacctctgcatctccaagcccgaacgccccatgaagttcctccgggagcacttcgagaagctggagaaggaagaaaacaggcagattttggcgcggcaaaagtcaaactcacagtcggactcccatgatgaggaggtgtcgcccacccccccgaaccctgtggtgaaggcccgccgccggcgaggaggcgtgagtgccgaggtgtacaccgaggaggacgccgtgtcctacgtcaggaaggtgattcccaaggactacaaaaccatgactgcgctggccaaggccatctccaagaacgtgctcttcgctcacctggatgacaacgagaggagtgacatattcgatgccatgttccctgtcactcacatcgctggggagactgttatacagcaagggaatgaaggagacaacttctatgtcgttgatcaaggggaagtggatgtgtacgtgaacggagagtgggtgaccaacatcagcgagggaggcagcttcggggagctggcgctcatctacggcacccccagggctgcgaccgtgaaagccaagacggacctcaagctctgggggatcgaccgggacagctaccggcgcatccttatgggcagcacgctgaggaaacgcaagatgtacgaggagttcctcagcaaggtctccatcctagagtccctggagaagtgggagcgtctgaccgtggcggatgcgctggagcccgtccagtttgaagatggagagaaaattgtggtccagggagagcctggggacgacttttacatcatcacggagggcaccgcgtccgtgctgcagcgccggtcccccaatgaggagtacgtggaggtggggcgcctgggaccctctgactacttcggggagattgcactgctgctgaaccggccccgggcggccactgtcgtggcccgggggcccctcaagtgtgtgaagctggaccggccccgcttcgagcgtgtgctggggccctgctctgagatcctcaagaggaacattcagcgttacaacagcttcatctccctcaccgtctgagcacagctcccgccctgcagccccagctccccagtgtggtggccgtgccctgctcgtctgtgtcgggggcccgggagccgctgtgtgaggtgtgggccgggtggggctgggtcccggcagcgtgaggactgccccttccccggactcactttttggaataaatgatcaccttgtgcatttccaaatcaaaggacaagcggacaaaatgcatcccaagatcaaggaagggacaggccagcttcctccccacacgcctccccggctgcctctgtgggcttctcctggggggcccaccccacccctgccagtctcctggagatgcttgaggatcggtcctccccagaaccaggccaggacgttgcccctggggcctggtgaccctgtgaggtcaggtcccccagattgaggtctgagtgtgggcaagtgtgtcaaaaggggctgccccccaggggagatgaggctgagagcagggagttgaggccgaagaagtcaaggcccctcccgcaaatgtgtacccctgcccgcgccactgcaccccgccgcacccccacctcccccgggggccctgctgcggatgccggagtgggagagtctctgagctgtgagattgatcttgcccctaattggagaggaagccgggcgccaagacacacggggctcctgccttgggagccagggcc

SEQ ID NO: 170819 - DNA, 888 bp, Homo sapiens
  Payload ID: 13616
  Gene Symbol: PRKAR1B
  Gene Name: protein kinase, cAMP-dependent, regulatory, type I, beta
  ENST ID: ENST00000400758
  CDS Start-End: 1-728
ctcgtccaccccacagaggaaacgcccaccacccacgccccgggcttgtcctcatcttcagcgcgggtggccaccctcctgccccagcgccaggccccagccggcagcatgctgaggacttcctgggagaggtgtacgtgaacggagagtgggtgaccaacatcagcgagggaggcagcttcggggagctggcgctcatctacggcacccccagggctgcgaccgtgaaagccaagacggacctcaagctctgggggatcgaccgggacagctaccggcgcatccttatgggcagcacgctgaggaaacgcaagatgtacgaggagttcctcagcaaggtctccatcctagagtccctggagaagtgggagcgtctgaccgtggcggatgcgctggagcccgtccagtttgaagatggagagaaaattgtggtccagggagagcctggggacgacttttacatcatcacggagggcaccgcgtccgtgctgcagcgccggtcccccaatgaggagtacgtggaggtggggcgcctgggaccctctgactacttcggggagattgcactgctgctgaaccggccccgggcggccactgtcgtggcccgggggcccctcaagtgtgtgaagctggaccggccccgcttcgagcgtgtgctggggccctgctctgagatcctcaagaggaacattcagcgttacaacagcttcatctccctcaccgtctgagcacagctcccgccctgcagccccagctccccagtgtggtggccgtgccctgctcgtctgtgtcgggggcccgggagccgctgtgtgaggtgtgggccgggtggggctgggtcccggcagcgtgaggactgccccttccccggactcactttttggaata

SEQ ID NO: 170820 - DNA, 1917 bp, Homo sapiens
  Payload ID: 13616
  Gene Symbol: PRKAR1B
  Gene Name: protein kinase, cAMP-dependent, regulatory, type I, beta
  Uniprot ID: P31321
  ENST ID: ENST00000403562
  CDS Start-End: 84-1229
gtgagggccaagcaggaacaggggtcacggggcaaggagcacgtggcagcgcaggaaacaggaaggaagcagccaccctcgccatggcctccccgcccgcctgcccctcggaggaggacgagagcctgaagggctgtgagctgtacgtgcagctgcacgggatccagcaggtcctcaaagactgtatcgtccacctctgcatctccaagcccgaacgccccatgaagttcctccgggagcacttcgagaagctggagaaggaagaaaacaggcagattttggcgcggcaaaagtcaaactcacagtcggactcccatgatgaggaggtgtcgcccacccccccgaaccctgtggtgaaggcccgccgccggcgaggaggcgtgagtgccgaggtgtacaccgaggaggacgccgtgtcctacgtcaggaaggtgattcccaaggactacaaaaccatgactgcgctggccaaggccatctccaagaacgtgctcttcgctcacctggatgacaacgagaggagtgacatattcgatgccatgttccctgtcactcacatcgctggggagactgttatacagcaagggaatgaaggagacaacttctatgtcgttgatcaaggggaagtggatgtgtacgtgaacggagagtgggtgaccaacatcagcgagggaggcagcttcggggagctggcgctcatctacggcacccccagggctgcgaccgtgaaagccaagacggacctcaagctctgggggatcgaccgggacagctaccggcgcatccttatgggcagcacgctgaggaaacgcaagatgtacgaggagttcctcagcaaggtctccatcctagagtccctggagaagtgggagcgtctgaccgtggcggatgcgctggagcccgtccagtttgaagatggagagaaaattgtggtccagggagagcctggggacgacttttacatcatcacggagggcaccgcgtccgtgctgcagcgccggtcccccaatgaggagtacgtggaggtggggcgcctgggaccctctgactacttcggggagattgcactgctgctgaaccggccccgggcggccactgtcgtggcccgggggcccctcaagtgtgtgaagctggaccggccccgcttcgagcgtgtgctggggccctgctctgagatcctcaagaggaacattcagcgttacaacagcttcatctccctcaccgtctgagcacagctcccgccctgcagccccagctccccagtgtggtggccgtgccctgctcgtctgtgtcgggggcccgggagccgctgtgtgaggtgtgggccgggtggggctgggtcccggcagcgtgaggactgccccttccccggactcactttttggaataaatgatcaccttgtgcatttccaaatcaaaggacaagcggacaaaatgcatcccaagatcaaggaagggacaggccagcttcctccccacacgcctccccggctgcctctgtgggcttctcctggggggcccaccccacccctgccagtctcctggagatgcttgaggatcggtcctccccagaaccaggccaggacgttgcccctggggcctggtgaccctgtgaggtcaggtcccccagattgaggtctgagtgtgggcaagtgtgtcaaaaggggctgccccccaggggagatgaggctgagagcagggagttgaggccgaagaagtcaaggcccctcccgcaaatgtgtacccctgcccgcgccactgcaccccgccgcacccccacctcccccgggggccctgctgcggatgccggagtgggagagtctctgagctgtgagattgatcttgcccctaattggagaggaagccgggcgccaagacacacggggctcctgccttgggagccagggccgcggccgc

SEQ ID NO: 170821 - DNA, 2553 bp, Homo sapiens
  Payload ID: 13616
  Gene Symbol: PRKAR1B
  Gene Name: protein kinase, cAMP-dependent, regulatory, type I, beta
  Uniprot ID: P31321
  ENST ID: ENST00000406797
  CDS Start-End: 176-1321
agtttctgccgccgccaccctggcaggatggggcaacggtgtgcggtaggaggatgaggttgattccctttcctgcagggctgggcttgtgggttaggaccgtcaccaagaggctcctcctaggcctccgtgacctctggatccccaagaaaggaaggaagcagccaccctcgccatggcctccccgcccgcctgcccctcggaggaggacgagagcctgaagggctgtgagctgtacgtgcagctgcacgggatccagcaggtcctcaaagactgtatcgtccacctctgcatctccaagcccgaacgccccatgaagttcctccgggagcacttcgagaagctggagaaggaagaaaacaggcagattttggcgcggcaaaagtcaaactcacagtcggactcccatgatgaggaggtgtcgcccacccccccgaaccctgtggtgaaggcccgccgccggcgaggaggcgtgagtgccgaggtgtacaccgaggaggacgccgtgtcctacgtcaggaaggtgattcccaaggactacaaaaccatgactgcgctggccaaggccatctccaagaacgtgctcttcgctcacctggatgacaacgagaggagtgacatattcgatgccatgttccctgtcactcacatcgctggggagactgttatacagcaagggaatgaaggagacaacttctatgtcgttgatcaaggggaagtggatgtgtacgtgaacggagagtgggtgaccaacatcagcgagggaggcagcttcggggagctggcgctcatctacggcacccccagggctgcgaccgtgaaagccaagacggacctcaagctctgggggatcgaccgggacagctaccggcgcatccttatgggcagcacgctgaggaaacgcaagatgtacgaggagttcctcagcaaggtctccatcctagagtccctggagaagtgggagcgtctgaccgtggcggatgcgctggagcccgtccagtttgaagatggagagaaaattgtggtccagggagagcctggggacgacttttacatcatcacggagggcaccgcgtccgtgctgcagcgccggtcccccaatgaggagtacgtggaggtggggcgcctgggaccctctgactacttcggggagattgcactgctgctgaaccggccccgggcggccactgtcgtggcccgggggcccctcaagtgtgtgaagctggaccggccccgcttcgagcgtgtgctggggccctgctctgagatcctcaagaggaacattcagcgttacaacagcttcatctccctcaccgtctgagcacagctcccgccctgcagccccagctccccagtgtggtggccgtgccctgctcgtctgtgtcgggggcccgggagccgctgtgtgaggtgtgggccgggtggggctgggtcccggcagcgtgaggactgccccttccccggactcactttttggaataaatgatcaccttgtgcatttccaaatcaaaggacaagcggacaaaatgcatcccaagatcaaggaagggacaggccagcttcctccccacacgcctccccggctgcctctgtgggcttctcctggggggcccaccccacccctgccagtctcctggagatgcttgaggatcggtcctccccagaaccaggccaggacgttgcccctggggcctggtgaccctgtgaggtcaggtcccccagattgaggtctgagtgtgggcaagtgtgtcaaaaggggctgccccccaggggagatgaggctgagagcagggagttgaggccgaagaagtcaaggcccctcccgcaaatgtgtacccctgcccgcgccactgcaccccgccgcacccccacctcccccgggggccctgctgcggatgccggagtgggagagtctctgagctgtgagattgatcttgcccctaattggagaggaagccgggcgccaagacacacggggctcctgccttgggagccagggccgcggccgcaggtagaccccagtagggggggccgggctcgaagttcctttgggaggggctggcgggactccagcaggccgtcctcacctttcttagaaagtccacccagggcaagttgatgttgggggaaagcagaagtcaagccagccgcgggccccacacgccccgacccgctcaaccgacttgtcccttaaatgtgtcttggatcccgcagtgatgacgtgagccagccaggcccgaaagggtgaggccagtgcagagaagcttcccaggggattcctgggttcccccgaaagacaagcgaggtcattgcagttcacctgatgttgctcctgtcccgtgcgtcccggggaggctgtccttggtccgaggctgctcgttgcagcccctcccctgctggcggttacgatgcgtggggtccccctccccacccagccccggccacgtcgccgtgtcccgcctgtgcctgtgacgtccctgtggacctgtgagccatccccccccttatctctgctctgaatactgcatgaagcattaaacgtgcaatgaagta

SEQ ID NO: 170822 - DNA, 752 bp, Homo sapiens
  Payload ID: 13616
  Gene Symbol: PRKAR1B
  Gene Name: protein kinase, cAMP-dependent, regulatory, type I, beta
  ENST ID: ENST00000414568
  CDS Start-End: 244-752
cgcaggaggtgattgccggtgtttgtagagccctgtggtccatcccctcagcaccctggattcccctccccggggttttgtccacgaggagctgcttttgaccgtgtgaggtcacagcactgggtttccaacagctccctggagacctgggcggaggccacatgccattcagcacacggcagggcgtccacctcactttgggctgtccgaaaggactgcgtgtaggcggaagggcgtgtggacatggatccactggaagaaaacaggcagattttggcgcggcaaaagtcaaactcacagtcggactcccatgatgaggaggtgtcgcccacccccccgaaccctgtggtgaaggcccgccgccggcgaggaggcgtgagtgccgaggtgtacaccgaggaggacgccgtgtcctacgtcaggaaggtgattcccaaggactacaaaaccatgactgcgctggccaaggccatctccaagaacgtgctcttcgctcacctggatgacaacgagaggagtgacatattcgatgccatgttccctgtcactcacatcgctggggagactgttatacagcaagggaatgaaggagacaacttctatgtcgttgatcaaggggaagtggatgtgtacgtgaacggagagtgggtgaccaacatcagcgagggaggcagcttcggggagctggcgctcatctacggcacccccagggctgcgaccgtgaaagccaagacggacctcaagctctgggg

SEQ ID NO: 170823 - DNA, 1006 bp, Homo sapiens
  Payload ID: 13616
  Gene Symbol: PRKAR1B
  Gene Name: protein kinase, cAMP-dependent, regulatory, type I, beta
  ENST ID: ENST00000430040
  CDS Start-End: 116-1006
ctctggccgctaaggcagagtgagaccccagggaacgggcgtgcttgctgggtaccgggtgtcctgcagaggcagggatgtgatcccctaggtgaaggaagcagccaccctcgccatggcctccccgcccgcctgcccctcggaggaggacgagagcctgaagggctgtgagctgtacgtgcagctgcacgggatccagcaggtcctcaaagactgtatcgtccacctctgcatctccaagcccgaacgccccatgaagttcctccgggagcacttcgagaagctggagaaggaagaaaacaggcagattttggcgcggcaaaagtcaaactcacagtcggactcccatgatgaggaggtgtcgcccacccccccgaaccctgtggtgaaggcccgccgccggcgaggaggcgtgagtgccgaggtgtacaccgaggaggacgccgtgtcctacgtcaggaaggtgattcccaaggactacaaaaccatgactgcgctggccaaggccatctccaagaacgtgctcttcgctcacctggatgacaacgagaggagtgacatattcgatgccatgttccctgtcactcacatcgctggggagactgttatacagcaagggaatgaaggagacaacttctatgtcgttgatcaaggggaagtggatgtgtacgtgaacggagagtgggtgaccaacatcagcgagggaggcagcttcggggagctggcgctcatctacggcacccccagggctgcgaccgtgaaagccaagacggacctcaagctctgggggatcgaccgggacagctaccggcgcatccttatgggcagcacgctgaggaaacgcaagatgtacgaggagttcctcagcaaggtctccatcctagagtccctggagaagtgggagcgtctgaccgtggcggatgcgctggagcccgtccagtttgaagatggagagaaaattgtggtccagggagagcctggggacgacttttacatcatcacggag

SEQ ID NO: 170824 - DNA, 651 bp, Homo sapiens
  Payload ID: 13616
  Gene Symbol: PRKAR1B
  Gene Name: protein kinase, cAMP-dependent, regulatory, type I, beta
  ENST ID: ENST00000417852
  CDS Start-End: 155-651
gtgggagcggggcccggggtgctcaccgggcgtggcctgcgccagggcggcggcgcagctgcagctctcgcggcgcacggcggcgaaggggtcgagcagggagcagcgcagcgcgcgcagagcgtcgtccaggaaggaagcagccaccctcgccatggcctccccgcccgcctgcccctcggaggaggacgagagcctgaagggctgtgagctgtacgtgcagctgcacgggatccagcaggtcctcaaagactgtatcgtccacctctgcatctccaagcccgaacgccccatgaagttcctccgggagcacttcgagaagctggagaaggaagaaaacaggcagattttggcgcggcaaaagtcaaactcacagtcggactcccatgatgaggaggtgtcgcccacccccccgaaccctgtggtgaaggcccgccgccggcgaggaggcgtgagtgccgaggtgtacaccgaggaggacgccgtgtcctacgtcaggaaggtgattcccaaggactacaaaaccatgactgcgctggccaaggccatctccaagaacgtgctcttcgctcacctggatgacaacgagaggagtgacatattcgatgccatgttccctgtcactcacatcgctggggagactgttataca

SEQ ID NO: 170825 - DNA, 518 bp, Homo sapiens
  Payload ID: 13616
  Gene Symbol: PRKAR1B
  Gene Name: protein kinase, cAMP-dependent, regulatory, type I, beta
  ENST ID: ENST00000456696
  CDS Start-End: 171-518
ggatccccaagaaaggtgggaaagaatttaggagggttccgatttcccactgggcatcggggtgaagctggtgcgcctaagcgctgggagtcacctggggaagcggggctgggcccacctggccaccctctctggccgctaaggcagagaaggaagcagccaccctcgccatggcctccccgcccgcctgcccctcggaggaggacgagagcctgaagggctgtgagctgtacgtgcagctgcacgggatccagcaggtcctcaaagactgtatcgtccacctctgcatctccaagcccgaacgccccatgaagttcctccgggagcacttcgagaagctggagaaggaagaaaacaggcagattttggcgcggcaaaagtcaaactcacagtcggactcccatgatgaggaggtgtcgcccacccccccgaaccctgtggtgaaggcccgccgccggcgaggaggcgtgagtgccgaggtgtacaccgaggaggacgccgtgtcctacgtcaggaag

SEQ ID NO: 170826 - DNA, 2533 bp, Homo sapiens
  Payload ID: 13616
  Gene Symbol: PRKAR1B
  Gene Name: protein kinase, cAMP-dependent, regulatory, type I, beta
  Uniprot ID: P31321
  ENST ID: ENST00000537384
  CDS Start-End: 155-1300
gtgggagcggggcccggggtgctcaccgggcgtggcctgcgccagggcggcggcgcagctgcagctctcgcggcgcacggcggcgaaggggtcgagcagggagcagcgcagcgcgcgcagagcgtcgtccaggaaggaagcagccaccctcgccatggcctccccgcccgcctgcccctcggaggaggacgagagcctgaagggctgtgagctgtacgtgcagctgcacgggatccagcaggtcctcaaagactgtatcgtccacctctgcatctccaagcccgaacgccccatgaagttcctccgggagcacttcgagaagctggagaaggaagaaaacaggcagattttggcgcggcaaaagtcaaactcacagtcggactcccatgatgaggaggtgtcgcccacccccccgaaccctgtggtgaaggcccgccgccggcgaggaggcgtgagtgccgaggtgtacaccgaggaggacgccgtgtcctacgtcaggaaggtgattcccaaggactacaaaaccatgactgcgctggccaaggccatctccaagaacgtgctcttcgctcacctggatgacaacgagaggagtgacatattcgatgccatgttccctgtcactcacatcgctggggagactgttatacagcaagggaatgaaggagacaacttctatgtcgttgatcaaggggaagtggatgtgtacgtgaacggagagtgggtgaccaacatcagcgagggaggcagcttcggggagctggcgctcatctacggcacccccagggctgcgaccgtgaaagccaagacggacctcaagctctgggggatcgaccgggacagctaccggcgcatccttatgggcagcacgctgaggaaacgcaagatgtacgaggagttcctcagcaaggtctccatcctagagtccctggagaagtgggagcgtctgaccgtggcggatgcgctggagcccgtccagtttgaagatggagagaaaattgtggtccagggagagcctggggacgacttttacatcatcacggagggcaccgcgtccgtgctgcagcgccggtcccccaatgaggagtacgtggaggtggggcgcctgggaccctctgactacttcggggagattgcactgctgctgaaccggccccgggcggccactgtcgtggcccgggggcccctcaagtgtgtgaagctggaccggccccgcttcgagcgtgtgctggggccctgctctgagatcctcaagaggaacattcagcgttacaacagcttcatctccctcaccgtctgagcacagctcccgccctgcagccccagctccccagtgtggtggccgtgccctgctcgtctgtgtcgggggcccgggagccgctgtgtgaggtgtgggccgggtggggctgggtcccggcagcgtgaggactgccccttccccggactcactttttggaataaatgatcaccttgtgcatttccaaatcaaaggacaagcggacaaaatgcatcccaagatcaaggaagggacaggccagcttcctccccacacgcctccccggctgcctctgtgggcttctcctggggggcccaccccacccctgccagtctcctggagatgcttgaggatcggtcctccccagaaccaggccaggacgttgcccctggggcctggtgaccctgtgaggtcaggtcccccagattgaggtctgagtgtgggcaagtgtgtcaaaaggggctgccccccaggggagatgaggctgagagcagggagttgaggccgaagaagtcaaggcccctcccgcaaatgtgtacccctgcccgcgccactgcaccccgccgcacccccacctcccccgggggccctgctgcggatgccggagtgggagagtctctgagctgtgagattgatcttgcccctaattggagaggaagccgggcgccaagacacacggggctcctgccttgggagccagggccgcggccgcaggtagaccccagtagggggggccgggctcgaagttcctttgggaggggctggcgggactccagcaggccgtcctcacctttcttagaaagtccacccagggcaagttgatgttgggggaaagcagaagtcaagccagccgcgggccccacacgccccgacccgctcaaccgacttgtcccttaaatgtgtcttggatcccgcagtgatgacgtgagccagccaggcccgaaagggtgaggccagtgcagagaagcttcccaggggattcctgggttcccccgaaagacaagcgaggtcattgcagttcacctgatgttgctcctgtcccgtgcgtcccggggaggctgtccttggtccgaggctgctcgttgcagcccctcccctgctggcggttacgatgcgtggggtccccctccccacccagccccggccacgtcgccgtgtcccgcctgtgcctgtgacgtccctgtggacctgtgagccatccccccccttatctctgctctgaatactgcatgaagcattaaacgtgcaatgaagtac

SEQ ID NO: 170827 - DNA, 2494 bp, Homo sapiens
  Payload ID: 13616
  Gene Symbol: PRKAR1B
  Gene Name: protein kinase, cAMP-dependent, regulatory, type I, beta
  Uniprot ID: P31321
  ENST ID: ENST00000544935
  CDS Start-End: 116-1261
ctctggccgctaaggcagagtgagaccccagggaacgggcgtgcttgctgggtaccgggtgtcctgcagaggcagggatgtgatcccctaggtgaaggaagcagccaccctcgccatggcctccccgcccgcctgcccctcggaggaggacgagagcctgaagggctgtgagctgtacgtgcagctgcacgggatccagcaggtcctcaaagactgtatcgtccacctctgcatctccaagcccgaacgccccatgaagttcctccgggagcacttcgagaagctggagaaggaagaaaacaggcagattttggcgcggcaaaagtcaaactcacagtcggactcccatgatgaggaggtgtcgcccacccccccgaaccctgtggtgaaggcccgccgccggcgaggaggcgtgagtgccgaggtgtacaccgaggaggacgccgtgtcctacgtcaggaaggtgattcccaaggactacaaaaccatgactgcgctggccaaggccatctccaagaacgtgctcttcgctcacctggatgacaacgagaggagtgacatattcgatgccatgttccctgtcactcacatcgctggggagactgttatacagcaagggaatgaaggagacaacttctatgtcgttgatcaaggggaagtggatgtgtacgtgaacggagagtgggtgaccaacatcagcgagggaggcagcttcggggagctggcgctcatctacggcacccccagggctgcgaccgtgaaagccaagacggacctcaagctctgggggatcgaccgggacagctaccggcgcatccttatgggcagcacgctgaggaaacgcaagatgtacgaggagttcctcagcaaggtctccatcctagagtccctggagaagtgggagcgtctgaccgtggcggatgcgctggagcccgtccagtttgaagatggagagaaaattgtggtccagggagagcctggggacgacttttacatcatcacggagggcaccgcgtccgtgctgcagcgccggtcccccaatgaggagtacgtggaggtggggcgcctgggaccctctgactacttcggggagattgcactgctgctgaaccggccccgggcggccactgtcgtggcccgggggcccctcaagtgtgtgaagctggaccggccccgcttcgagcgtgtgctggggccctgctctgagatcctcaagaggaacattcagcgttacaacagcttcatctccctcaccgtctgagcacagctcccgccctgcagccccagctccccagtgtggtggccgtgccctgctcgtctgtgtcgggggcccgggagccgctgtgtgaggtgtgggccgggtggggctgggtcccggcagcgtgaggactgccccttccccggactcactttttggaataaatgatcaccttgtgcatttccaaatcaaaggacaagcggacaaaatgcatcccaagatcaaggaagggacaggccagcttcctccccacacgcctccccggctgcctctgtgggcttctcctggggggcccaccccacccctgccagtctcctggagatgcttgaggatcggtcctccccagaaccaggccaggacgttgcccctggggcctggtgaccctgtgaggtcaggtcccccagattgaggtctgagtgtgggcaagtgtgtcaaaaggggctgccccccaggggagatgaggctgagagcagggagttgaggccgaagaagtcaaggcccctcccgcaaatgtgtacccctgcccgcgccactgcaccccgccgcacccccacctcccccgggggccctgctgcggatgccggagtgggagagtctctgagctgtgagattgatcttgcccctaattggagaggaagccgggcgccaagacacacggggctcctgccttgggagccagggccgcggccgcaggtagaccccagtagggggggccgggctcgaagttcctttgggaggggctggcgggactccagcaggccgtcctcacctttcttagaaagtccacccagggcaagttgatgttgggggaaagcagaagtcaagccagccgcgggccccacacgccccgacccgctcaaccgacttgtcccttaaatgtgtcttggatcccgcagtgatgacgtgagccagccaggcccgaaagggtgaggccagtgcagagaagcttcccaggggattcctgggttcccccgaaagacaagcgaggtcattgcagttcacctgatgttgctcctgtcccgtgcgtcccggggaggctgtccttggtccgaggctgctcgttgcagcccctcccctgctggcggttacgatgcgtggggtccccctccccacccagccccggccacgtcgccgtgtcccgcctgtgcctgtgacgtccctgtggacctgtgagccatccccccccttatctctgctctgaatactgcatgaagcattaaacgtgcaatgaagtac

SEQ ID NO: 170828 - DNA, 6471 bp, Homo sapiens
  Payload ID: 13617
  Gene Symbol: PRKAR2A
  Gene Name: protein kinase, cAMP-dependent, regulatory, type II, alpha
  Uniprot ID: P13861
  ENST ID: ENST00000265563
  CDS Start-End: 251-1465
agctcgcctgcccgtcggtccccgcggcggcggcggctgcccagtgacagcggcggcggtgccaggtcggccgtggtagcgtagggttgcgcggcccggaaacgcagagccggccaaagagcggcgcgacgtgagccggggccgtgcgcgaagagacctcgcgggcgcggagcgaaaggccggcgtgagtgagcgcggagacagtggccgccggcggcccaacccgtctatcccttcggccgccgccggcatgagccacatccagatcccgccggggctcacggagctgctgcagggctacacggtggaggtgctgcgacagcagccgcctgacctcgtcgaattcgcagtggagtacttcacccgcctgcgcgaggcccgcgccccagcctcagtcctgcccgccgccaccccacgccagagcctgggccaccccccgccagaacccggcccggaccgtgtcgccgacgccaaaggggacagcgagtcggaggaggacgaggacttggaagttccagttcctagcagatttaatagacgagtatcagtctgtgctgagacctataaccctgatgaggaagaggaagatacagatccaagggtgattcatcctaaaactgatgaacagagatgcagacttcaggaagcttgcaaagatattctccttttcaaaaatcttgatcaggaacagctttctcaagttctcgatgccatgtttgaaaggatagtcaaagctgatgagcatgtcattgaccaaggagatgatggagacaacttttatgtcatagaacggggaacttatgacattttagtaacaaaagataatcaaacccgctctgttggtcaatatgacaaccgtggcagttttggagaactagctctgatgtacaacaccccgagagctgctaccattgttgctacctcagaaggctccctttggggactggaccgggtgacttttagaagaatcatagtgaaaaataatgcaaagaagaggaagatgtttgaatcatttattgagtctgtgcccctccttaaatcactagaggtgtcagaacgaatgaagattgtggatgtaataggagagaagatctataaggatggagaacgcataatcactcagggtgaaaaggctgatagcttttacatcatagagtctggcgaagtgagcatcttgattagaagcaggactaaatcaaacaaggatggtgggaaccaggaggtcgagattgcccgctgccataaggggcagtactttggagagcttgccctggtcaccaacaaacccagagctgcctcagcttatgcagttggagatgtcaaatgcttagttatggatgtacaagcattcgagaggcttctggggccctgcatggacatcatgaagaggaacatctcacactatgaggaacagctggtgaagatgtttggctccagcgtggatctgggcaacctcgggcagtaggtgtgccacaccccagagccttcttagtgtgacaccaaaaccttctggtcagccacagaacacatacagaaaacagacatgacagaactgttcctgccgttgccgccactgctgccattgctgtggttatgggcatttagaaaacttgaaagtcagcactaaaggatgggcagaggttcaacccacacctccactttgcttctgaaggcccattcattagaccacttgtaaagattactccaacccagtttttatatctttggttcaaaacggcatgtctctccaacaatttaagtgcctgatacaaagtccaaagtataaacatgctcctttcctctcttgctgctactcttgcttttggaagttaccacagggtctgcagaaacctgttgtataactgtagacactctctaatggttctcaaaggaggaaatgtagccttcagtctcctcatttgtcctttgaggaagtccacatttgttcacagttgcagcctttggttttacagtgggaaatggtggtggatgatatggacatatgtagcccagtggcattgtactttctgctgacagctgcacacattacagctgtctccaaacccacagtgatgcttagggaaagaccctgctcaggacccagcaggtcagcaccccagagcagactgataggtccgtgggacccatgttagagcagaaaatttgggctcagcacattttactgttagtagagagccaggaaacgttttctgggttggggattttgtgggattttttaatttttttagtaggttttgtttaacctctgtgcagtttgtatgaatgaattgctatacatttataaggagccagggtctggagggttgctatcactttgtccagcccaaataccttcctgggcaactcctaccatttgtttgcagttgcctctactagctgatggcagtatgctggaaagaggttgtactataaagagagttctttccttctactccagagttgttgtgtagctttgccattgaaccgatcaatttttaaactctttaaagaagcagcagctatttttttgaaattaaagaaaattctcaggccaggctcaatggctcatgcctataattgtagtgctttgggaggctgagctgggaggatcgcttaagaccagcctaggcaacagagtgagatcctgtctctacaaaaacaaaaattttttttttgttttctttttgagacggagtttcgctcttgttgcccaggctggagtgcaatggtgcggtcttggctcaccgcaacctccgcctcccagattaaagtgattctcctgcctcaacctcctgagtagctgggattacaggcatgcgccaccatgccgggcgaattttgtatttttaatagagacagggtttctctgtgttggtcaggctggtctcaaactcccaacctcaggtgatccgcccacctcagcctctcagagtgctgggattacagatgtgagccactgcacctggcaaaaaaaaaatttttttttaatttgtcaggtgtggtgatgcatgcatgtagtcccaaatacttaggaggctgaggtggaaggatcacttgagcccaggaggtcaaggcaacagtgagctgtgatcatgccactgcactccagtctgggtgacacagtgagaccctgtctcttaaaaaaaaaaaaagaaagaaaaaaaattattctttaggtaatttcacttggacatattcatgtatatggagtttgtcagctgactcaggcatttaccctaaagatcaaatctgttttcaaaaattggcattggccaggcacggtgacccacacctgtaatcccagcactttgggaggccgaggcgggcggatcacgaggtcaggggttcaagaccagcctggccaacatagtgaaaccccgtctctactaaaaatacaaaaaattagctgggcatggtggtgggcgcctgtaatcccagctacttgagaggctcaggcaggagaatcgcttgaacctgggagtggaggttgcagtgagccgagattgcaccattgtattccaccccgggtgacagtgcaagactccatctcaaaaaaaaaaaaaaaatttggcatcatttacaatttcatagaattactgtgaaggcctttctagttgagatgttggggtatttgggattctaattgttaaccccagaagaaggtaatttagcttgtatttatttaaaacccatttagccttttacttatatctggtagaattccagtgatcatcctaataaggtatatttcagaataatttttttttccttcagaataacttagaatcagatgctataagggctcctaggagcagtgtgaaatttccgtaaagataaatttgaatgttgtaaccaagtttatattaaaccaagaggccatttccaatatgattttttgtttctttttaacttgttaagtccctaagagattacatgctagggcttgagtcatttctattgtagataatgatggcccacacagtcaccttcaactatccacataagctaggctttccgcttttgccacggacagtgtgaccaagatatttccagagtaaataacccaccacaaccttggtaattcctcttttcttcttaagctccaggaagcgaaagcagaaggactcttttcagactgccctctgtagcctacattgcagctttccaaaacaggcagctagcactgggaaagcccatgtggtgaccccatatttttctgaggttcttcttttccatggtgttactttattatcagaaagtaaattcagaaaacaggtcttgcccttagcagacaagaaccacaccagtttcttgtaaaggtaacggatacattgggattcaggagtgacacagaggtccagccccagaacttgtaaggattttgtttgaacactgagcagatgcctcctccctgccacccatcacactagttagggctggccatgaattctatgccagagtcactcctgcagtctgctagggatgggccttcttatcccactctcgcacacatcccagtctagtctttgccttcacagagtcctccttgacacccctgacttaatgatagttgctgttttggagtagaattgatcaggtttaagtcatcctgctcaggttgggcatagtggctcatgcctgtaatctcagcactttgggaagccaaagtgggaggattgcttgagcccaggagttccaaaccatcctgggcaacagagggagaccctgtctctaccaagaaaaaaaaaaaaaaaaaaagttaaaaaaacaattagctggacctggtggtgcacactcagtaggctgaggtgaaaggattcctttaacctgggagactgaagctgcagtgagccatgatcgtgccactgcactccagtctgggggacaaagtgggaccctatctcaaaaaaaaaaaaaaaaagtcatcctcctccaactactgattgacatatggatcatcagttcagaccctcactgcatacaggatccctagagggttctatttaatagcttgaggaagggagactttaaaaggacgtgtgtgagtgaaataggatatagccattaccacggtgccaggacctgacagcgttccaattctttttgcagcatggggaatcaaaggtggcatgccaagttcaactcagggctgaggtatccacattgtccacatcaggcaagccctgcactgacggttgagcctcatggagaggagcatgtgttggaaagagatccctttgttaactgttttgtggtgttctcttcaatgaattagagctcatgccccttttctggctttgctgttgattttggatggtagagaatattcctgagagccttccttttggcccccagcttatgccacccactctcttctcttggttgaattctctgaaggaaaggttcatgtgctattgtcctgttagtcaatagtcttcatatataattgtgttacatatattgctgtagactctcagaaatcagggtagagcttttcctttgagcagtttaatgagtgaattcagcagcaaagtcgcaagaaatggttctccagccaggagaggttatgtttatcctctgattgcccgttttctctgcacacagtgatatcgtattcagtgagaggtgctgttggcacccagcagcaccctgggcacacagcatttcatgtcatgtcacagtgtacaagctaccctctaattcagaaagaagagcattttgcacagagaaaaataaaaagatccatgaatgtcatcttttatcttttattttcagttggctgatgttggaatttttgttcttgtcatgaacttgtaaaccaatcttgccaagatacaagttgttttggtttttcactacaatgacctcttgttcctcctgtcttgactgctgacgttcctcaatgattctattgtctattttatgggaagcagccttcccataggtttccttttacacactgcagggctatctttatactttaaaaaaaaaaaaaaaaaaaaaaaaaaggacaagaactgtcactaacctcatggaggggtttgcgtaaaaccatttagcccaccttgagcaaagggtagattccgtgttgtttttttaagctcactgtaataaaataaatctaattcagcattattgtgctacctcaaaggtaaaaaatgttttaaggtcttcttttggtcctgagttctatatacagtgtttgaaatgtccttcatttggaattattttttaaattcttggagtgaattttattttaatctgttttaatcttgtattttaatctcagaagaataagtgattgaaacgtgatcaattcttgctctgtggtgttaaacatataatgaacagtcattaagaattaagtcactgtttgccataaacaaggttgatgttctttttgttgttgttaaggaaaccctagggctcggctttactcttgattaataaaggctgacaaatcatgtctga

SEQ ID NO: 170829 - DNA, 3318 bp, Homo sapiens
  Payload ID: 13617
  Gene Symbol: PRKAR2A
  Gene Name: protein kinase, cAMP-dependent, regulatory, type II, alpha
  Uniprot ID: P13861
  ENST ID: ENST00000296446
  CDS Start-End: 233-1381
tccccgcggcggcggcggctgcccagtgacagcggcggcggtgccaggtcggccgtggtagcgtagggttgcgcggcccggaaacgcagagccggccaaagagcggcgcgacgtgagccggggccgtgcgcgaagagacctcgcgggcgcggagcgaaaggccggcgtgagtgagcgcggagacagtggccgccggcggcccaacccgtctatcccttcggccgccgccggcatgagccacatccagatcccgccggggctcacggagctgctgcagggctacacggtggaggtgctgcgacagcagccgcctgacctcgtcgaattcgcagtggagtacttcacccgcctgcgcgaggcccgcgccccagcctcagtcctgcccgccgccaccccacgccagagcctgggccaccccccgccagaacccggcccggaccgtgtcgccgacgccaaaggggacagcgagtcggaggaggacgaggacttggaagttccagttcctagcagatttaatagacgagtatcagtctgtgctgagacctataaccctgatgaggaagaggaagatacagatccaagggtgattcatcctaaaactgatgaacagagatgcagacttcaggaagcttgcaaagatattctccttttcaaaaatcttgatcaggaacagctttctcaagttctcgatgccatgtttgaaaggatagtcaaagctgatgagcatgtcattgaccaaggagatgatggagacaacttttatgtcatagaacggggaacttatgacattttagtaacaaaagataatcaaacccgctctgttggtcaatatgacaaccgtggcagttttggagaactagctctgatgtacaacaccccgagagctgctaccattgttgctacctcagaaggctccctttggggactggaccgggtgacttttagaagaatcatagtgaaaaataatgcaaagaagaggaagatgtttgaatcatttattgagtctgtgcccctccttaaatcactagaggtgtcagaacgaatgaagattgtggatgtaataggagagaagatctataaggatggagaacgcataatcactcagactaaatcaaacaaggatggtgggaaccaggaggtcgagattgcccgctgccataaggggcagtactttggagagcttgccctggtcaccaacaaacccagagctgcctcagcttatgcagttggagatgtcaaatgcttagttatggatgtacaagcattcgagaggcttctggggccctgcatggacatcatgaagaggaacatctcacactatgaggaacagctggtgaagatgtttggctccagcgtggatctgggcaacctcgggcagtaggtgtgccacaccccagagccttcttagtgtgacaccaaaaccttctggtcagccacagaacacatacagaaaacagacatgacagaactgttcctgccgttgccgccactgctgccattgctgtggttatgggcatttagaaaacttgaaagtcagcactaaaggatgggcagaggttcaacccacacctccactttgcttctgaaggcccattcattagaccacttgtaaagattactccaacccagtttttatatctttggttcaaaacggcatgtctctccaacaatttaagtgcctgatacaaagtccaaagtataaacatgctcctttcctctcttgctgctactcttgcttttggaagttaccacagggtctgcagaaacctgttgtataactgtagacactctctaatggttctcaaaggaggaaatgtagccttcagtctcctcatttgtcctttgaggaagtccacatttgttcacagttgcagcctttggttttacagtgggaaatggtggtggatgatatggacatatgtagcccagtggcattgtactttctgctgacagctgcacacattacagctgtctccaaacccacagtgatgcttagggaaagaccctgctcaggacccagcaggtcagcaccccagagcagactgataggtccgtgggacccatgttagagcagaaaatttgggctcagcacattttactgttagtagagagccaggaaacgttttctgggttggggattttgtgggattttttaatttttttagtaggttttgtttaacctctgtgcagtttgtatgaatgaattgctatacatttataaggagccagggtctggagggttgctatcactttgtccagcccaaataccttcctgggcaactcctaccatttgtttgcagttgcctctactagctgatggcagtatgctggaaagaggttgtactataaagagagttctttccttctactccagagttgttgtgtagctttgccattgaaccgatcaatttttaaactctttaaagaagcagcagctatttttttgaaattaaagaaaattctcaggccaggctcaatggctcatgcctataattgtagtgctttgggaggctgagctgggaggatcgcttaagaccagcctaggcaacagagtgagatcctgtctctacaaaaacaaaaattttttttttgttttctttttgagacggagtttcgctcttgttgcccaggctggagtgcaatggtgcggtcttggctcaccgcaacctccgcctcccagattaaagtgattctcctgcctcaacctcctgagtagctgggattacaggcatgcgccaccatgccgggcgaattttgtatttttaatagagacagggtttctctgtgttggtcaggctggtctcaaactcccaacctcaggtgatccgcccacctcagcctctcagagtgctgggattacagatgtgagccactgcacctggcaaaaaaaaaatttttttttaatttgtcaggtgtggtgatgcatgcatgtagtcccaaatacttaggaggctgaggtggaaggatcacttgagcccaggaggtcaaggcaacagtgagctgtgatcatgccactgcactccagtctgggtgacacagtgagaccctgtctcttaaaaaaaaaaaaagaaagaaaaaaaattattctttaggtaatttcacttggacatattcatgtatatggagtttgtcagctgactcaggcatttaccctaaagatcaaatctgttttcaaaaattggcattggccaggcacggtgacccacacctgtaatcccagcactttgggaggccgaggcgggcggatcacgaggtcaggggttcaagaccagcctggccaacatagtgaaaccccgtctctactaaaaatacaaaaaa

SEQ ID NO: 170830 - DNA, 1849 bp, Homo sapiens
  Payload ID: 13617
  Gene Symbol: PRKAR2A
  Gene Name: protein kinase, cAMP-dependent, regulatory, type II, alpha
  Uniprot ID: P13861
  ENST ID: ENST00000454963
  CDS Start-End: 209-1423
agtgacagcggcggcggtgccaggtcggccgtggtagcgtagggttgcgcggcccggaaacgcagagccggccaaagagcggcgcgacgtgagccggggccgtgcgcgaagagacctcgcgggcgcggagcgaaaggccggcgtgagtgagcgcggagacagtggccgccggcggcccaacccgtctatcccttcggccgccgccggcatgagccacatccagatcccgccggggctcacggagctgctgcagggctacacggtggaggtgctgcgacagcagccgcctgacctcgtcgaattcgcagtggagtacttcacccgcctgcgcgaggcccgcgccccagcctcagtcctgcccgccgccaccccacgccagagcctgggccaccccccgccagaacccggcccggaccgtgtcgccgacgccaaaggggacagcgagtcggaggaggacgaggacttggaagttccagttcctagcagatttaatagacgagtatcagtctgtgctgagacctataaccctgatgaggaagaggaagatacagatccaagggtgattcatcctaaaactgatgaacagagatgcagacttcaggaagcttgcaaagatattctccttttcaaaaatcttgatcaggaacagctttctcaagttctcgatgccatgtttgaaaggatagtcaaagctgatgagcatgtcattgaccaaggagatgatggagacaacttttatgtcatagaacggggaacttatgacattttagtaacaaaagataatcaaacccgctctgttggtcaatatgacaaccgtggcagttttggagaactagctctgatgtacaacaccccgagagctgctaccattgttgctacctcagaaggctccctttggggactggaccgggtgacttttagaagaatcatagtgaaaaataatgcaaagaagaggaagatgtttgaatcatttattgagtctgtgcccctccttaaatcactagaggtgtcagaacgaatgaagattgtggatgtaataggagagaagatctataaggatggagaacgcataatcactcagggtgaaaaggctgatagcttttacatcatagagtctggcgaagtgagcatcttgattagaagcaggactaaatcaaacaaggatggtgggaaccaggaggtcgagattgcccgctgccataaggggcagtactttggagagcttgccctggtcaccaacaaacccagagctgcctcagcttatgcagttggagatgtcaaatgcttagttatggatgtacaagcattcgagaggcttctggggccctgcatggacatcatgaagaggaacatctcacactatgaggaacagctggtgaagatgtttggctccagcgtggatctgggcaacctcgggcagtagcatggggaatcaaaggtggcatgccaagttcaactcagggctgaggtatccacattgtccacatcaggcaagccctgcactgacggttgagcctcatggagaggagcatgtgttggaaagagatccctttgttaactgttttgtggtgttctcttcaatgaattagagctcatgccccttttctggctttgctgttgattttggatggtagagaatattcctgagagccttccttttggcccccagcttatgccacccactctcttctcttggttgaattctctgaaggaaaggttcatgtgctattgtcctgttagtcaatagtcttcatatataattgtgttacatatattgctgtagactctcagaaatcagggtagagcttttcctttgagcagtttaatgagtgaattcagcagcaaagtc

SEQ ID NO: 170831 - DNA, 627 bp, Homo sapiens
  Payload ID: 13617
  Gene Symbol: PRKAR2A
  Gene Name: protein kinase, cAMP-dependent, regulatory, type II, alpha
  ENST ID: ENST00000437821
  CDS Start-End: 1-602
aagatacagatccaagggtgattcatcctaaaactgatgaacagagatgcagacttcaggaagcttgcaaagatattctccttttcaaaaatcttgatcaggaacagctttctcaagttctcgatgccatgtttgaaaggatagtcaaagctgatgagcatgtcattgaccaaggagatgatggagacaacttttatgtcatagaacggggaacttatgacattttagtaacaaaagataatcaaacccgctctgttggtcaatatgacaaccgtggcagttttggagaactagctctgatgtacaacaccccgagagctgctaccattgttgctacctcagaaggctccctttggggactggaccgggtgacttttagaagaatcatagtgaaaaataatgcaaagaagaggaagatgtttgaatcatttattgagtctgtgcccctccttaaatcactagaggatgggcagaggttcaacccacacctccactttgcttctgaaggcccattcattagaccacttgtaaagattactccaacccagtttttatatctttggttcaaaacggcatgtctctccaacaatttaagtgcctgatacaaagtccaaagtataaacatgc

SEQ ID NO: 170832 - DNA, 448 bp, Homo sapiens
  Payload ID: 13617
  Gene Symbol: PRKAR2A
  Gene Name: protein kinase, cAMP-dependent, regulatory, type II, alpha
  ENST ID: ENST00000457914
  CDS Start-End: 1-277
gactaaatcaaacaaggatggtgggaaccaggaggtcgagattgcccgctgccataaggggcagtactttggagagcttgccctggtcaccaacaaacccagagctgcctcagcttatgcagttggagatgtcaaatgcttagttatggatgtacaagcattcgagaggcttctggggccctgcatggacatcatgaagaggaacatctcacactatgaggaacagctggtgaagatgtttggctccagcgtggatctgggcaacctcgggcagtaggtgaccaaaggaagcgccttgttgcagtttgatcttgcccacatttggacagagacacctgcctgtaccaaagggccaactgtgggagcatatgaaatctaggacccaagcaactggtagatggaaatcttgggactcactagggcccaataaactggtagctgaaccctc

SEQ ID NO: 170833 - DNA, 581 bp, Homo sapiens
  Payload ID: 13617
  Gene Symbol: PRKAR2A
  Gene Name: protein kinase, cAMP-dependent, regulatory, type II, alpha
  ENST ID: ENST00000419216
  CDS Start-End: 238-581
gtcggtccccgcggcggcggcggctgcccagtgacagcggcggcggtgccaggtcggccgtggtagcgtagggttgcgcggcccggaaacgcagagccggccaaagagcggcgcgacgtgagccggggccgtgcgcgaagagacctcgcgggcgcggagcgaaaggccggcgtgagtgagcgcggagacagtggccgccggcggcccaacccgtctatcccttcggccgccgccggcatgagccacatccagatcccgccggggctcacggagctgctgcagggctacacggtggaggtgctgcgacagcagccgcctgacctcgtcgaattcgcagtggagtacttcacccgcctgcgcgaggcccgcgccccagcctcagtcctgcccgccgccaccccacgccagagcctgggccaccccccgccagaacccggcccggaccgtgtcgccgacgccaaaggggacagcgagtcggaggaggacgaggacttggaagtctgtgctgagacctataaccctgatgaggaagaggaagatacagatccaagggtgattcatcctaaaactgatgaacagag

SEQ ID NO: 170834 - DNA, 624 bp, Homo sapiens
  Payload ID: 13617
  Gene Symbol: PRKAR2A
  Gene Name: protein kinase, cAMP-dependent, regulatory, type II, alpha
  ENST ID: ENST00000438535
  CDS Start-End: 1-298
ggaccgggtgacttttagaagaatcatagtgaaaaataatgcaaagaagaggaagatgtttgaatcatttattgagtctgtgcccctccttaaatcactagaggtgtcagaacgaatgaagattgtggatgtaataggagagaagatctataaggatggagaacgcataatcactcagggtgaaaaggctgatagcttttacatcatagagtctggcgaagtgagcatcttgattagaagcaggttatggatgtacaagcattcgagaggcttctggggccctgcatggacatcatgaagaggaacatctcacactatgaggaacagctggtgaagatgtttggctccagcgtggatctgggcaacctcgggcagtaggtgtgccacaccccagagccttcttagtgtgacaccaaaaccttctggtcagccacagaacacatacagaaaacagacatgacagaactgttcctgccgttgccgccactgctgccattgctgtggttatgggcatttagaaaacttgaaagtcagcactaaaggatgggcagaggttcaacccacacctccactttgcttctgaaggcccattcattagaccacttgtaaagattactccaaccc

SEQ ID NO: 170835 - DNA, 3745 bp, Homo sapiens
  Payload ID: 13618
  Gene Symbol: PRKAR2B
  Gene Name: protein kinase, cAMP-dependent, regulatory, type II, beta
  Uniprot ID: P31323
  ENST ID: ENST00000265717
  CDS Start-End: 260-1516
gccgcggctggagcgggaggagcaggagatgctgccagccctcccggggccgcgctcgctcagccgccgccaccacacggagcagacgcgcgccgggagccgcgggccgggccagccgggccgccggggcccagtgcgccgcgctcgcagccggtagcgcgccagcgccgtaggcgctcgctcggcagccgcggggccctaggccgtgccggggagggggcgagggcggcgcccaggcgcctgccgccccggaggcaggatgagcatcgagatcccggcgggactgacggagctgctgcagggcttcacggtggaggtgctgaggcaccagcccgcggacctgctggagttcgcgctgcagcacttcacccgcctgcagcaggagaacgagcgcaaaggcaccgcgcgcttcggccatgagggcaggacctggggggacctgggcgccgctgccgggggcggcacccccagcaagggggtcaacttcgccgaggagcccatgcagtccgactccgaggacggggaggaggaggaggcggcgcccgcggacgcaggggcgttcaatgctccagtaataaaccgattcacaaggcgtgcctcagtatgtgcagaagcttataatcctgatgaagaagaagatgatgcagagtccaggattatacatccaaaaactgatgatcaaagaaataggttgcaagaggcttgcaaagacatcctgctgtttaagaatctggatccggagcagatgtctcaagtattagatgccatgtttgaaaaattggtcaaagatggggagcatgtaattgatcaaggtgacgatggtgacaacttttatgtaattgatagaggcacatttgatatttatgtgaaatgtgatggtgttggaagatgtgttggtaactatgataatcgtgggagtttcggcgaactggccttaatgtacaatacacccagagcagctacaatcactgctacctctcctggtgctctgtggggtttggacagggtaaccttcaggagaataattgtgaaaaacaatgccaaaaagagaaaaatgtatgaaagctttattgagtcactgccattccttaaatctttggagttttctgaacgcctgaaagtagtagatgtgataggcaccaaagtatacaacgatggagaacaaatcattgctcagggagattcggctgattcttttttcattgtagaatctggagaagtgaaaattactatgaaaagaaagggtaaatcagaagtggaagagaatggtgcagtagaaatcgctcgatgctcgcggggacagtactttggagagcttgccctggtaactaacaaacctcgagcagcttctgcccacgccattgggactgtcaaatgtttagcaatggatgtgcaagcatttgaaaggcttctgggaccttgcatggaaattatgaaaaggaacatcgctacctatgaagaacagttagttgccctgtttggaacgaacatggatattgttgaacccactgcatgaagcaaaagtatggagcaagacctgtagtgacaaaattacacagtagtggttagtccactgagaatgtgtttgtgtagatgccaagcattttctgtgatttcaggttttttcctttttttacatttacaacgtatcaataaacagtagtgatttaatagtcaataggctttaacatcactttctaaagagtagttcataaaaaaatcaacatactgataaaatgactttgtactccacaaaattatgactgaaaggtttattaaaatgattgtaatatatagaaagtatctgtgtttaagaagataattaaaggatgttatcataggctatatgtgttttacttattcagactgataatcatattagtgactatccccatgtaagagggcacttggcaattaaacatgctacacagcatggcatcacttttttttataactcattaaacacagtaaaattttaatcatttttgttttaaagttttctagcttgataagttatgtgctggccttggcctattggtgaaatggtataaaatatcatatgcagttttaaaactttttatatttttgcaataaagtacattttgactttgttggcataatgtcagtaacatacatattccagtggttttatggacaggcaatttagtcattatgataataaggaaaacagtgttttagatgagagatcattaatgcatttttccctcatcaagcatatatctgcttttttttattttgcaattctctgtattctatgtctttaaaaatttgatcttgacatttaatgtcacaaagttttgtttttttaaaaagtgatttaaacttaagatccgacattttttgtattctttaagattttacacctaaaaaatctctcctatcccaaaaataatgtgggatccttatcagcatgcccacagtttatttctttgttcttcactaggcctgcataatacagtcctatgtagacatctgttcccttgggtttccgttctttcttaggatggttgccaacccacaatctcattgatcagcagccaatatgggtttgtttggtttttttaattcttaaaaacatcctctagaggaatagaaacaaatttttatgagcataaccctatataaagacaaaatgaatttctgaccttaccatatataccattaggccttgccattgctttaatgtagactcatagttgaaattagtgcagaaagaactcagatgtactagattttcattgttcattgatatgctcagtatgctgccacataagatgaatttaattatattcaaccaaagcaatatactcttacatgatttctaggccccatgacccagtgtctagagacattaattctaaccagttgtttgcttttaaatgagtgatttcattttgggaaacaggtttcaaatgaatatatatacatgggtaaaattactctgtgctagtgtagtcttactagagaatgtttatggtcccacttgtatatgaaaatgtggttagaatgttaattggataatgtatatataagaagttaaagtatgtaaagtataacttcagccacatttttagaacactgtttaacatttttgcaaaaccttcttgtaggaaaagagagctctctacatgaagatgacttgttttatatttcagattttattttaaaagccatgtctgttaaacaagaaaaaacacaaaagaactccagattcctggttcatcattctgtattcttactcactttttcaagttatctattttgttgcataaactaattgttaactattcatggaacagcaaacgcctgtttaataaagaactttgaccaaggctataaatgccacgtacattattttcagtattgttggttatatttaaattttccttacaataaagcacacttttataataaaatacatgaattattgtttttcatacttttttgcttgtttctttaaagttttctgacgtgcataatgcataattcattgaaaagcatgatagcaatgtggcatgtggaagcgaacccccagggcataacatagtaagaaagtatggttctgtatggcaataggtttttaaaattattagctattcatcatgtgtgggagaaataattgtggtgtgttgcagatttatttggccatttagaataaccaaatcaatctggctaactaggaatttatgtgtaaaattatctgattaaaacagctcaagtttga

SEQ ID NO: 170836 - DNA, 585 bp, Homo sapiens
  Payload ID: 13619
  Gene Symbol: PRKG1
  Gene Name: protein kinase, cGMP-dependent, type I
  ENST ID: ENST00000373976
  CDS Start-End: 1-546
agttgcatcatcaaagaaggagacgtggggtcactggtgtatgtcatggaagatggtaaggttgaagttacaaaagaaggtgtgaagttgtgtaccatgggtccaggaaaagtgtttggggaattggctattctttacaactgtacccggacagcgaccgtcaagactcttgtaaatgtaaaactctgggccattgatcgacaatgttttcaaacaataatgatgaggacaggactcatcaagcataccgagtatatggaatttttaaaaagcgttccaacattccagagccttcctgaagagatcctcagcaagcttgctgatgtccttgaagagacccactatgaaaatggagaatatattatcaggcaaggtgcaagaggggacaccttctttatcatcagcaaaggaacggtaaatgtcactcgtgaagactcaccgagtgaagacccagtctttcttagaactttaggaaaaggagactggtttggagagaaagccttgcagggctggacttggaatctgtttgaatacgttgtggaataaattccttaatttctaataaatcagtgttatattaattgg

SEQ ID NO: 170837 - DNA, 6928 bp, Homo sapiens
  Payload ID: 13619
  Gene Symbol: PRKG1
  Gene Name: protein kinase, cGMP-dependent, type I
  Uniprot ID: Q13976
  ENST ID: ENST00000373980
  CDS Start-End: 418-2478
gccccgcaagcttccttgggcgcccggcgcgagggactctgagagcccagccgctgcctcggagcccccattcacgtcccctcctcccgctcccccgccaccgcgcctccgactcttctcccccgcgccgcggcgcccaccgcgtctcaggtttaatcccgggttggacctgctggtttgctctccccgctctgagcctcacagccagcccagagaagtggaatctgcactgaaactctgggtggctggagccggcggactgggcatgctcagaagccagggctggctttggtctcaagtaggaagctttggcactcgggaggcagcggcgactttggggaaagttgatcggagaggggaggaagcctcaagacgcggagcagcggcaggaaggagcccccggcagcccggaggagcatgggcaccttgcgggatttacagtacgcgctccaggagaagatcgaggagctgaggcagcgggatgctctcatcgacgagctggagctggagttggatcagaaggacgaactgatccagaagctgcagaacgagctggacaagtaccgctcggtgatccgaccagccacccagcaggcgcagaagcagagcgcgagcaccttgcagggcgagccgcgcaccaagcggcaggcgatctccgccgagcccaccgccttcgacatccaggatctcagccatgtgaccctgcccttctaccccaagagcccacagtccaaggatcttataaaggaagctatccttgacaatgactttatgaagaacttggagctgtcgcagatccaggagattgtggattgtatgtacccggtggagtatggcaaggacagttgcatcatcaaagaaggagacgtggggtcactggtgtatgtcatggaagatggtaaggttgaagttacaaaagaaggtgtgaagttgtgtaccatgggtccaggaaaagtgtttggggaattggctattctttacaactgtacccggacagcgaccgtcaagactcttgtaaatgtaaaactctgggccattgatcgacaatgttttcaaacaataatgatgaggacaggactcatcaagcataccgagtatatggaatttttaaaaagcgttccaacattccagagccttcctgaagagatcctcagcaagcttgctgatgtccttgaagagacccactatgaaaatggagaatatattatcaggcaaggtgcaagaggggacaccttctttatcatcagcaaaggaacggtaaatgtcactcgtgaagactcaccgagtgaagacccagtctttcttagaactttaggaaaaggagactggtttggagagaaagccttgcagggggaagatgtgagaacagcaaacgtaattgctgcagaagctgtaacctgccttgtgattgacagagactcttttaaacatttgattggagggctggatgatgtttctaataaagcatatgaagatgcagaagctaaagcaaaatatgaagctgaagcggctttcttcgccaacctgaagctgtctgatttcaacatcattgatacccttggagttggaggtttcggacgagtagaactggtccagttgaaaagtgaagaatccaaaacgtttgcaatgaagattctcaagaaacgtcacattgtggacacaagacagcaggagcacatccgctcagagaagcagatcatgcagggggctcattccgatttcatagtgagactgtacagaacatttaaggacagcaaatatttgtatatgttgatggaagcttgtctaggtggagagctctggaccattctcagggatagaggttcgtttgaagattctacaaccagattttacacagcatgtgtggtagaagcttttgcctatctgcattccaaaggaatcatttacagggacctcaagccagaaaatctcatcctagatcaccgaggttatgccaaactggttgattttggctttgcaaagaaaataggatttggaaagaaaacatggactttttgtgggactccagagtatgtagccccagagatcatcctgaacaaaggccatgacatttcagccgactactggtcactgggaatcctaatgtatgaactcctgactggcagcccacctttctcaggcccagatcctatgaaaacctataacatcatattgagggggattgacatgatagaatttccaaagaagattgccaaaaatgctgctaatttaattaaaaaactatgcagggacaatccatcagaaagattagggaatttgaaaaatggagtaaaagacattcaaaagcacaaatggtttgagggctttaactgggaaggcttaagaaaaggtaccttgacacctcctataataccaagtgttgcatcacccacagacacaagtaattttgacagtttccctgaggacaacgatgaaccaccacctgatgacaactcaggatgggatatagacttctaatgtatttctcttacctgcttctgccttgctgaagacagctttttctgagacacagctgccagcaaacctgagggaaagagagaagattagtgctcggggtcaccatgatgcctttgatcgatgctgctccagtaactacagtggcattaggacttaccgcttagatgacaatagtgctctttacatgttttctgtttgaacctaaaatagcagttgacatggtggtcctgaagcaaagcctttcaccagtaaaagatgttttctattgttgcaatgaccttgctttgctctgattataatttgaaagactgtaggaaacacttcaatgtagtataagagtctgtaccttgctggaatattcaagaagatgaaagaataatatattgggtacaatagattactatggtacagaaactgggctattccctttcttcaagtgaaggctgtgggatctattactgcaggccggtgtatataccatacaaaagaggaccacacatctgttggtcacagagttcatgtcacaccagtgctagaagtttcatgattttatttcccagcagtgctgatgacaagactgaatgttaccttttctttctgacagattttaaaaattgatatgataaaagcacaactgctatagattctgctgagacctctcatagtaggtatatatgagttttcacagaagactgaaaaataatgcatgatatttgtttgttttttttgataaattggcatgacagagtggggaaaaaaagcaattcacaaaaccatttcatattttttaaaatattgtgcttaaagatggtcctggaagtaaatgactagcagccaattggttttacttaacataccctcaaactgaggcttaaagtattcccttttataaaaataaatgcttggggtagggtggagtggggagggattaaaacccatccaaaaaataaataaaaactatataggtgctatgtatatctttcatctgtaaatgtcagtgtctgaacagacaacacaaattcaaatcattatacgtgtagccagaaactcaagcattttcactaaagttattaaaccaaactcctgtccaatttcacttatacaacatagtcagtctagagttgagagacaaaggtaattataaacctatttgaactagcttcttgtcttaggcctgaaccaaaaaacaacaaacaaacaaaaaacaagaatgaaaaacagaaataaaagaagtagaaaagacaaagaaagaaagcccaaagtcaaagttgttaatatttacaggtttaccagatctggaacattacttatttgaggtcagagaacaaaacaagaacctggccaggtgttgattaccttttagtgaataagctgagtccatatacttgtctaactaagaaagcagtacagaggaaaacaggaacctgatttttttaaaataaattttaaataaaatagaattactacaattctgcaatttcatactacctaaaaaagactagatttgaaaatgtcaagctgatttactttattcacatggagaaaagaatccacaaattaaactgagtccttcactggcatgccagttgactattattagctgtcataagtaactcagccatttggaagcatttcctggacaaaattacattatacctgtgaagaaaaatatagaagctttcaagctgtcattctgttttggccctgtgtgaatttggtatattaaattgacgcttgctttttttttcagtagagttttctttttaatcaatcaaacgcctacatttctggaagaaaaagtccaattagatcattacaccttaactaagaaggcaaatcttataaattttgcttgaattgttcttactcaaaactaccttagaatatggtatcttatgaaaatataatattcttaaaattttggaggataaaatgaaaagggtataaacttcaattagaactttaatcctaaaatattgttattcttgtatttttggagttttccgtcccttacaatttctccaaattggtctattccccaagatatccactgttttctacagattttagaatataaaattaaacatatcaacctaaaatctagctatgaatgttatttcaagagttttatatttttaattggctttttaaaaatatgtaattccaatattatagtgaatgttcagtaacttttgttgaaagataatgtggtttaggcttgctaaagaaaggcttgctagaatactaaatttaccttgttatttggaaagagaatctgctcctataacgttttaaaaatccccaaagtcccagagattagcacttgctatggattttggaactatggttcaagtctaagacaaccaatatgaataagttcaatggagaaggaagaagtagcattcagcacaagaaactgtagattgtttctcccacttgttactgcatctttgttcatttcacccatagcattgcatttgatgtctgaagtaattaccacaaaataaaggtaaactacatcttccaagatgtaccaacagaaaacattcgtctaattttgtcaacattgaatttttaggatttaaatcttgtcttaatgaagactctagggctaaaattcatggtcagttccataaaatgcatctcactttatttctgaatttttcacaacccctctattttcttacattaaagaacatctggataagttagaatagtgccaacttgtttgatttgttatatgattttcttgttaatgtgttgagtatgggaaataagggctttctgtgtgtcttgactcacaggaaaactgaaactgccaagggaagcaacattaaaacaactgggatagattgaatacatttgaaaaaataatttctggaaaaacgctatacatgctttttatgtttatatcttctttcttattaagacatgaatcagatccatgtggcattcaaaacaaatttattttggttatattctttacaagtcataatttttacctaaaattgtggaatatgcatgtgaattacacatgtgtagtaataaactcaactattgaatttttcctgtttcatttctaaatgactgaactgatggtaaacaaatttaatgaagtcagctaccatgttgaaaataaggatattagaactgatttcatacaatagaggtgatctgtgcattatccataacaacgttttctttcactataggaccacagacaaatatttatgtaaataggtatttttgtgtgatattttgtggtacatataactttttttagtgtttcacagcattattatttcattttatttgtattgaataatgtttttaggtccaagtagacttgaattaatgtcataattgtcagtattattgaaaattatgtcaactgtactgttattcatctgtcccatagtttagaacatgacctggctatctggcattgttgcaagtgccttaaattcatggcatcctattaaaaaaacaaatttggtgttatgctgcatgacaaagacaaacacacctcaaaatgttgtcctttcttagcttgctgcgttttacagttctttctgctaacaatttataagcctttattatataatattgatgaattacagaaatgatgaagttgttctcttatttctgttaaatgtaccagagctgtgtatctgttaatgagatacagcgtcatttctgtgaaatgtataaatgtatgtgcaggtcaaattaatatatgacattctatcagtctgtatacaggtattcctgttttgctaagctgtgcagattctgtaaaaataaattagtgcagtcaagttctaacatatctcattttatagactccattgacaatggtccaaccgaaaagaaaaattggaaatgactgctaaccagacctcgttatgaaaccaatgatgaaaaagtcacttggtgcacctctcaacaaaacaggatgctttttccgagttcttgtatatgcaaatcatttacgaggcaagttttcaacagacctagaaagcaaaacattgaaagtgtgttgttagccctcctctctgcccctgaatcaacagacagagctctgggaccttggcaatgactcagaggttggggctttctgagtaaagggacatttctttaagcatcatctatcaaatttatttcaatgtatgatgtttttacaactggtcagttcttttgtattcttacagctatggttatttgattgtcctcttacaatttgttctacatgaaagagttctttgttagtcagaatgcaacaaactgtcatcaaatggtcattgaccacttgcactcttttgatgtagattaaaaactttttcataaatttacctgctttgatttgctctgtatttttcctgcagctgtaattgctgagtgcctgttgtatactttatagagttgaaataaaaaaataattacttttgaa

SEQ ID NO: 170838 - DNA, 6487 bp, Homo sapiens
  Payload ID: 13619
  Gene Symbol: PRKG1
  Gene Name: protein kinase, cGMP-dependent, type I
  Uniprot ID: Q13976
  ENST ID: ENST00000373985
  CDS Start-End: 22-2037
gcggaggggctcagtgaaaaaatgagcgagctagaggaagactttgccaagattctcatgctcaaggaggagaggatcaaagagctggagaagcggctgtcagagaaggaggaagaaattcaggagctgaagaggaaactccacaaatgccagtcggtgctcccagtgccctcgacccacatcggcccccggaccacccgggcgcagggcatctcggccgagccgcagacgtacaggtccttccacgacctccgacaggcattccggaagttcaccaagtccgaaaggtccaaggatcttataaaggaagctatccttgacaatgactttatgaagaacttggagctgtcgcagatccaggagattgtggattgtatgtacccggtggagtatggcaaggacagttgcatcatcaaagaaggagacgtggggtcactggtgtatgtcatggaagatggtaaggttgaagttacaaaagaaggtgtgaagttgtgtaccatgggtccaggaaaagtgtttggggaattggctattctttacaactgtacccggacagcgaccgtcaagactcttgtaaatgtaaaactctgggccattgatcgacaatgttttcaaacaataatgatgaggacaggactcatcaagcataccgagtatatggaatttttaaaaagcgttccaacattccagagccttcctgaagagatcctcagcaagcttgctgatgtccttgaagagacccactatgaaaatggagaatatattatcaggcaaggtgcaagaggggacaccttctttatcatcagcaaaggaacggtaaatgtcactcgtgaagactcaccgagtgaagacccagtctttcttagaactttaggaaaaggagactggtttggagagaaagccttgcagggggaagatgtgagaacagcaaacgtaattgctgcagaagctgtaacctgccttgtgattgacagagactcttttaaacatttgattggagggctggatgatgtttctaataaagcatatgaagatgcagaagctaaagcaaaatatgaagctgaagcggctttcttcgccaacctgaagctgtctgatttcaacatcattgatacccttggagttggaggtttcggacgagtagaactggtccagttgaaaagtgaagaatccaaaacgtttgcaatgaagattctcaagaaacgtcacattgtggacacaagacagcaggagcacatccgctcagagaagcagatcatgcagggggctcattccgatttcatagtgagactgtacagaacatttaaggacagcaaatatttgtatatgttgatggaagcttgtctaggtggagagctctggaccattctcagggatagaggttcgtttgaagattctacaaccagattttacacagcatgtgtggtagaagcttttgcctatctgcattccaaaggaatcatttacagggacctcaagccagaaaatctcatcctagatcaccgaggttatgccaaactggttgattttggctttgcaaagaaaataggatttggaaagaaaacatggactttttgtgggactccagagtatgtagccccagagatcatcctgaacaaaggccatgacatttcagccgactactggtcactgggaatcctaatgtatgaactcctgactggcagcccacctttctcaggcccagatcctatgaaaacctataacatcatattgagggggattgacatgatagaatttccaaagaagattgccaaaaatgctgctaatttaattaaaaaactatgcagggacaatccatcagaaagattagggaatttgaaaaatggagtaaaagacattcaaaagcacaaatggtttgagggctttaactgggaaggcttaagaaaaggtaccttgacacctcctataataccaagtgttgcatcacccacagacacaagtaattttgacagtttccctgaggacaacgatgaaccaccacctgatgacaactcaggatgggatatagacttctaatgtatttctcttacctgcttctgccttgctgaagacagctttttctgagacacagctgccagcaaacctgagggaaagagagaagattagtgctcggggtcaccatgatgcctttgatcgatgctgctccagtaactacagtggcattaggacttaccgcttagatgacaatagtgctctttacatgttttctgtttgaacctaaaatagcagttgacatggtggtcctgaagcaaagcctttcaccagtaaaagatgttttctattgttgcaatgaccttgctttgctctgattataatttgaaagactgtaggaaacacttcaatgtagtataagagtctgtaccttgctggaatattcaagaagatgaaagaataatatattgggtacaatagattactatggtacagaaactgggctattccctttcttcaagtgaaggctgtgggatctattactgcaggccggtgtatataccatacaaaagaggaccacacatctgttggtcacagagttcatgtcacaccagtgctagaagtttcatgattttatttcccagcagtgctgatgacaagactgaatgttaccttttctttctgacagattttaaaaattgatatgataaaagcacaactgctatagattctgctgagacctctcatagtaggtatatatgagttttcacagaagactgaaaaataatgcatgatatttgtttgttttttttgataaattggcatgacagagtggggaaaaaaagcaattcacaaaaccatttcatattttttaaaatattgtgcttaaagatggtcctggaagtaaatgactagcagccaattggttttacttaacataccctcaaactgaggcttaaagtattcccttttataaaaataaatgcttggggtagggtggagtggggagggattaaaacccatccaaaaaataaataaaaactatataggtgctatgtatatctttcatctgtaaatgtcagtgtctgaacagacaacacaaattcaaatcattatacgtgtagccagaaactcaagcattttcactaaagttattaaaccaaactcctgtccaatttcacttatacaacatagtcagtctagagttgagagacaaaggtaattataaacctatttgaactagcttcttgtcttaggcctgaaccaaaaaacaacaaacaaacaaaaaacaagaatgaaaaacagaaataaaagaagtagaaaagacaaagaaagaaagcccaaagtcaaagttgttaatatttacaggtttaccagatctggaacattacttatttgaggtcagagaacaaaacaagaacctggccaggtgttgattaccttttagtgaataagctgagtccatatacttgtctaactaagaaagcagtacagaggaaaacaggaacctgatttttttaaaataaattttaaataaaatagaattactacaattctgcaatttcatactacctaaaaaagactagatttgaaaatgtcaagctgatttactttattcacatggagaaaagaatccacaaattaaactgagtccttcactggcatgccagttgactattattagctgtcataagtaactcagccatttggaagcatttcctggacaaaattacattatacctgtgaagaaaaatatagaagctttcaagctgtcattctgttttggccctgtgtgaatttggtatattaaattgacgcttgctttttttttcagtagagttttctttttaatcaatcaaacgcctacatttctggaagaaaaagtccaattagatcattacaccttaactaagaaggcaaatcttataaattttgcttgaattgttcttactcaaaactaccttagaatatggtatcttatgaaaatataatattcttaaaattttggaggataaaatgaaaagggtataaacttcaattagaactttaatcctaaaatattgttattcttgtatttttggagttttccgtcccttacaatttctccaaattggtctattccccaagatatccactgttttctacagattttagaatataaaattaaacatatcaacctaaaatctagctatgaatgttatttcaagagttttatatttttaattggctttttaaaaatatgtaattccaatattatagtgaatgttcagtaacttttgttgaaagataatgtggtttaggcttgctaaagaaaggcttgctagaatactaaatttaccttgttatttggaaagagaatctgctcctataacgttttaaaaatccccaaagtcccagagattagcacttgctatggattttggaactatggttcaagtctaagacaaccaatatgaataagttcaatggagaaggaagaagtagcattcagcacaagaaactgtagattgtttctcccacttgttactgcatctttgttcatttcacccatagcattgcatttgatgtctgaagtaattaccacaaaataaaggtaaactacatcttccaagatgtaccaacagaaaacattcgtctaattttgtcaacattgaatttttaggatttaaatcttgtcttaatgaagactctagggctaaaattcatggtcagttccataaaatgcatctcactttatttctgaatttttcacaacccctctattttcttacattaaagaacatctggataagttagaatagtgccaacttgtttgatttgttatatgattttcttgttaatgtgttgagtatgggaaataagggctttctgtgtgtcttgactcacaggaaaactgaaactgccaagggaagcaacattaaaacaactgggatagattgaatacatttgaaaaaataatttctggaaaaacgctatacatgctttttatgtttatatcttctttcttattaagacatgaatcagatccatgtggcattcaaaacaaatttattttggttatattctttacaagtcataatttttacctaaaattgtggaatatgcatgtgaattacacatgtgtagtaataaactcaactattgaatttttcctgtttcatttctaaatgactgaactgatggtaaacaaatttaatgaagtcagctaccatgttgaaaataaggatattagaactgatttcatacaatagaggtgatctgtgcattatccataacaacgttttctttcactataggaccacagacaaatatttatgtaaataggtatttttgtgtgatattttgtggtacatataactttttttagtgtttcacagcattattatttcattttatttgtattgaataatgtttttaggtccaagtagacttgaattaatgtcataattgtcagtattattgaaaattatgtcaactgtactgttattcatctgtcccatagtttagaacatgacctggctatctggcattgttgcaagtgccttaaattcatggcatcctattaaaaaaacaaatttggtgttatgctgcatgacaaagacaaacacacctcaaaatgttgtcctttcttagcttgctgcgttttacagttctttctgctaacaatttataagcctttattatataatattgatgaattacagaaatgatgaagttgttctcttatttctgttaaatgtaccagagctgtgtatctgttaatgagatacagcgtcatttctgtgaaatgtataaatgtatgtgcaggtcaaattaatatatgacattctatcagtctgtatacaggtattcctgttttgctaagctgtgcagattctgtaaaaataaattagtgcagtcaagttctaacatatctcattttatagactccattgacaatggtccaaccgaaaagaaaaattggaaatgactgctaaccagacctcgttatgaaaccaatgatgaaaaagtcacttggtgcacctctcaacaaaacaggatgctttttccgagttcttgtatatgcaaatcatttacgaggcaagttttcaacagacctagaaagcaaaacattgaaagtgtgttgttagccctcctctctgcccctgaatcaacagacagagctctgggaccttggcaatgactcagaggttggggctttctgagtaaagggacatttctttaagcatcatctatcaaatttatttcaatgtatgatgtttttacaactggtcagttcttttgtattcttacagctatggttatttgattgtcctcttacaatttgttctacatgaaagagttctttgttagtcagaatgcaacaaactgtcatcaaatggtcattgaccacttgcactcttttgatgtagattaaaaactttttcataaatttacctgctttgatttgctctgtatttttcctgcagctgtaattgctgagtgcctgttgtatactttatagagttgaaataaaaaaataattacttttgaa

SEQ ID NO: 170839 - DNA, 5922 bp, Homo sapiens
  Payload ID: 13619
  Gene Symbol: PRKG1
  Gene Name: protein kinase, cGMP-dependent, type I
  ENST ID: ENST00000401604
  CDS Start-End: 95-1474
tccagctcttgtaaatgtaaaactctgggccattgatcgacaatgttttcaaacaataatgatgaggacaggactcatcaagcataccgagtatatggaatttttaaaaagcgttccaacattccagagccttcctgaagagatcctcagcaagcttgctgatgtccttgaagagacccactatgaaaatggagaatatattatcaggcaaggtgcaagaggggacaccttctttatcatcagcaaaggaacggtaaatgtcactcgtgaagactcaccgagtgaagacccagtctttcttagaactttaggaaaaggagactggtttggagagaaagccttgcagggggaagatgtgagaacagcaaacgtaattgctgcagaagctgtaacctgccttgtgattgacagagactcttttaaacatttgattggagggctggatgatgtttctaataaagcatatgaagatgcagaagctaaagcaaaatatgaagctgaagcggctttcttcgccaacctgaagctgtctgatttcaacatcattgatacccttggagttggaggtttcggacgagtagaactggtccagttgaaaagtgaagaatccaaaacgtttgcaatgaagattctcaagaaacgtcacattgtggacacaagacagcaggagcacatccgctcagagaagcagatcatgcagggggctcattccgatttcatagtgagactgtacagaacatttaaggacagcaaatatttgtatatgttgatggaagcttgtctaggtggagagctctggaccattctcagggatagaggttcgtttgaagattctacaaccagattttacacagcatgtgtggtagaagcttttgcctatctgcattccaaaggaatcatttacagggacctcaagccagaaaatctcatcctagatcaccgaggttatgccaaactggttgattttggctttgcaaagaaaataggatttggaaagaaaacatggactttttgtgggactccagagtatgtagccccagagatcatcctgaacaaaggccatgacatttcagccgactactggtcactgggaatcctaatgtatgaactcctgactggcagcccacctttctcaggcccagatcctatgaaaacctataacatcatattgagggggattgacatgatagaatttccaaagaagattgccaaaaatgctgctaatttaattaaaaaactatgcagggacaatccatcagaaagattagggaatttgaaaaatggagtaaaagacattcaaaagcacaaatggtttgagggctttaactgggaaggcttaagaaaaggtaccttgacacctcctataataccaagtgttgcatcacccacagacacaagtaattttgacagtttccctgaggacaacgatgaaccaccacctgatgacaactcaggatgggatatagacttctaatgtatttctcttacctgcttctgccttgctgaagacagctttttctgagacacagctgccagcaaacctgagggaaagagagaagattagtgctcggggtcaccatgatgcctttgatcgatgctgctccagtaactacagtggcattaggacttaccgcttagatgacaatagtgctctttacatgttttctgtttgaacctaaaatagcagttgacatggtggtcctgaagcaaagcctttcaccagtaaaagatgttttctattgttgcaatgaccttgctttgctctgattataatttgaaagactgtaggaaacacttcaatgtagtataagagtctgtaccttgctggaatattcaagaagatgaaagaataatatattgggtacaatagattactatggtacagaaactgggctattccctttcttcaagtgaaggctgtgggatctattactgcaggccggtgtatataccatacaaaagaggaccacacatctgttggtcacagagttcatgtcacaccagtgctagaagtttcatgattttatttcccagcagtgctgatgacaagactgaatgttaccttttctttctgacagattttaaaaattgatatgataaaagcacaactgctatagattctgctgagacctctcatagtaggtatatatgagttttcacagaagactgaaaaataatgcatgatatttgtttgttttttttgataaattggcatgacagagtggggaaaaaaagcaattcacaaaaccatttcatattttttaaaatattgtgcttaaagatggtcctggaagtaaatgactagcagccaattggttttacttaacataccctcaaactgaggcttaaagtattcccttttataaaaataaatgcttggggtagggtggagtggggagggattaaaacccatccaaaaaataaataaaaactatataggtgctatgtatatctttcatctgtaaatgtcagtgtctgaacagacaacacaaattcaaatcattatacgtgtagccagaaactcaagcattttcactaaagttattaaaccaaactcctgtccaatttcacttatacaacatagtcagtctagagttgagagacaaaggtaattataaacctatttgaactagcttcttgtcttaggcctgaaccaaaaaacaacaaacaaacaaaaaacaagaatgaaaaacagaaataaaagaagtagaaaagacaaagaaagaaagcccaaagtcaaagttgttaatatttacaggtttaccagatctggaacattacttatttgaggtcagagaacaaaacaagaacctggccaggtgttgattaccttttagtgaataagctgagtccatatacttgtctaactaagaaagcagtacagaggaaaacaggaacctgatttttttaaaataaattttaaataaaatagaattactacaattctgcaatttcatactacctaaaaaagactagatttgaaaatgtcaagctgatttactttattcacatggagaaaagaatccacaaattaaactgagtccttcactggcatgccagttgactattattagctgtcataagtaactcagccatttggaagcatttcctggacaaaattacattatacctgtgaagaaaaatatagaagctttcaagctgtcattctgttttggccctgtgtgaatttggtatattaaattgacgcttgctttttttttcagtagagttttctttttaatcaatcaaacgcctacatttctggaagaaaaagtccaattagatcattacaccttaactaagaaggcaaatcttataaattttgcttgaattgttcttactcaaaactaccttagaatatggtatcttatgaaaatataatattcttaaaattttggaggataaaatgaaaagggtataaacttcaattagaactttaatcctaaaatattgttattcttgtatttttggagttttccgtcccttacaatttctccaaattggtctattccccaagatatccactgttttctacagattttagaatataaaattaaacatatcaacctaaaatctagctatgaatgttatttcaagagttttatatttttaattggctttttaaaaatatgtaattccaatattatagtgaatgttcagtaacttttgttgaaagataatgtggtttaggcttgctaaagaaaggcttgctagaatactaaatttaccttgttatttggaaagagaatctgctcctataacgttttaaaaatccccaaagtcccagagattagcacttgctatggattttggaactatggttcaagtctaagacaaccaatatgaataagttcaatggagaaggaagaagtagcattcagcacaagaaactgtagattgtttctcccacttgttactgcatctttgttcatttcacccatagcattgcatttgatgtctgaagtaattaccacaaaataaaggtaaactacatcttccaagatgtaccaacagaaaacattcgtctaattttgtcaacattgaatttttaggatttaaatcttgtcttaatgaagactctagggctaaaattcatggtcagttccataaaatgcatctcactttatttctgaatttttcacaacccctctattttcttacattaaagaacatctggataagttagaatagtgccaacttgtttgatttgttatatgattttcttgttaatgtgttgagtatgggaaataagggctttctgtgtgtcttgactcacaggaaaactgaaactgccaagggaagcaacattaaaacaactgggatagattgaatacatttgaaaaaataatttctggaaaaacgctatacatgctttttatgtttatatcttctttcttattaagacatgaatcagatccatgtggcattcaaaacaaatttattttggttatattctttacaagtcataatttttacctaaaattgtggaatatgcatgtgaattacacatgtgtagtaataaactcaactattgaatttttcctgtttcatttctaaatgactgaactgatggtaaacaaatttaatgaagtcagctaccatgttgaaaataaggatattagaactgatttcatacaatagaggtgatctgtgcattatccataacaacgttttctttcactataggaccacagacaaatatttatgtaaataggtatttttgtgtgatattttgtggtacatataactttttttagtgtttcacagcattattatttcattttatttgtattgaataatgtttttaggtccaagtagacttgaattaatgtcataattgtcagtattattgaaaattatgtcaactgtactgttattcatctgtcccatagtttagaacatgacctggctatctggcattgttgcaagtgccttaaattcatggcatcctattaaaaaaacaaatttggtgttatgctgcatgacaaagacaaacacacctcaaaatgttgtcctttcttagcttgctgcgttttacagttctttctgctaacaatttataagcctttattatataatattgatgaattacagaaatgatgaagttgttctcttatttctgttaaatgtaccagagctgtgtatctgttaatgagatacagcgtcatttctgtgaaatgtataaatgtatgtgcaggtcaaattaatatatgacattctatcagtctgtatacaggtattcctgttttgctaagctgtgcagattctgtaaaaataaattagtgcagtcaagttctaacatatctcattttatagactccattgacaatggtccaaccgaaaagaaaaattggaaatgactgctaaccagacctcgttatgaaaccaatgatgaaaaagtcacttggtgcacctctcaacaaaacaggatgctttttccgagttcttgtatatgcaaatcatttacgaggcaagttttcaacagacctagaaagcaaaacattgaaagtgtgttgttagccctcctctctgcccctgaatcaacagacagagctctgggaccttggcaatgactcagaggttggggctttctgagtaaagggacatttctttaagcatcatctatcaaatttatttcaatgtatgatgtttttacaactggtcagttcttttgtattcttacagctatggttatttgattgtcctcttacaatttgttctacatgaaagagttctttgttagtcagaatgcaacaaactgtcatcaaatggtcattgaccacttgcactcttttgatgtagattaaaaactttttcataaatttacctgctttgatttgctctgtatttttcctgcagctgtaattgctgagtgcctgttgtatactttatagagttgaaataaaaaaataattacttttg

SEQ ID NO: 170840 - DNA, 4822 bp, Homo sapiens
  Payload ID: 13620
  Gene Symbol: PRKG2
  Gene Name: protein kinase, cGMP-dependent, type II
  Uniprot ID: Q13237
  ENST ID: ENST00000264399
  CDS Start-End: 196-2484
gagccggcagccccgggcccacgctgcgcaccgtgtgcacggcggggctggctgagctgacctgcgctgggctccggcgccgcaggcggctggggagggcggcgtgggagaggacgctgagacgcaggggcggccgcgccgaggtgacaagctgcgcacctggaaagttacccggctgtctggtccctgagcaaaatgggaaatggttcagtgaaacctaaacattctaagcacccagatggacactctgggaacctcaccactgatgctctgcggaacaaggtgacagagctggagagagagttgaggaggaaggatgctgagatccaggagcgggagtaccatttgaaggagctgcgggagcagctgtcgaagcagactgtggccattgctgaactcacagaggagctccagaacaagtgcatccagctgaacaagctgcaggatgtggtgcatatgcagggaggaagcccgcttcaggcctctccagataaagtgcctcttgaggtccaccggaagacctctggattggtctctctccatagcaggaggggagcaaaggctggcgtgtctgctgagccaacaacccggacctatgacctgaacaaaccccctgaattttcctttgagaaagcaagagtcagaaaagactccagtgagaagaagctcattacagatgcccttaataaaaatcagtttctgaaaagactggatcctcagcagatcaaagacatggtggaatgcatgtatgggagaaactatcagcaagggagttacattattaagcaaggagaaccaggaaaccatatctttgtgctggcagagggtcgactagaggtgttccaaggggagaaattgctgtcctccatccctatgtggaccacatttggggagcttgccattttatacaattgtacaaggactgcctctgtgaaagctattaccaatgttaaaacatgggcactagatcgagaggtattccagaatataatgaggaggacagcccaagctagagatgaacaatacagaaacttcctcagaagtgtatccttgctgaagaatttacctgaagataaattaaccaagatcattgactgcttggaagtggaatactatgacaaaggagattacatcattagagagggcgaggaaggaagtacctttttcattttggcaaaaggaaaggtaaaagtaacacagagcacagaaggccatgatcaaccacagctgataaaaacactgcagaaaggagaatactttggagaaaaagctcttatcagtgatgatgtcaggtcagctaacattattgctgaagaaaatgatgttgcatgcctggttatagatcgagaaacattcaaccaaactgtcggtacatttgaagagctgcaaaaataccttgaaggatatgtggcaaacctgaaccgtgatgatgaaaaaagacatgcgaagcggtccatgtctaactggaagctgtccaaagcactctctctggaaatgattcagctgaaggagaaggtggccagattttcctcatcatccccattccagaaccttgagattattgcaacactgggcgttggtgggttcggaagagttgagcttgttaaagtaaaaaatgagaatgttgcttttgctatgaagtgtataaggaagaagcacatagttgacaccaagcagcaggagcatgtctactcagagaagaggatcctagaggagctgtgctctccattcattgtgaaattatatcgtactttcaaggacaataagtatgtatacatgcttctggaggcctgcttaggtggggagctctggagtatattaagggacagaggcagctttgatgaacccacctccaaattctgcgttgcttgtgtgacagaagcatttgattacctgcatcgactaggtattatctacagagacttgaaaccagaaaacttaattctagatgctgagggttaccttaaattggttgactttggatttgcgaagaaaatagggtctggacagaaaacatggacattctgtgggactccagaatatgtagctcctgaagtcattctcaacaagggacatgacttcagtgtggatttctggtcactgggaattctagtgtatgagctcctaacgggcaacccacccttttctggggttgaccaaatgatgacctacaatttgattctcaaaggaattgaaaaaatggattttcccaggaagataacacgacgacctgaggatttgattcggaggctttgcaggcaaaatccaacagaaaggctgggaaatctgaagaatggaataaatgacattaagaaacacaggtggttaaatggttttaattgggagggactgaaagcacggagccttccatcacctttgcaaagagagctcaagggacccatagatcacagctactttgacaaatatcctcctgaaaagggaatgcctccagatgagctatcaggctgggataaagacttctgacagaagaaaagttgattactgcctgtactctacagaagaggacctcaaggatcaataatccaacacattattttcttttcagagtattataatatctttggaagaccattagggaaaagaaattcctgcacaatgggaagaggagaatggtgtggatatggttctgagttatagtgtcttatttagatgctgtgaattattgatgtattacattatttgcttttctcaactgctagaggctaccccattttcctttccacaatcagagccatttttgttaaagtggcagttttttctgcaatctattgttccattccaatcatatccttctcgtttgagtactactaacgtttaaaaagggtcttgcccttgaataactaagtcatacaaatagaaggaaaaacaatggtgaattttggagagctccccagctctcagcaacttcatataagcatggtggtatcttaaaatggtggtttgcagaaaccatggtagccaacagaacctcctgactttcacctgcttttaacctgaaaatatattaatacgcctctgacatgagtccagggagaggcaagattgagcaatagtcagtggcaccatttcctaaagtaactgaatcaatcaatccagtcaggtaattattttctattggggaacttagaaaaaaaagtaaagcaagaaatattttctctcctttatgatcagtgataccttagagacttttcgaaagtccttgttaaagatagttacaatgtgtggttaaatgatgctaaaatattttcacaaccagagtagaaaacgtgctggaacaaaattgcgaaggcttttgcctcccagtaaatagaaaggaaaatatattctagtaggtaagactgctgactctttgaaaatctgaggtattttgaaaaattctgtgatagttgctattaataaaccaaaattgtatagaatcatcgttaatttttaatataaatcccattgacaaatgttgatgcactgtagtcactgctgagttaatagcgctttttaaagacatctgagtcatggatgtgtttataaatttagattgttaagacaggcaagccaccagaaaagtgataggatttcagaagtaaaagggacaacagcatccctcctatcccttccttgcactctcccaaataataagtaggatagtttcaatagcatgggacctagtacctaagaacttcactggtgaatggttgtatgtattgaccatgatcattcccttaccctccttccaaaatgaatgagaagcagagacttttctgtattttttaaatctagcagagtaaaaatactgtataagttccgggattattcaagcttctggttatattttcatatgttaatgttctatgtcaaaaggaacctctacccagtccccactcataatttcatcatccagaaaaaagccagctatatgcttccttaatgagttaagctagataagtgaagcccaatccagaaaggtgcatccttaacaaattagatttccacatttataatccttttgctgaaccaaagagtttttgtttcctggagctgtatttttaaagattatgtattgtacatagaataatcatttttaataggattgacataacctgcttaaagaatttctaagagtttttaaagatttttatttgaatttggttggtttgtactgtatgtttttccatgtatatatttttaaatttccaacctataaagatagaaaatttatgtattgggtggatattagaactatacagttataataggaatgatattctcaaagcagatcaatagttgtaatttttaaaaccctacatatatagaaataaccaagttagagtactacaggtttatttttcctgtgattgaccatgtcaatgtgttatcctcccatgtgattttttattgtttccttagagtactttaaaagatgaagaaatgagagactgaaccattgaataatcccaactccaccatttcctaactgagtgactctgggaaagtgatttagcttttttgagtactagctttctcattcatagaaaaaggcagagtaaagtaatatttacttagaggtttgtttcagggattaagttatgtagagagtcttttgcccggtatctgtgaaataaccattgctgcatagacgggagctactgttactgtctctattaaaattaaaggggccttaataaccatttagtcctgaatcttatgtatcattggtatctgtatgcagaattgtacttatcaaatccagtatctgtcttttttttcttttaaatcatgaagtaaaaatgattgaccaaaaacttcg

SEQ ID NO: 170841 - DNA, 3431 bp, Homo sapiens
  Payload ID: 13620
  Gene Symbol: PRKG2
  Gene Name: protein kinase, cGMP-dependent, type II
  Uniprot ID: Q13237
  ENST ID: ENST00000395578
  CDS Start-End: 118-2406
aggcggctggggagggcggcgtgggagaggacgctgagacgcaggggcggccgcgccgaggtgacaagctgcgcacctggaaagttacccggctgtctggtgaggtccctgagcaaaatgggaaatggttcagtgaaacctaaacattctaagcacccagatggacactctgggaacctcaccactgatgctctgcggaacaaggtgacagagctggagagagagttgaggaggaaggatgctgagatccaggagcgggagtaccatttgaaggagctgcgggagcagctgtcgaagcagactgtggccattgctgaactcacagaggagctccagaacaagtgcatccagctgaacaagctgcaggatgtggtgcatatgcagggaggaagcccgcttcaggcctctccagataaagtgcctcttgaggtccaccggaagacctctggattggtctctctccatagcaggaggggagcaaaggctggcgtgtctgctgagccaacaacccggacctatgacctgaacaaaccccctgaattttcctttgagaaagcaagagtcagaaaagactccagtgagaagaagctcattacagatgcccttaataaaaatcagtttctgaaaagactggatcctcagcagatcaaagacatggtggaatgcatgtatgggagaaactatcagcaagggagttacattattaagcaaggagaaccaggaaaccatatctttgtgctggcagagggtcgactagaggtgttccaaggggagaaattgctgtcctccatccctatgtggaccacatttggggagcttgccattttatacaattgtacaaggactgcctctgtgaaagctattaccaatgttaaaacatgggcactagatcgagaggtattccagaatataatgaggaggacagcccaagctagagatgaacaatacagaaacttcctcagaagtgtatccttgctgaagaatttacctgaagataaattaaccaagatcattgactgcttggaagtggaatactatgacaaaggagattacatcattagagagggcgaggaaggaagtacctttttcattttggcaaaaggaaaggtaaaagtaacacagagcacagaaggccatgatcaaccacagctgataaaaacactgcagaaaggagaatactttggagaaaaagctcttatcagtgatgatgtcaggtcagctaacattattgctgaagaaaatgatgttgcatgcctggttatagatcgagaaacattcaaccaaactgtcggtacatttgaagagctgcaaaaataccttgaaggatatgtggcaaacctgaaccgtgatgatgaaaaaagacatgcgaagcggtccatgtctaactggaagctgtccaaagcactctctctggaaatgattcagctgaaggagaaggtggccagattttcctcatcatccccattccagaaccttgagattattgcaacactgggcgttggtgggttcggaagagttgagcttgttaaagtaaaaaatgagaatgttgcttttgctatgaagtgtataaggaagaagcacatagttgacaccaagcagcaggagcatgtctactcagagaagaggatcctagaggagctgtgctctccattcattgtgaaattatatcgtactttcaaggacaataagtatgtatacatgcttctggaggcctgcttaggtggggagctctggagtatattaagggacagaggcagctttgatgaacccacctccaaattctgcgttgcttgtgtgacagaagcatttgattacctgcatcgactaggtattatctacagagacttgaaaccagaaaacttaattctagatgctgagggttaccttaaattggttgactttggatttgcgaagaaaatagggtctggacagaaaacatggacattctgtgggactccagaatatgtagctcctgaagtcattctcaacaagggacatgacttcagtgtggatttctggtcactgggaattctagtgtatgagctcctaacgggcaacccacccttttctggggttgaccaaatgatgacctacaatttgattctcaaaggaattgaaaaaatggattttcccaggaagataacacgacgacctgaggatttgattcggaggctttgcaggcaaaatccaacagaaaggctgggaaatctgaagaatggaataaatgacattaagaaacacaggtggttaaatggttttaattgggagggactgaaagcacggagccttccatcacctttgcaaagagagctcaagggacccatagatcacagctactttgacaaatatcctcctgaaaagggaatgcctccagatgagctatcaggctgggataaagacttctgacagaagaaaagttgattactgcctgtactctacagaagaggacctcaaggatcaataatccaacacattattttcttttcagagtattataatatctttggaagaccattagggaaaagaaattcctgcacaatgggaagaggagaatggtgtggatatggttctgagttatagtgtcttatttagatgctgtgaattattgatgtattacattatttgcttttctcaactgctagaggctaccccattttcctttccacaatcagagccatttttgttaaagtggcagttttttctgcaatctattgttccattccaatcatatccttctcgtttgagtactactaacgtttaaaaagggtcttgcccttgaataactaagtcatacaaatagaaggaaaaacaatggtgaattttggagagctccccagctctcagcaacttcatataagcatggtggtatcttaaaatggtggtttgcagaaaccatggtagccaacagaacctcctgactttcacctgcttttaacctgaaaatatattaatacgcctctgacatgagtccagggagaggcaagattgagcaatagtcagtggcaccatttcctaaagtaactgaatcaatcaatccagtcaggtaattattttctattggggaacttagaaaaaaaagtaaagcaagaaatattttctctcctttatgatcagtgataccttagagacttttcgaaagtccttgttaaagatagttacaatgtgtggttaaatgatgctaaaatattttcacaaccagagtagaaaacgtgctggaacaaaattgcgaaggcttttgcctcccagtaaatagaaaggaaaatatattctagtaggtaagactgctgactctttgaaaatctgaggtattttgaaaaattctgtgatagttgctattaataaaccaaaattgtatagaatcatcgttaatttttaatataaatcccattgacaaatgttgatgcactgtagtcactgctgagttaatagcg

SEQ ID NO: 170842 - DNA, 3852 bp, Homo sapiens
  Payload ID: 13620
  Gene Symbol: PRKG2
  Gene Name: protein kinase, cGMP-dependent, type II
  ENST ID: ENST00000545647
  CDS Start-End: 486-1514
catcccaacaggaatactatgacaaaggagattacatcattagagagggcgaggaaggaagtacctttttcattttggcaaaaggaaaggtcctccactttggacagataaaggagcttctaccagtagagtcccatgcaattctgtttgaacactggctttggagtggaggccacaggaccccctaagaaataataacttcttagtgatgttatgtaaaagtaacacagagcacagaaggccatgatcaaccacagctgataaaaacactgcagaaaggagaatactttggagaaaaagctcttatcagtgatgatgtcaggtcagctaacattattgctgaagaaaatgatgttgcatgcctggttatagatcgagaaacattcaaccaaactgtcggtacatttgaagagctgcaaaaataccttgaaggatatgtggcaaacctgaaccgtgatgatgaaaaaagacatgcgaagcggtccatgtctaactggaagctgtccaaagcactctctctggaaatgattcagctgaaggagaaggtggccagattttcctcatcatccccattccagaaccttgagattattgcaacactgggcgttggtgggttcggaagagttgagcttgttaaagtaaaaaatgagaatgttgcttttgctatgaagtgtataaggaagaagcacatagttgacaccaagcagcaggagcatgtctactcagagaagaggatcctagaggagctgtgctctccattcattgtgaaattatatcgtactttcaaggacaataagtatgtatacatgcttctggaggcctgcttaggtggggagctctggagtatattaagggacagaggcagctttgatgaacccacctccaaattctgcgttgcttgtgtgacagaagcatttgattacctgcatcgactaggtattatctacagagacttgaaaccagaaaacttaattctagatgctgagggttaccttaaattggttgactttggatttgcgaagaaaatagggtctggacagaaaacatggacattctgtgggactccagaatatgtagctcctgaagtcattctcaacaagggacatgacttcagtgtggatttctggtcactgggaattctagtgtatgagctcctaacgggcaacccacccttttctggggttgaccaaatgatgacctacaatttgattctcaaaggaattgaaaaaatggattttcccaggaagataacacgacgacctgaggatttgattcggaggctttgcaggcaaaatccaacagaaaggctgggaaatctgaagaatggaataaatgacattaagaaacacaggtggttaaatggttttaattgggagggactgaaagcacggagccttccatcacctttgcaaagagagctcaagggacccatagatcacagctactttgacaaatatcctcctgaaaagggaatgcctccagatgagctatcaggctgggataaagacttctgacagaagaaaagttgattactgcctgtactctacagaagaggacctcaaggatcaataatccaacacattattttcttttcagagtattataatatctttggaagaccattagggaaaagaaattcctgcacaatgggaagaggagaatggtgtggatatggttctgagttatagtgtcttatttagatgctgtgaattattgatgtattacattatttgcttttctcaactgctagaggctaccccattttcctttccacaatcagagccatttttgttaaagtggcagttttttctgcaatctattgttccattccaatcatatccttctcgtttgagtactactaacgtttaaaaagggtcttgcccttgaataactaagtcatacaaatagaaggaaaaacaatggtgaattttggagagctccccagctctcagcaacttcatataagcatggtggtatcttaaaatggtggtttgcagaaaccatggtagccaacagaacctcctgactttcacctgcttttaacctgaaaatatattaatacgcctctgacatgagtccagggagaggcaagattgagcaatagtcagtggcaccatttcctaaagtaactgaatcaatcaatccagtcaggtaattattttctattggggaacttagaaaaaaaagtaaagcaagaaatattttctctcctttatgatcagtgataccttagagacttttcgaaagtccttgttaaagatagttacaatgtgtggttaaatgatgctaaaatattttcacaaccagagtagaaaacgtgctggaacaaaattgcgaaggcttttgcctcccagtaaatagaaaggaaaatatattctagtaggtaagactgctgactctttgaaaatctgaggtattttgaaaaattctgtgatagttgctattaataaaccaaaattgtatagaatcatcgttaatttttaatataaatcccattgacaaatgttgatgcactgtagtcactgctgagttaatagcgctttttaaagacatctgagtcatggatgtgtttataaatttagattgttaagacaggcaagccaccagaaaagtgataggatttcagaagtaaaagggacaacagcatccctcctatcccttccttgcactctcccaaataataagtaggatagtttcaatagcatgggacctagtacctaagaacttcactggtgaatggttgtatgtattgaccatgatcattcccttaccctccttccaaaatgaatgagaagcagagacttttctgtattttttaaatctagcagagtaaaaatactgtataagttccgggattattcaagcttctggttatattttcatatgttaatgttctatgtcaaaaggaacctctacccagtccccactcataatttcatcatccagaaaaaagccagctatatgcttccttaatgagttaagctagataagtgaagcccaatccagaaaggtgcatccttaacaaattagatttccacatttataatccttttgctgaaccaaagagtttttgtttcctggagctgtatttttaaagattatgtattgtacatagaataatcatttttaataggattgacataacctgcttaaagaatttctaagagtttttaaagatttttatttgaatttggttggtttgtactgtatgtttttccatgtatatatttttaaatttccaacctataaagatagaaaatttatgtattgggtggatattagaactatacagttataataggaatgatattctcaaagcagatcaatagttgtaatttttaaaaccctacatatatagaaataaccaagttagagtactacaggtttatttttcctgtgattgaccatgtcaatgtgttatcctcccatgtgattttttattgtttccttagagtactttaaaagatgaagaaatgagagactgaaccattgaataatcccaactccaccatttcctaactgagtgactctgggaaagtgatttagcttttttgagtactagctttctcattcatagaaaaaggcagagtaaagtaatatttacttagaggtttgtttcagggattaagttatgtagagagtcttttgcccggtatctgtgaaataaccattgctgcatagacgggagctactgttactgtctctattaaaattaaaggggccttaataaccatttagtcctgaatcttatgtatcattggtatctgtatgcagaattgtacttatcaaatccagtatctgtcttttttttcttttaaatcatgaagtaaaaatgattgaccaaaaacttcg

SEQ ID NO: 170843 - DNA, 2623 bp, Homo sapiens
  Payload ID: 13620
  Gene Symbol: PRKG2
  Gene Name: protein kinase, cGMP-dependent, type II
  Uniprot ID: Q13237
  ENST ID: ENST00000628926
  CDS Start-End: 143-2344
gagctgacctgcgctgggctccggcgccgcaggcggctggggagggcggcgtgggagaggacgctgagacgcaggggcggccgcgccgaggtgacaagctgcgcacctggaaagttacccggctgtctggtccctgagcaaaatgggaaatggttcagtgaaacctaaacattctaagcacccagatggacactctgggaacctcaccactgatgctctgcggaacaaggtgacagagctggagagagagttgaggaggaaggatgctgagatccaggagcgggagtaccatttgaaggagctgcgggagcagctgtcgaagcagactgtggccattgctgaactcacagaggagctccagaacaagtgcatccagctgaacaagctgcaggatgtggtgcatatgcagggaggaagcccgcttcaggcctctccagataaagtgcctcttgaggtccaccggaagacctctggattggtctctctccatagcaggaggggagcaaaggctggcgtgtctgctgagccaacaacccggacctatgacctgaacaaaccccctgaattttcctttgagaaagcaagagtcagaaaagactccagtgagaagaagctcattacagatgcccttaataaaaatcagtttctgaaaagactggatcctcagcagatcaaagacatggtggaatgcatgtatgggagaaactatcagcaagggagttacattattaagcaaggagaaccaggaaaccatatctttgtgctggcagagggtcgactagaggtgttccaaggggagaaattgctgtcctccatccctatgtggaccacatttggggagcttgccattttatacaattgtacaaggactgcctctgtgaaagctattaccaatgttaaaacatgggcactagatcgagaggtattccagaatataatgaggaggacagcccaagctagagatgaacaatacagaaacttcctcagaagtgtatccttgctgaagaatttacctgaagataaattaaccaagatcattgactgcttggaagtggaatactatgacaaaggagattacatcattagagagggcgaggaaggaagtacctttttcattttggcaaaaggaaaggtaaaagtaacacagagcacagaaggccatgatcaaccacagctgataaaaacactgcagaaaggagaatactttggagaaaaagctcttatcagtgatgatgtcaggtcagctaacattattgctgaagaaaatgatgttgcatgcctggttatagatcgagaaacattcaaccaaactgtcggtacatttgaagagctgcaaaaataccttgaaggatatgtggcaaacctgaaccgtgatgatgaaaaaagacatgcgaagcggtccatgtctaactggaagctgtccaaagcactctctctggaaatgattcagctgaaggagaaggttaaagtaaaaaatgagaatgttgcttttgctatgaagtgtataaggaagaagcacatagttgacaccaagcagcaggagcatgtctactcagagaagaggatcctagaggagctgtgctctccattcattgtgaaattatatcgtactttcaaggacaataagtatgtatacatgcttctggaggcctgcttaggtggggagctctggagtatattaagggacagaggcagctttgatgaacccacctccaaattctgcgttgcttgtgtgacagaagcatttgattacctgcatcgactaggtattatctacagagacttgaaaccagaaaacttaattctagatgctgagggttaccttaaattggttgactttggatttgcgaagaaaatagggtctggacagaaaacatggacattctgtgggactccagaatatgtagctcctgaagtcattctcaacaagggacatgacttcagtgtggatttctggtcactgggaattctagtgtatgagctcctaacgggcaacccacccttttctggggttgaccaaatgatgacctacaatttgattctcaaaggaattgaaaaaatggattttcccaggaagataacacgacgacctgaggatttgattcggaggctttgcaggcaaaatccaacagaaaggctgggaaatctgaagaatggaataaatgacattaagaaacacaggtggttaaatggttttaattgggagggactgaaagcacggagccttccatcacctttgcaaagagagctcaagggacccatagatcacagctactttgacaaatatcctcctgaaaagggaatgcctccagatgagctatcaggctgggataaagacttctgacagaagaaaagttgattactgcctgtactctacagaagaggacctcaaggatcaataatccaacacattattttcttttcagagtattataatatctttggaagaccattagggaaaagaaattcctgcacaatgggaagaggagaatggtgtggatatggttctgagttatagtgtcttatttagatgctgtgaattattgatgtattacattatttgcttttctcaactgctagaggctaccccattttcctttccacaatcagagccatttttgtt

SEQ ID NO: 170844 - DNA, 13509 bp, Homo sapiens
  Payload ID: 13621
  Gene Symbol: PRKDC
  Gene Name: protein kinase, DNA-activated, catalytic polypeptide
  Uniprot ID: P78527
  ENST ID: ENST00000314191
  CDS Start-End: 58-12444
ggggcatttccgggtccgggccgagcgggcgcacgcgcgggagcgggactcggcggcatggcgggctccggagccggtgtgcgttgctccctgctgcggctgcaggagaccttgtccgctgcggaccgctgcggtgctgccctggccggtcatcaactgatccgcggcctggggcaggaatgcgtcctgagcagcagccccgcggtgctggcattacagacatctttagttttttccagagatttcggtttgcttgtatttgtccggaagtcactcaacagtattgaatttcgtgaatgtagagaagaaatcctaaagtttttatgtattttcttagaaaaaatgggccagaagatcgcaccttactctgttgaaattaagaacacttgtaccagtgtttatacaaaagatagagctgctaaatgtaaaattccagccctggaccttcttattaagttacttcagacttttagaagttctagactcatggatgaatttaaaattggagaattatttagtaaattctatggagaacttgcattgaaaaaaaaaataccagatacagttttagaaaaagtatatgagctcctaggattattgggtgaagttcatcctagtgagatgataaataatgcagaaaacctgttccgcgcttttctgggtgaacttaagacccagatgacatcagcagtaagagagcccaaactacctgttctggcaggatgtctgaaggggttgtcctcacttctgtgcaacttcactaagtccatggaagaagatccccagacttcaagggagatttttaattttgtactaaaggcaattcgtcctcagattgatctgaagagatatgctgtgccctcagctggcttgcgcctatttgccctgcatgcatctcagtttagcacctgccttctggacaactacgtgtctctatttgaagtcttgttaaagtggtgtgcccacacaaatgtagaattgaaaaaagctgcactttcagccctggaatcctttctgaaacaggtttctaatatggtggcgaaaaatgcagaaatgcataaaaataaactgcagtactttatggagcagttttatggaatcatcagaaatgtggattcgaacaacaaggagttatctattgctatccgtggatatggactttttgcaggaccgtgcaaggttataaacgcaaaagatgttgacttcatgtacgttgagctcattcagcgctgcaagcagatgttcctcacccagacagacactggtgacgaccgtgtttatcagatgccaagcttcctccagtctgttgcaagcgtcttgctgtaccttgacacagttcctgaggtgtatactccagttctggagcacctcgtggtgatgcagatagacagtttcccacagtacagtccaaaaatgcagctggtgtgttgcagagccatagtgaaggtgttcctagctttggcagcaaaagggccagttctcaggaattgcattagtactgtggtgcatcagggtttaatcagaatatgttctaaaccagtggtccttccaaagggccctgagtctgaatctgaagaccaccgtgcttcaggggaagtcagaactggcaaatggaaggtgcccacatacaaagactacgtggatctcttcagacatctcctgagctctgaccagatgatggattctattttagcagatgaagcatttttctctgtgaattcctccagtgaaagtctgaatcatttactttatgatgaatttgtaaaatccgttttgaagattgttgagaaattggatcttacacttgaaatacagactgttggggaacaagagaatggagatgaggcgcctggtgtttggatgatcccaacttcagatccagcggctaacttgcatccagctaaacctaaagatttttcggctttcattaacctggtggaattttgcagagagattctccctgagaaacaagcagaattttttgaaccatgggtgtactcattttcatatgaattaattttgcaatctacaaggttgcccctcatcagtggtttctacaaattgctttctattacagtaagaaatgccaagaaaataaaatatttcgagggagttagtccaaagagtctgaaacactctcctgaagacccagaaaagtattcttgctttgctttatttgtgaaatttggcaaagaggtggcagttaaaatgaagcagtacaaagatgaacttttggcctcttgtttgacctttcttctgtccttgccacacaacatcattgaactcgatgttagagcctacgttcctgcactgcagatggctttcaaactgggcctgagctatacccccttggcagaagtaggcctgaatgctctagaagaatggtcaatttatattgacagacatgtaatgcagccttattacaaagacattctcccctgcctggatggatacctgaagacttcagccttgtcagatgagaccaagaataactgggaagtgtcagctctttctcgggctgcccagaaaggatttaataaagtggtgttaaagcatctgaagaagacaaagaacctttcatcaaacgaagcaatatccttagaagaaataagaattagagtagtacaaatgcttggatctctaggaggacaaataaacaaaaatcttctgacagtcacgtcctcagatgagatgatgaagagctatgtggcctgggacagagagaagcggctgagctttgcagtgccctttagagagatgaaacctgtcattttcctggatgtgttcctgcctcgagtcacagaattagcgctcacagccagtgacagacaaactaaagttgcagcctgtgaacttttacatagcatggttatgtttatgttgggcaaagccacgcagatgccagaagggggacagggagccccacccatgtaccagctctataagcggacgtttcctgtgctgcttcgacttgcgtgtgatgttgatcaggtgacaaggcaactgtatgagccactagttatgcagctgattcactggttcactaacaacaagaaatttgaaagtcaggatactgttgccttactagaagctatattggatggaattgtggaccctgttgacagtactttaagagatttttgtggtcggtgtattcgagaattccttaaatggtccattaagcaaataacaccacagcagcaggagaagagtccagtaaacaccaaatcgcttttcaagcgactttatagccttgcgcttcaccccaatgctttcaagaggctgggagcatcacttgcctttaataatatctacagggaattcagggaagaagagtctctggtggaacagtttgtgtttgaagccttggtgatatacatggagagtctggccttagcacatgcagatgagaagtccttaggtacaattcaacagtgttgtgatgccattgatcacctatgccgcatcattgaaaagaagcatgtttctttaaataaagcaaagaaacgacgtttgccgcgaggatttccaccttccgcatcattgtgtttattggatctggtcaagtggcttttagctcattgtgggaggccccagacagaatgtcgacacaaatccattgaactcttttataaattcgttcctttattgccaggcaacagatcccctaatttgtggctgaaagatgttctcaaggaagaaggtgtctcttttctcatcaacacctttgaggggggtggctgtggccagccctcgggcatcctggcccagcccaccctcttgtaccttcgggggccattcagcctgcaggccacgctatgctggctggacctgctcctggccgcgttggagtgctacaacacgttcattggcgagagaactgtaggagcgctccaggtcctaggtactgaagcccagtcttcacttttgaaagcagtggctttcttcttagaaagcattgccatgcatgacattatagcagcagaaaagtgctttggcactggggcagcaggtaacagaacaagcccacaagagggagaaaggtacaactacagcaaatgcaccgttgtggtccggattatggagtttaccacgactctgctaaacacctccccggaaggatggaagctcctgaagaaggacttgtgtaatacacacctgatgagagtcctggtgcagacgctgtgtgagcccgcaagcataggtttcaacatcggagacgtccaggttatggctcatcttcctgatgtttgtgtgaatctgatgaaagctctaaagatgtccccatacaaagatatcctagagacccatctgagagagaaaataacagcacagagcattgaggagctttgtgccgtcaacttgtatggccctgacgcgcaagtggacaggagcaggctggctgctgttgtgtctgcctgtaaacagcttcacagagctgggcttctgcataatatattaccgtctcagtccacagatttgcatcattctgttggcacagaacttctttccctggtttataaaggcattgcccctggagatgagagacagtgtctgccttctctagacctcagttgtaagcagctggccagcggacttctggagttagcctttgcttttggaggactgtgtgagcgccttgtgagtcttctcctgaacccagcggtgctgtccacggcgtccttgggcagctcacagggcagcgtcatccacttctcccatggggagtatttctatagcttgttctcagaaacgatcaacacggaattattgaaaaatctggatcttgctgtattggagctcatgcagtcttcagtggataataccaaaatggtgagtgccgttttgaacggcatgttagaccagagcttcagggagcgagcaaaccagaaacaccaaggactgaaacttgcgactacaattctgcaacactggaagaagtgtgattcatggtgggccaaagattcccctctcgaaactaaaatggcagtgctggccttactggcaaaaattttacagattgattcatctgtatcttttaatacaagtcatggttcattccctgaagtctttacaacatatattagtctacttgctgacacaaagctggatctacatttaaagggccaagctgtcactcttcttccattcttcaccagcctcactggaggcagtctggaggaacttagacgtgttctggagcagctcatcgttgctcacttccccatgcagtccagggaatttcctccaggaactccgcggttcaataattatgtggactgcatgaaaaagtttctagatgcattggaattatctcaaagccctatgttgttggaattgatgacagaagttctttgtcgggaacagcagcatgtcatggaagaattatttcaatccagtttcaggaggattgccagaaggggttcatgtgtcacacaagtaggccttctggaaagcgtgtatgaaatgttcaggaaggatgacccccgcctaagtttcacacgccagtcctttgtggaccgctccctcctcactctgctgtggcactgtagcctggatgctttgagagaattcttcagcacaattgtggtggatgccattgatgtgttgaagtccaggtttacaaagctaaatgaatctacctttgatactcaaatcaccaagaagatgggctactataagattctagacgtgatgtattctcgccttcccaaagatgatgttcatgctaaggaatcaaaaattaatcaagttttccatggctcgtgtattacagaaggaaatgaacttacaaagacattgattaaattgtgctacgatgcatttacagagaacatggcaggagagaatcagctgctggagaggagaagactttaccattgtgcagcatacaactgcgccatatctgtcatctgctgtgtcttcaatgagttaaaattttaccaaggttttctgtttagtgaaaaaccagaaaagaacttgcttatttttgaaaatctgatcgacctgaagcgccgctataattttcctgtagaagttgaggttcctatggaaagaaagaaaaagtacattgaaattaggaaagaagccagagaagcagcaaatggggattcagatggtccttcctatatgtcttccctgtcatatttggcagacagtaccctgagtgaggaaatgagtcaatttgatttctcaaccggagttcagagctattcatacagctcccaagaccctagacctgccactggtcgttttcggagacgggagcagcgggaccccacggtgcatgatgatgtgctggagctggagatggacgagctcaatcggcatgagtgcatggcgcccctgacggccctggtcaagcacatgcacagaagcctgggcccgcctcaaggagaagaggattcagtgccaagagatcttccttcttggatgaaattcctccatggcaaactgggaaatccaatagtaccattaaatatccgtctcttcttagccaagcttgttattaatacagaagaggtctttcgcccttacgcgaagcactggcttagccccttgctgcagctggctgcttctgaaaacaatggaggagaaggaattcactacatggtggttgagatagtggccactattctttcatggacaggcttggccactccaacaggggtccctaaagatgaagtgttagcaaatcgattgcttaatttcctaatgaaacatgtctttcatccaaaaagagctgtgtttagacacaaccttgaaattataaagacccttgtcgagtgctggaaggattgtttatccatcccttataggttaatatttgaaaagttttccggtaaagatcctaattctaaagacaactcagtagggattcaattgctaggcatcgtgatggccaatgacctgcctccctatgacccacagtgtggcatccagagtagcgaatacttccaggctttggtgaataatatgtcctttgtaagatataaagaagtgtatgccgctgcagcagaagttctaggacttatacttcgatatgttatggagagaaaaaacatactggaggagtctctgtgtgaactggttgcgaaacaattgaagcaacatcagaatactatggaggacaagtttattgtgtgcttgaacaaagtgaccaagagcttccctcctcttgcagacaggttcatgaatgctgtgttctttctgctgccaaaatttcatggagtgttgaaaacactctgtctggaggtggtactttgtcgtgtggagggaatgacagagctgtacttccagttaaagagcaaggacttcgttcaagtcatgagacatagagatgatgaaagacaaaaagtatgtttggacataatttataagatgatgccaaagttaaaaccagtagaactccgagaacttctgaaccccgttgtggaattcgtttcccatccttctacaacatgtagggaacaaatgtataatattctcatgtggattcatgataattacagagatccagaaagtgagacagataatgactcccaggaaatatttaagttggcaaaagatgtgctgattcaaggattgatcgatgagaaccctggacttcaattaattattcgaaatttctggagccatgaaactaggttaccttcaaataccttggaccggttgctggcactaaattccttatattctcctaagatagaagtgcactttttaagtttagcaacaaattttctgctcgaaatgaccagcatgagcccagattatccaaaccccatgttcgagcatcctctgtcagaatgcgaatttcaggaatataccattgattctgattggcgtttccgaagtactgttctcactccgatgtttgtggagacccaggcctcccagggcactctccagacccgtacccaggaagggtccctctcagctcgctggccagtggcagggcagataagggccacccagcagcagcatgacttcacactgacacagactgcagatggaagaagctcatttgattggctgaccgggagcagcactgacccgctggtcgaccacaccagtccctcatctgactccttgctgtttgcccacaagaggagtgaaaggttacagagagcacccttgaagtcagtggggcctgattttgggaaaaaaaggctgggccttccaggggacgaggtggataacaaagtgaaaggtgcggccggccggacggacctactacgactgcgcagacggtttatgagggaccaggagaagctcagtttgatgtatgccagaaaaggcgttgctgagcaaaaacgagagaaggaaatcaagagtgagttaaaaatgaagcaggatgcccaggtcgttctgtacagaagctaccggcacggagaccttcctgacattcagatcaagcacagcagcctcatcaccccgttacaggccgtggcccagagggacccaataattgcaaaacagctctttagcagcttgttttctggaattttgaaagagatggataaatttaagacactgtctgaaaaaaacaacatcactcaaaagttgcttcaagacttcaatcgttttcttaataccaccttctctttctttccaccctttgtctcttgtattcaggacattagctgtcagcacgcagccctgctgagcctcgacccagcggctgttagcgctggttgcctggccagcctacagcagcccgtgggcatccgcctgctagaggaggctctgctccgcctgctgcctgctgagctgcctgccaagcgagtccgtgggaaggcccgcctccctcctgatgtcctcagatgggtggagcttgctaagctgtatagatcaattggagaatacgacgtcctccgtgggatttttaccagtgagataggaacaaagcaaatcactcagagtgcattattagcagaagccagaagtgattattctgaagctgctaagcagtatgatgaggctctcaataaacaagactgggtagatggtgagcccacagaagccgagaaggatttttgggaacttgcatcccttgactgttacaaccaccttgctgagtggaaatcacttgaatactgttctacagccagtatagacagtgagaaccccccagacctaaataaaatctggagtgaaccattttatcaggaaacatatctaccttacatgatccgcagcaagctgaagctgctgctccagggagaggctgaccagtccctgctgacatttattgacaaagctatgcacggggagctccagaaggcgattctagagcttcattacagtcaagagctgagtctgctttacctcctgcaagatgatgttgacagagccaaatattacattcaaaatggcattcagagttttatgcagaattattctagtattgatgtcctcttacaccaaagtagactcaccaaattgcagtctgtacaggctttaacagaaattcaggagttcatcagctttataagcaaacaaggcaatttatcatctcaagttccccttaagagacttctgaacacctggacaaacagatatccagatgctaaaatggacccaatgaacatctgggatgacatcatcacaaatcgatgtttctttctcagcaaaatagaggagaagcttacccctcttccagaagataatagtatgaatgtggatcaagatggagaccccagtgacaggatggaagtgcaagagcaggaagaagatatcagctccctgatcaggagttgcaagttttccatgaaaatgaagatgatagacagtgcccggaagcagaacaatttctcacttgctatgaaactactgaaggagctgcataaagagtcaaaaaccagagacgattggctggtgagctgggtgcagagctactgccgcctgagccactgccggagccggtcccagggctgctctgagcaggtgctcactgtgctgaaaacagtctctttgttggatgagaacaacgtgtcaagctacttaagcaaaaatattctggctttccgtgaccagaacattctcttgggtacaacttacaggatcatagcgaatgctctcagcagtgagccagcctgccttgctgaaatcgaggaggacaaggctagaagaatcttagagctttctggatccagttcagaggattcagagaaggtgatcgcgggtctgtaccagagagcattccagcacctctctgaggctgtgcaggcggctgaggaggaggcccagcctccctcctggagctgtgggcctgcagctggggtgattgatgcttacatgacgctggcagatttctgtgaccaacagctgcgcaaggaggaagagaatgcatcagttattgattctgcagaactgcaggcgtatccagcacttgtggtggagaaaatgttgaaagctttaaaattaaattccaatgaagccagattgaagtttcctagattacttcagattatagaacggtatccagaggagactttgagcctcatgacaaaagagatctcttccgttccctgctggcagttcatcagctggatcagccacatggtggccttactggacaaagaccaagccgttgctgttcagcactctgtggaagaaatcactgataactacccgcaggctattgtttatcccttcatcataagcagcgaaagctattccttcaaggatacttctactggtcataagaataaggagtttgtggcaaggattaaaagtaagttggatcaaggaggagtgattcaagattttattaatgccttagatcagctctctaatcctgaactgctctttaaggattggagcaatgatgtaagagctgaactagcaaaaacccctgtaaataaaaaaaacattgaaaaaatgtatgaaagaatgtatgcagccttgggtgacccaaaggctccaggcctgggggcctttagaaggaagtttattcagacttttggaaaagaatttgataaacattttgggaaaggaggttctaaactactgagaatgaagctcagtgacttcaacgacattaccaacatgctacttttaaaaatgaacaaagactcaaagccccctgggaatctgaaagaatgttcaccctggatgagcgacttcaaagtggagttcctgagaaatgagctggagattcccggtcagtatgacggtaggggaaagccattgccagagtaccacgtgcgaatcgccgggtttgatgagcgggtgacagtcatggcgtctctgcgaaggcccaagcgcatcatcatccgtggccatgacgagagggaacaccctttcctggtgaagggtggcgaggacctgcggcaggaccagcgcgtggagcagctcttccaggtcatgaatgggatcctggcccaagactccgcctgcagccagagggccctgcagctgaggacctatagcgttgtgcccatgacctccaggttaggattaattgagtggcttgaaaatactgttaccttgaaggaccttcttttgaacaccatgtcccaagaggagaaggcggcttacctgagtgatcccagggcaccgccgtgtgaatataaagattggctgacaaaaatgtcaggaaaacatgatgttggagcttacatgctaatgtataagggcgctaatcgtactgaaacagtcacgtcttttagaaaacgagaaagtaaagtgcctgctgatctcttaaagcgggccttcgtgaggatgagtacaagccctgaggctttcctggcgctccgctcccacttcgccagctctcacgctctgatatgcatcagccactggatcctcgggattggagacagacatctgaacaactttatggtggccatggagactggcggcgtgatcgggatcgactttgggcatgcgtttggatccgctacacagtttctgccagtccctgagttgatgccttttcggctaactcgccagtttatcaatctgatgttaccaatgaaagaaacgggccttatgtacagcatcatggtacacgcactccgggccttccgctcagaccctggcctgctcaccaacaccatggatgtgtttgtcaaggagccctcctttgattggaaaaattttgaacagaaaatgctgaaaaaaggagggtcatggattcaagaaataaatgttgctgaaaaaaattggtacccccgacagaaaatatgttacgctaagagaaagttagcaggtgccaatccagcagtcattacttgtgatgagctactcctgggtcatgagaaggcccctgccttcagagactatgtggctgtggcacgaggaagcaaagatcacaacattcgtgcccaagaaccagagagtgggctttcagaagagactcaagtgaagtgcctgatggaccaggcaacagaccccaacatccttggcagaacctgggaaggatgggagccctggatgtgaggtctgtgggagtctgcagatagaaagcattacattgtttaaagaatctactatactttggttggcagcattccatgagctgattttcctgaaacactaaagagaaatgtcttttgtgctacagtttcgtagcatgagtttaaatcaagattatgatgagtaaatgtgtatgggttaaatcaaagataaggttatagtaacatcaaagattaggtgaggtttatagaaagatagatatccaggcttaccaaagtattaagtcaagaatataatatgtgatcagctttcaaagcatttacaagtgctgcaagttagtgaaacagctgtctccgtaaatggaggaaatgtggggaagccttggaatgcccttctggttctggcacattggaaagcacactcagaaggcttcatcaccaagattttgggagagtaaagctaagtatagttgatgtaacattgtagaagcagcataggaacaataagaacaataggtaaagctataattatggcttatatttagaaatgactgcatttgatattttaggatatttttctaggttttttcctttcattttattctcttctagttttgacattttatgatagatttgctctctagaaggaaacgtctttatttaggagggcaaaaattttggtcatagcattcacttttgctattccaatctacaactggaagatacataaaagtgctttgcattgaatttgggataacttcaaaaatcccatggttgttgttagggatagtactaagcatttcagttccaggagaataaaagaaattcctatttgaaatgaattcctcatttggaggaaaaaaagcatgcattctagcacaacaagatgaaattatggaatacaaaagtggctccttcccatgtgcagtccctgtccccccccgccagtcctccacacccaaactgtttctgattggcttttagctttttgttgtttttttttttccttctaacacttgtatttggaggctcttctgtgattttgagaagtatactcttgagtgtttaataaagtttttttccaaaagta

SEQ ID NO: 170845 - DNA, 12784 bp, Homo sapiens
  Payload ID: 13621
  Gene Symbol: PRKDC
  Gene Name: protein kinase, DNA-activated, catalytic polypeptide
  Uniprot ID: P78527
  ENST ID: ENST00000338368
  CDS Start-End: 53-12346
atttccgggtccgggccgagcgggcgcacgcgcgggagcgggactcggcggcatggcgggctccggagccggtgtgcgttgctccctgctgcggctgcaggagaccttgtccgctgcggaccgctgcggtgctgccctggccggtcatcaactgatccgcggcctggggcaggaatgcgtcctgagcagcagccccgcggtgctggcattacagacatctttagttttttccagagatttcggtttgcttgtatttgtccggaagtcactcaacagtattgaatttcgtgaatgtagagaagaaatcctaaagtttttatgtattttcttagaaaaaatgggccagaagatcgcaccttactctgttgaaattaagaacacttgtaccagtgtttatacaaaagatagagctgctaaatgtaaaattccagccctggaccttcttattaagttacttcagacttttagaagttctagactcatggatgaatttaaaattggagaattatttagtaaattctatggagaacttgcattgaaaaaaaaaataccagatacagttttagaaaaagtatatgagctcctaggattattgggtgaagttcatcctagtgagatgataaataatgcagaaaacctgttccgcgcttttctgggtgaacttaagacccagatgacatcagcagtaagagagcccaaactacctgttctggcaggatgtctgaaggggttgtcctcacttctgtgcaacttcactaagtccatggaagaagatccccagacttcaagggagatttttaattttgtactaaaggcaattcgtcctcagattgatctgaagagatatgctgtgccctcagctggcttgcgcctatttgccctgcatgcatctcagtttagcacctgccttctggacaactacgtgtctctatttgaagtcttgttaaagtggtgtgcccacacaaatgtagaattgaaaaaagctgcactttcagccctggaatcctttctgaaacaggtttctaatatggtggcgaaaaatgcagaaatgcataaaaataaactgcagtactttatggagcagttttatggaatcatcagaaatgtggattcgaacaacaaggagttatctattgctatccgtggatatggactttttgcaggaccgtgcaaggttataaacgcaaaagatgttgacttcatgtacgttgagctcattcagcgctgcaagcagatgttcctcacccagacagacactggtgacgaccgtgtttatcagatgccaagcttcctccagtctgttgcaagcgtcttgctgtaccttgacacagttcctgaggtgtatactccagttctggagcacctcgtggtgatgcagatagacagtttcccacagtacagtccaaaaatgcagctggtgtgttgcagagccatagtgaaggtgttcctagctttggcagcaaaagggccagttctcaggaattgcattagtactgtggtgcatcagggtttaatcagaatatgttctaaaccagtggtccttccaaagggccctgagtctgaatctgaagaccaccgtgcttcaggggaagtcagaactggcaaatggaaggtgcccacatacaaagactacgtggatctcttcagacatctcctgagctctgaccagatgatggattctattttagcagatgaagcatttttctctgtgaattcctccagtgaaagtctgaatcatttactttatgatgaatttgtaaaatccgttttgaagattgttgagaaattggatcttacacttgaaatacagactgttggggaacaagagaatggagatgaggcgcctggtgtttggatgatcccaacttcagatccagcggctaacttgcatccagctaaacctaaagatttttcggctttcattaacctggtggaattttgcagagagattctccctgagaaacaagcagaattttttgaaccatgggtgtactcattttcatatgaattaattttgcaatctacaaggttgcccctcatcagtggtttctacaaattgctttctattacagtaagaaatgccaagaaaataaaatatttcgagggagttagtccaaagagtctgaaacactctcctgaagacccagaaaagtattcttgctttgctttatttgtgaaatttggcaaagaggtggcagttaaaatgaagcagtacaaagatgaacttttggcctcttgtttgacctttcttctgtccttgccacacaacatcattgaactcgatgttagagcctacgttcctgcactgcagatggctttcaaactgggcctgagctatacccccttggcagaagtaggcctgaatgctctagaagaatggtcaatttatattgacagacatgtaatgcagccttattacaaagacattctcccctgcctggatggatacctgaagacttcagccttgtcagatgagaccaagaataactgggaagtgtcagctctttctcgggctgcccagaaaggatttaataaagtggtgttaaagcatctgaagaagacaaagaacctttcatcaaacgaagcaatatccttagaagaaataagaattagagtagtacaaatgcttggatctctaggaggacaaataaacaaaaatcttctgacagtcacgtcctcagatgagatgatgaagagctatgtggcctgggacagagagaagcggctgagctttgcagtgccctttagagagatgaaacctgtcattttcctggatgtgttcctgcctcgagtcacagaattagcgctcacagccagtgacagacaaactaaagttgcagcctgtgaacttttacatagcatggttatgtttatgttgggcaaagccacgcagatgccagaagggggacagggagccccacccatgtaccagctctataagcggacgtttcctgtgctgcttcgacttgcgtgtgatgttgatcaggtgacaaggcaactgtatgagccactagttatgcagctgattcactggttcactaacaacaagaaatttgaaagtcaggatactgttgccttactagaagctatattggatggaattgtggaccctgttgacagtactttaagagatttttgtggtcggtgtattcgagaattccttaaatggtccattaagcaaataacaccacagcagcaggagaagagtccagtaaacaccaaatcgcttttcaagcgactttatagccttgcgcttcaccccaatgctttcaagaggctgggagcatcacttgcctttaataatatctacagggaattcagggaagaagagtctctggtggaacagtttgtgtttgaagccttggtgatatacatggagagtctggccttagcacatgcagatgagaagtccttaggtacaattcaacagtgttgtgatgccattgatcacctatgccgcatcattgaaaagaagcatgtttctttaaataaagcaaagaaacgacgtttgccgcgaggatttccaccttccgcatcattgtgtttattggatctggtcaagtggcttttagctcattgtgggaggccccagacagaatgtcgacacaaatccattgaactcttttataaattcgttcctttattgccaggcaacagatcccctaatttgtggctgaaagatgttctcaaggaagaaggtgtctcttttctcatcaacacctttgaggggggtggctgtggccagccctcgggcatcctggcccagcccaccctcttgtaccttcgggggccattcagcctgcaggccacgctatgctggctggacctgctcctggccgcgttggagtgctacaacacgttcattggcgagagaactgtaggagcgctccaggtcctaggtactgaagcccagtcttcacttttgaaagcagtggctttcttcttagaaagcattgccatgcatgacattatagcagcagaaaagtgctttggcactggggcagcaggtaacagaacaagcccacaagagggagaaaggtacaactacagcaaatgcaccgttgtggtccggattatggagtttaccacgactctgctaaacacctccccggaaggatggaagctcctgaagaaggacttgtgtaatacacacctgatgagagtcctggtgcagacgctgtgtgagcccgcaagcataggtttcaacatcggagacgtccaggttatggctcatcttcctgatgtttgtgtgaatctgatgaaagctctaaagatgtccccatacaaagatatcctagagacccatctgagagagaaaataacagcacagagcattgaggagctttgtgccgtcaacttgtatggccctgacgcgcaagtggacaggagcaggctggctgctgttgtgtctgcctgtaaacagcttcacagagctgggcttctgcataatatattaccgtctcagtccacagatttgcatcattctgttggcacagaacttctttccctggtttataaaggcattgcccctggagatgagagacagtgtctgccttctctagacctcagttgtaagcagctggccagcggacttctggagttagcctttgcttttggaggactgtgtgagcgccttgtgagtcttctcctgaacccagcggtgctgtccacggcgtccttgggcagctcacagggcagcgtcatccacttctcccatggggagtatttctatagcttgttctcagaaacgatcaacacggaattattgaaaaatctggatcttgctgtattggagctcatgcagtcttcagtggataataccaaaatggtgagtgccgttttgaacggcatgttagaccagagcttcagggagcgagcaaaccagaaacaccaaggactgaaacttgcgactacaattctgcaacactggaagaagtgtgattcatggtgggccaaagattcccctctcgaaactaaaatggcagtgctggccttactggcaaaaattttacagattgattcatctgtatcttttaatacaagtcatggttcattccctgaagtctttacaacatatattagtctacttgctgacacaaagctggatctacatttaaagggccaagctgtcactcttcttccattcttcaccagcctcactggaggcagtctggaggaacttagacgtgttctggagcagctcatcgttgctcacttccccatgcagtccagggaatttcctccaggaactccgcggttcaataattatgtggactgcatgaaaaagtttctagatgcattggaattatctcaaagccctatgttgttggaattgatgacagaagttctttgtcgggaacagcagcatgtcatggaagaattatttcaatccagtttcaggaggattgccagaaggggttcatgtgtcacacaagtaggccttctggaaagcgtgtatgaaatgttcaggaaggatgacccccgcctaagtttcacacgccagtcctttgtggaccgctccctcctcactctgctgtggcactgtagcctggatgctttgagagaattcttcagcacaattgtggtggatgccattgatgtgttgaagtccaggtttacaaagctaaatgaatctacctttgatactcaaatcaccaagaagatgggctactataagattctagacgtgatgtattctcgccttcccaaagatgatgttcatgctaaggaatcaaaaattaatcaagttttccatggctcgtgtattacagaaggaaatgaacttacaaagacattgattaaattgtgctacgatgcatttacagagaacatggcaggagagaatcagctgctggagaggagaagactttaccattgtgcagcatacaactgcgccatatctgtcatctgctgtgtcttcaatgagttaaaattttaccaaggttttctgtttagtgaaaaaccagaaaagaacttgcttatttttgaaaatctgatcgacctgaagcgccgctataattttcctgtagaagttgaggttcctatggaaagaaagaaaaagtacattgaaattaggaaagaagccagagaagcagcaaatggggattcagatggtccttcctatatgtcttccctgtcatatttggcagacagtaccctgagtgaggaaatgagtcaatttgatttctcaaccggagttcagagctattcatacagctcccaagaccctagacctgccactggtcgttttcggagacgggagcagcgggaccccacggtgcatgatgatgtgctggagctggagatggacgagctcaatcggcatgagtgcatggcgcccctgacggccctggtcaagcacatgcacagaagcctgggcccgcctcaaggagaagaggattcagtgccaagagatcttccttcttggatgaaattcctccatggcaaactgggaaatccaatagtaccattaaatatccgtctcttcttagccaagcttgttattaatacagaagaggtctttcgcccttacgcgaagcactggcttagccccttgctgcagctggctgcttctgaaaacaatggaggagaaggaattcactacatggtggttgagatagtggccactattctttcatggacaggcttggccactccaacaggggtccctaaagatgaagtgttagcaaatcgattgcttaatttcctaatgaaacatgtctttcatccaaaaagagctgtgtttagacacaaccttgaaattataaagacccttgtcgagtgctggaaggattgtttatccatcccttataggttaatatttgaaaagttttccggtaaagatcctaattctaaagacaactcagtagggattcaattgctaggcatcgtgatggccaatgacctgcctccctatgacccacagtgtggcatccagagtagcgaatacttccaggctttggtgaataatatgtcctttgtaagatataaagaagtgtatgccgctgcagcagaagttctaggacttatacttcgatatgttatggagagaaaaaacatactggaggagtctctgtgtgaactggttgcgaaacaattgaagcaacatcagaatactatggaggacaagtttattgtgtgcttgaacaaagtgaccaagagcttccctcctcttgcagacaggttcatgaatgctgtgttctttctgctgccaaaatttcatggagtgttgaaaacactctgtctggaggtggtactttgtcgtgtggagggaatgacagagctgtacttccagttaaagagcaaggacttcgttcaagtcatgagacatagagatgatgaaagacaaaaagtatgtttggacataatttataagatgatgccaaagttaaaaccagtagaactccgagaacttctgaaccccgttgtggaattcgtttcccatccttctacaacatgtagggaacaaatgtataatattctcatgtggattcatgataattacagagatccagaaagtgagacagataatgactcccaggaaatatttaagttggcaaaagatgtgctgattcaaggattgatcgatgagaaccctggacttcaattaattattcgaaatttctggagccatgaaactaggttaccttcaaataccttggaccggttgctggcactaaattccttatattctcctaagatagaagtgcactttttaagtttagcaacaaattttctgctcgaaatgaccagcatgagcccagattatccaaaccccatgttcgagcatcctctgtcagaatgcgaatttcaggaatataccattgattctgattggcgtttccgaagtactgttctcactccgatgtttgtggagacccaggcctcccagggcactctccagacccgtacccaggaagggtccctctcagctcgctggccagtggcagggcagataagggccacccagcagcagcatgacttcacactgacacagactgcagatggaagaagctcatttgattggctgaccgggagcagcactgacccgctggtcgaccacaccagtccctcatctgactccttgctgtttgcccacaagaggagtgaaaggttacagagagcacccttgaagtcagtggggcctgattttgggaaaaaaaggctgggccttccaggggacgaggtggataacaaagtgaaaggtgcggccggccggacggacctactacgactgcgcagacggtttatgagggaccaggagaagctcagtttgatgtatgccagaaaaggcgttgctgagcaaaaacgagagaaggaaatcaagagtgagttaaaaatgaagcaggatgcccaggtcgttctgtacagaagctaccggcacggagaccttcctgacattcagatcaagcacagcagcctcatcaccccgttacaggccgtggcccagagggacccaataattgcaaaacagctctttagcagcttgttttctggaattttgaaagagatggataaatttaagacactgtctgaaaaaaacaacatcactcaaaagttgcttcaagacttcaatcgttttcttaataccaccttctctttctttccaccctttgtctcttgtattcaggacattagctgtcagcacgcagccctgctgagcctcgacccagcggctgttagcgctggttgcctggccagcctacagcagcccgtgggcatccgcctgctagaggaggctctgctccgcctgctgcctgctgagctgcctgccaagcgagtccgtgggaaggcccgcctccctcctgatgtcctcagatgggtggagcttgctaagctgtatagatcaattggagaatacgacgtcctccgtgggatttttaccagtgagataggaacaaagcaaatcactcagagtgcattattagcagaagccagaagtgattattctgaagctgctaagcagtatgatgaggctctcaataaacaagactgggtagatggtgagcccacagaagccgagaaggatttttgggaacttgcatcccttgactgttacaaccaccttgctgagtggaaatcacttgaatactgttctacagccagtatagacagtgagaaccccccagacctaaataaaatctggagtgaaccattttatcaggaaacatatctaccttacatgatccgcagcaagctgaagctgctgctccagggagaggctgaccagtccctgctgacatttattgacaaagctatgcacggggagctccagaaggcgattctagagcttcattacagtcaagagctgagtctgctttacctcctgcaagatgatgttgacagagccaaatattacattcaaaatggcattcagagttttatgcagaattattctagtattgatgtcctcttacaccaaagtagactcaccaaattgcagtctgtacaggctttaacagaaattcaggagttcatcagctttataagcaaacaaggcaatttatcatctcaagttccccttaagagacttctgaacacctggacaaacagatatccagatgctaaaatggacccaatgaacatctgggatgacatcatcacaaatcgatgtttctttctcagcaaaatagaggagaagcttacccctcttccagaagataatagtatgaatgtggatcaagatggagaccccagtgacaggatggaagtgcaagagcaggaagaagatatcagctccctgatcaggagttgcaagttttccatgaaaatgaagatgatagacagtgcccggaagcagaacaatttctcacttgctatgaaactactgaaggagctgcataaagagtcaaaaaccagagacgattggctggtgagctgggtgcagagctactgccgcctgagccactgccggagccggtcccagggctgctctgagcaggtgctcactgtgctgaaaacagtctctttgttggatgagaacaacgtgtcaagctacttaagcaaaaatattctggctttccgtgaccagaacattctcttgggtacaacttacaggatcatagcgaatgctctcagcagtgagccagcctgccttgctgaaatcgaggaggacaaggctagaagaatcttagagctttctggatccagttcagaggattcagagaaggtgatcgcgggtctgtaccagagagcattccagcacctctctgaggctgtgcaggcggctgaggaggaggcccagcctccctcctggagctgtgggcctgcagctggggtgattgatgcttacatgacgctggcagatttctgtgaccaacagctgcgcaaggaggaagagaatgcatcagttattgattctgcagaactgcaggcgtatccagcacttgtggtggagaaaatgttgaaagctttaaaattaaattccaatgaagccagattgaagtttcctagattacttcagattatagaacggtatccagaggagactttgagcctcatgacaaaagagatctcttccgttccctgctggcagttcatcagctggatcagccacatggtggccttactggacaaagaccaagccgttgctgttcagcactctgtggaagaaatcactgataactacccgcaggctattgtttatcccttcatcataagcagcgaaagctattccttcaaggatacttctactggtcataagaataaggagtttgtggcaaggattaaaagtaagttggatcaaggaggagtgattcaagattttattaatgccttagatcagctctctaatcctgaactgctctttaaggattggagcaatgatgtaagagctgaactagcaaaaacccctgtaaataaaaaaaacattgaaaaaatgtatgaaagaatgtatgcagccttgggtgacccaaaggctccaggcctgggggcctttagaaggaagtttattcagacttttggaaaagaatttgataaacattttgggaaaggaggttctaaactactgagaatgaagctcagtgacttcaacgacattaccaacatgctacttttaaaaatgaacaaagactcaaagccccctgggaatctgaaagaatgttcaccctggatgagcgacttcaaagtggagttcctgagaaatgagctggagattcccggtcagtatgacggtaggggaaagccattgccagagtaccacgtgcgaatcgccgggtttgatgagcgggtgacagtcatggcgtctctgcgaaggcccaagcgcatcatcatccgtggccatgacgagagggaacaccctttcctggtgaagggtggcgaggacctgcggcaggaccagcgcgtggagcagctcttccaggtcatgaatgggatcctggcccaagactccgcctgcagccagagggccctgcagctgaggacctatagcgttgtgcccatgacctccagtgatcccagggcaccgccgtgtgaatataaagattggctgacaaaaatgtcaggaaaacatgatgttggagcttacatgctaatgtataagggcgctaatcgtactgaaacagtcacgtcttttagaaaacgagaaagtaaagtgcctgctgatctcttaaagcgggccttcgtgaggatgagtacaagccctgaggctttcctggcgctccgctcccacttcgccagctctcacgctctgatatgcatcagccactggatcctcgggattggagacagacatctgaacaactttatggtggccatggagactggcggcgtgatcgggatcgactttgggcatgcgtttggatccgctacacagtttctgccagtccctgagttgatgccttttcggctaactcgccagtttatcaatctgatgttaccaatgaaagaaacgggccttatgtacagcatcatggtacacgcactccgggccttccgctcagaccctggcctgctcaccaacaccatggatgtgtttgtcaaggagccctcctttgattggaaaaattttgaacagaaaatgctgaaaaaaggagggtcatggattcaagaaataaatgttgctgaaaaaaattggtacccccgacagaaaatatgttacgctaagagaaagttagcaggtgccaatccagcagtcattacttgtgatgagctactcctgggtcatgagaaggcccctgccttcagagactatgtggctgtggcacgaggaagcaaagatcacaacattcgtgcccaagaaccagagagtgggctttcagaagagactcaagtgaagtgcctgatggaccaggcaacagaccccaacatccttggcagaacctgggaaggatgggagccctggatgtgaggtctgtgggagtctgcagatagaaagcattacattgtttaaagaatctactatactttggttggcagcattccatgagctgattttcctgaaacactaaagagaaatgtcttttgtgctacagtttcgtagcatgagtttaaatcaagattatgatgagtaaatgtgtatgggttaaatcaaagataaggttatagtaacatcaaagattaggtgaggtttatagaaagatagatatccaggcttaccaaagtattaagtcaagaatataatatgtgatcagctttcaaagcatttacaagtgctgcaagttagtgaaacagctgtctccgtaaatggaggaaatgtggggaagccttggaatgcccttctggttctggcacattggaaagcacactcagaaggcttcatcaccaagattttgggagagtaaagcta

SEQ ID NO: 170846 - DNA, 537 bp, Homo sapiens
  Payload ID: 13621
  Gene Symbol: PRKDC
  Gene Name: protein kinase, DNA-activated, catalytic polypeptide
  ENST ID: ENST00000540819
  CDS Start-End: 327-537
aaaaattgaagaaatgtaattgaagtcatgttcttttaactctttagcaatgcctgggtgggaactttttcccctttgtagtaaaagtgcctctttttagcattttaaatattcaaatacttaattatgtggatctcctgtattccttctttaaaacacgagtatgcagaccttgatgttgtgccctattaaaagcattacagacatctttagttttttccagagatttcggtttgcttgtatttgtccggaagtcactcaacagtattgaatttcgtgaatgtagagaagaaatcctaaagtttttatgtattttcttagaaaaaatgggccagaagatcgcaccttactctgttgaaattaagaacacttgtaccagtgtttatacaaaagatagagctgctaaatgtaaaattccagccctggaccttcttattaagttacttcagacttttagaagttctagactcatggatgaatttaaaattggagaattatttagtaaattctatggagaacttgcattgaaaaaaaaaa

SEQ ID NO: 170847 - DNA, 659 bp, Homo sapiens
  Payload ID: 13621
  Gene Symbol: PRKDC
  Gene Name: protein kinase, DNA-activated, catalytic polypeptide
  ENST ID: ENST00000536429
  CDS Start-End: 1-271
gaacaactttatggtggccatggagactggcggcgtgatcgggatcgactttgggcatgcgtttggatccgctacacagtttctgccagtccctgagttgatgccttttcggctaactcgccagtttatcaatctgatgttaccaatgaaagaaacgggccttatgtacagcatcatggtacacgcactccgggccttccgctcagaccctggcctgctcaccaacaccatggatgtgtttgtcaaggagccctcctttgattggaaatgatgagctactcctgggtcatgagaaggcccctgccttcagagactatgtggctgtggcacgaggaagcaaagatcacaacattcgtgcccaagaaccagagagtgggctttcagaagagactcaagtgaagtgcctgatggaccaggcaacagaccccaacatccttggcagaacctgggaaggatgggagccctggatgtgaggtctgtgggagtctgcagatagaaagcattacattgtttaaagaatctactatactttggttggcagcattccatgagctgattttcctgaaacactaaagagaaatgtcttttgtgctacagtttcgtagcatgagtttaaatcaagattatgatgagtaaatgtgtatgggttaaatcaaaga

SEQ ID NO: 170848 - DNA, 1826 bp, Homo sapiens
  Payload ID: 13622
  Gene Symbol: PRKRA
  Gene Name: protein kinase, interferon-inducible double stranded RNA dependent activator
  Uniprot ID: O75569
  ENST ID: ENST00000325748
  CDS Start-End: 202-1143
gcgagggggcgtagccggagctacggcaccaaggctccgcccccaccctgcctgccccctcgctggagcaacgcaagcaggaggcgggggagtcggaggaggtggcggcgctggagctcctcccggggaccagcgacccggggagcgagcacgtcgctccgcaccgctcttcctccagccgctgagccgtcccttctcgccatgtcccagagcaggcaccgcgccgaggccccgccgctggagcgcgaggacagtgggaccttcagtttggggaagatgataacagctaagccagggaaaacaccgattcaggtattacacgaatacggcatgaagaccaagaacatcccagtttatgaatgtgaaagatctgatgtgcaaatacacgtgcccactttcaccttcagagtaaccgttggtgacataacctgcacaggtgaaggtacaagtaagaagctggcgaaacatagagctgcagaggctgccataaacattttgaaagccaatgcaagtatttgctttgcagttcctgaccccttaatgcctgacccttccaagcaaccaaagaaccagcttaatcctattggttcattacaggaattggctattcatcatggctggagacttcctgaatataccctttcccaggagggaggacctgctcataagagagaatatactacaatttgcaggctagagtcatttatggaaactggaaagggggcatcaaaaaagcaagccaaaaggaatgctgctgagaaatttcttgccaaatttagtaatatttctccagagaaccacatttctttaacaaatgtagtaggacattctttaggatgtacttggcattccttgaggaattctcctggtgaaaagatcaacttactgaaaagaagcctccttagtattccaaatacagattacatccagctgcttagtgaaattgccaaggaacaaggttttaatataacatatttggatatagatgaactgagcgccaatggacaatatcaatgtcttgctgaactgtccaccagccccatcacagtctgtcatggctccggtatctcctgtggcaatgcacaaagtgatgcagctcacaatgctttgcagtatttaaagataatagcagaaagaaagtaaatctggagcaacttaaaaaatctttcagtagcacataaaaagttcccctctggccccttcccaagtaaaacttttaccgtagtgtttatgtcttgtttctaaatctcttcatagattccatcaacactccagatttaattatctcctcatagttgttattaagctctttttaatggcttcaactttgtatcagtatactgtatttataaactttgtaccacaagagagagtgtagcacccattttacagtgccatgcacatcagagaaagaaactgcatgtttgttgttgatgatgaaataaaaatgctagcgacagtctttcttactggtgcttaagctcttctttgcacaaagctttataaagggaattcaaaggaagccctttagaattagagtcttgagggacagcactaacaggcctttattaagtatgattgattgttaaatttcagggaacatgattggtctgctgtgtatttgaattcatgtaacaaagaactgttacgatgggattctgctcattttattaaaaagctactgacttgactgtcatcctgttcttgttagccattgtgaataagattttaatgttgataattctgttatttacatatctctaatttactttgaaattcaaaggtgaaaataaaaaatgatggcctaagtaaaatttacaaacata

SEQ ID NO: 170849 - DNA, 549 bp, Homo sapiens
  Payload ID: 13622
  Gene Symbol: PRKRA
  Gene Name: protein kinase, interferon-inducible double stranded RNA dependent activator
  ENST ID: ENST00000448279
  CDS Start-End: 42-329
aaaactggcctctacgcttctgcttcaatctccaatttggcatgcaaagcacacctttttgtggtttttgcagtttggggaagatgataacagctaagccagggaaaacaccgattcaggtattacacgaatacggcatgaagaccaagaacatcccagtttatgaatgtgaaagatctgatgtgcaaatacacgtgcccactttcaccttcagagtaaccgttggtgacataacctgcacaggtgaaggtacaagtaagaagctggcgaaacatagagctgcagaggctgccataaacattttgaaagccaatgcaagtatttggtgagctaaatttctttgtattcagcagctcaaaaatatcatggctgagctttgcagttcctgaccccttaatgcctgacccttccaagcaaccaaagaaccagcttaatcctattggttcattacaggaattggctattcatcatggctggagacttcctgaatataccctttcccaggagggaggacctgctcataagagagaatatactacaatttgcagg

SEQ ID NO: 170850 - DNA, 1344 bp, Homo sapiens
  Payload ID: 13622
  Gene Symbol: PRKRA
  Gene Name: protein kinase, interferon-inducible double stranded RNA dependent activator
  Uniprot ID: O75569
  ENST ID: ENST00000432031
  CDS Start-End: 315-1223
gcggggcgggcggaggtgacgctcggtcggcgcgcccgggaagggatcgtcaggttttccctgagaggctgcggcgctgctgccagccctgttctgttgagaatctctcctacccgcattcaagtgctctctctaaagacctcgctcaccccgcctgctcctgcggagtgactgccgcagcggggccggaagacaggtgcgccccagcctcgccagctctggccctggcctccggggaactcggcgcctccctcgtcaccgtcggtggcggttaaaactggcctctacgcttctgcttcaatctccaatttggcatgcaaagcacacctttttgtggtttttgcagtttggggaagatgataacagctaagccagggaaaacaccgattcaggtattacacgaatacggcatgaagaccaagaacatcccagtttatgaatgtgaaagatctgatgtgcaaatacacgtgcccactttcaccttcagagtaaccgttggtgacataacctgcacaggtgaaggtacaagtaagaagctggcgaaacatagagctgcagaggctgccataaacattttgaaagccaatgcaagtatttgctttgcagttcctgaccccttaatgcctgacccttccaagcaaccaaagaaccagcttaatcctattggttcattacaggaattggctattcatcatggctggagacttcctgaatataccctttcccaggagggaggacctgctcataagagagaatatactacaatttgcaggctagagtcatttatggaaactggaaagggggcatcaaaaaagcaagccaaaaggaatgctgctgagaaatttcttgccaaatttagtaatatttctccagagaaccacatttctttaacaaatgtagtaggacattctttaggatgtacttggcattccttgaggaattctcctggtgaaaagatcaacttactgaaaagaagcctccttagtattccaaatacagattacatccagctgcttagtgaaattgccaaggaacaaggttttaatataacatatttggatatagatgaactgagcgccaatggacaatatcaatgtcttgctgaactgtccaccagccccatcacagtctgtcatggctccggtatctcctgtggcaatgcacaaagtgatgcagctcacaatgctttgcagtatttaaagataatagcagaaagaaagtaaatctggagcaacttaaaaaatctttcagtagcacataaaaagttcccctctggccccttcccaagtaaaacttttaccgtagtgtttatgtcttgtttctaaatctcttcatagattccat

SEQ ID NO: 170851 - DNA, 1616 bp, Homo sapiens
  Payload ID: 13622
  Gene Symbol: PRKRA
  Gene Name: protein kinase, interferon-inducible double stranded RNA dependent activator
  ENST ID: ENST00000424699
  CDS Start-End: 122-439
gaggcgggggagtcggaggaggtggcggcgctggagctcctcccggggaccagcgacccggggagcgagcacgtcgctccgcaccgctcttcctccagccgctgagccgtcccttctcgccatgtcccagagcaggcaccgcgccgaggccccgccgctggagcgcgaggacagtgggaccttcagtttggggaagatgataacagctaagccagggaaaacaccgattcaggtattacacgaatacggcatgaagaccaagaacatcccagtttatgaatgtgaaagatctgatgtgcaaatacacgtgcccactttcaccttcagagtaaccgttggtgacataacctgcacaggtgaaggtacaagtaagaagctggcgaaacatagagctgcagaggctgccataaacattttgaaagccaatgcaagtatttgataaaatgggaattactaagctgtaatcaggcctaaagtggcctgacttaatacagagactttctcacttctccatcacaattatttgggtagcttcggcatgcagcattctttgcagttcctgaccccttaatgcctgacccttccaagcaaccaaagaaccagcttaatcctattggttcattacaggaattggctattcatcatggctggagacttcctgaatataccctttcccaggagggaggacctgctcataagagagaatatactacaatttgcaggctagagtcatttatggaaactggaaagggggcatcaaaaaagcaagccaaaaggaatgctgctgagaaatttcttgccaaatttagtaatatttctccagagaaccacatttctttaacaaatgtagtaggacattctttaggatgtacttggcattccttgaggaattctcctggtgaaaagatcaacttactgaaaagaagcctccttagtattccaaatacagattacatccagctgcttagtgaaattgccaaggaacaaggttttaatataacatatttggatatagatgaactgagcgccaatggacaatatcaatgtcttgctgaactgtccaccagccccatcacagtctgtcatggctccggtatctcctgtggcaatgcacaaagtgatgcagctcacaatgctttgcagtatttaaagataatagcagaaagaaagtaaatctggagcaacttaaaaaatctttcagtagcacataaaaagttcccctctggccccttcccaagtaaaacttttaccgtagtgtttatgtcttgtttctaaatctcttcatagattccatcaacactccagatttaattatctcctcatagttgttattaagctctttttaatggcttcaactttgtatcagtatactgtatttataaactttgtaccacaagagagagtgtagcacccattttacagtgccatgcacatcagagaaagaaactgcatgtttgttgttgatgatgaaataaaaatgctagcgacagtctttcttactggtgcttaagctcttctttgcacaaagctttataaagggaattcaaaggaagccctttagaattagagtcttgagggacagcactaacaggcctttattaagtatgattgattgt

SEQ ID NO: 170852 - DNA, 942 bp, Homo sapiens
  Payload ID: 13622
  Gene Symbol: PRKRA
  Gene Name: protein kinase, interferon-inducible double stranded RNA dependent activator
  ENST ID: ENST00000457633
  CDS Start-End: 617-942
ctccagccgctgagccgtcccttctcgccatgtcccagagcaggcaccgcgccgaggccccgccgctggagcgcgaggacagtgggaccttcaggtcagcgtgcgggcagtcagggccccagggccgggagcgttgggcggcagggccggggcgcggggagccggccctccagaggcattctgggtaaagccgtgcccggcgcccacgcctccgcggctgtgggtgctcggccccgccctctcggcggcgagggttggggtctgcggccgggccccgcccctctcgtggtccctggcggcgcgcggggcgggcggaggtgacgctcggtcggcgcgcccgggaagggatcgtcaggttttccctgagaggctgcggcgctgctgccagccctgttctgttgagaatctctcctacccgcattcaagtgctctctctaaagacctcgctcaccccgcctgctcctgcggagtgactgccgcagcggggccggaagacaggtgcgccccagcctcgccagctctggccctggcctccggggaactcggcgcctccctcgtcaccgtcggtggcggttaaaactggcctctacgcttctgcttcaatctccaatttggcatgcaaagcacacctttttgtggtttttgcagtttggggaagatgataacagctaagccagggaaaacaccgattcaggtattacacgaatacggcatgaagaccaagaacatcccagtttatgaatgtgaaagatctgatgtgcaaatacacgtgcccactttcaccttcagagtaaccgttggtgacataacctgcacaggtgaaggtacaagtaagaagctggcgaaacatagagctgcagaggctgccataaacattttgaaagccaatgcaagtatttggaattggctattcatcatggctggagacttcctgaatatacc

SEQ ID NO: 170853 - DNA, 1211 bp, Homo sapiens
  Payload ID: 13622
  Gene Symbol: PRKRA
  Gene Name: protein kinase, interferon-inducible double stranded RNA dependent activator
  Uniprot ID: O75569
  ENST ID: ENST00000487082
  CDS Start-End: 214-1080
gcggcgcgcggggcgggcggaggtgacgctcggtcggcgcgcccgggaagggatcgtcaggttttccctgagaggctgcggcgctgctgccagccctgttctgttgagaatctctcctacccgcattcaagtgctctctctaaagacctcgctcaccccgcctgctcctgcggagtgactgccgcagcggggccggaagacagtttggggaagatgataacagctaagccagggaaaacaccgattcaggtattacacgaatacggcatgaagaccaagaacatcccagtttatgaatgtgaaagatctgatgtgcaaatacacgtgcccactttcaccttcagagtaaccgttggtgacataacctgcacaggtgaaggtacaagtaagaagctggcgaaacatagagctgcagaggctgccataaacattttgaaagccaatgcaagtatttgctttgcagttcctgaccccttaatgcctgacccttccaagcaaccaaagaaccagcttaatcctattggttcattacaggaattggctattcatcatggctggagacttcctgaatataccctttcccaggagggaggacctgctcataagagagaatatactacaatttgcaggctagagtcatttatggaaactggaaagggggcatcaaaaaagcaagccaaaaggaatgctgctgagaaatttcttgccaaatttagtaatatttctccagagaaccacatttctttaacaaatgtagtaggacattctttaggatgtacttggcattccttgaggaattctcctggtgaaaagatcaacttactgaaaagaagcctccttagtattccaaatacagattacatccagctgcttagtgaaattgccaaggaacaaggttttaatataacatatttggatatagatgaactgagcgccaatggacaatatcaatgtcttgctgaactgtccaccagccccatcacagtctgtcatggctccggtatctcctgtggcaatgcacaaagtgatgcagctcacaatgctttgcagtatttaaagataatagcagaaagaaagtaaatctggagcaacttaaaaaatctttcagtagcacataaaaagttcccctctggccccttcccaagtaaaacttttaccgtagtgtttatgtcttgtttctaaatctcttcatagattccatcaacactcca

SEQ ID NO: 170854 - DNA, 2171 bp, Homo sapiens
  Payload ID: 13623
  Gene Symbol: PKMYT1
  Gene Name: protein kinase, membrane associated tyrosine/threonine 1
  Uniprot ID: Q99640
  ENST ID: ENST00000262300
  CDS Start-End: 510-2009
gagcctcggagcccgggcacccctgacgggctgcactggggagggggaggagcctcgaggccggtttggaatttttggcgcgagcagctccgcgcgcgttcacgggccgttccccctcacgggagtcctccgcccgggcgtccggaacagtcgacggcagactccggcccgctgagccacccgaggggtcccgtggcctccgcggacccggaatctgggccctcgcggacccgcgccccgcccagtcgccccagggcttccccacacccacggagtgaagtcagccgcggccctgcctgggaggaacttaccgtctaccgggaaaggtggccagcagatgtgtcgggcctggtgagagggtgaggcgagacggcccgatcgcccagggccccggaagctgcggaggtcacccccgcctggccttagctcagggacaccctggattcacgtgggagcccctgctcctgcctcccccgtcccaccactgaggctgttgggccaggccagtcatgctagaacggcctcctgcactggccatgcccatgcccacggagggcaccccgccacctctgagtggcacccccatcccagtcccagcctacttccgccacgcagaacctggattctccctcaagaggcccagggggctcagccggagcctcccacctccgccccctgccaagggcagcattcccatcagccgcctcttccctcctcggaccccaggctggcaccagctgcagccccggcgggtgtcattccggggcgaggcctcagagactctgcagagccctgggtatgacccaagccggccagagtccttcttccagcagagcttccagaggctcagccgcctgggccatggctcctacggagaggtcttcaaggtgcgctccaaggaggacggccggctctatgcggtaaagcgttccatgtcaccattccggggccccaaggaccgggcccgcaagttggccgaggtgggcagccacgagaaggtggggcagcacccatgctgcgtgcggctggagcaggcctgggaggagggcggcatcctgtacctgcagacggagctgtgcgggcccagcctgcagcaacactgtgaggcctggggtgccagcctgcctgaggcccaggtctggggctacctgcgggacacgctgcttgccctggcccatctgcacagccagggcctggtgcaccttgatgtcaagcctgccaacatcttcctggggccccggggccgctgcaagctgggtgacttcggactgctggtggagctgggtacagcaggagctggtgaggtccaggagggagacccccgctacatggcccccgagctgctgcagggctcctatgggacagcagcggatgtgttcagtctgggcctcaccatcctggaagtggcatgcaacatggagctgccccacggtggggagggctggcagcagctgcgccagggctacctgccccctgagttcactgccggtctgtcttccgagctgcgttctgtccttgtcatgatgctggagccagaccccaagctgcgggccacggccgaggccctgctggcactgcctgtgttgaggcagccgcgggcctggggtgtgctgtggtgcatggcagcggaggccctgagccgagggtgggccctgtggcaggccctgcttgccctgctctgctggctctggcatgggctggctcaccctgccagctggctacagcccctgggcccgccagccaccccgcctggctcaccaccctgcagtttgctcctggacagcagcctctccagcaactgggatgacgacagcctagggccttcactctcccctgaggctgtcctggcccggactgtggggagcacctccaccccccggagcaggtgcacacccagggatgccctggacctaagtgacatcaactcagagcctcctcggggctccttcccctcctttgagcctcggaacctcctcagcctgtttgaggacaccctagacccaacctgagccccagactctgcctctgcacttttaaccttttatcctgtgtctctcccgtcgcccttgaaagctggggcccctcgggaactcccatggtcttctctgcctggccgtgtctaataaaaagtatttgaaccttgggagcacccaagcttgctcatgtggcaa

SEQ ID NO: 170855 - DNA, 1991 bp, Homo sapiens
  Payload ID: 13623
  Gene Symbol: PKMYT1
  Gene Name: protein kinase, membrane associated tyrosine/threonine 1
  ENST ID: ENST00000382240
  CDS Start-End: 331-1674
actgccattctggaagtggacaccactaactgggttttggcacgacagttatgaaaaagaaagacacttgagggattccgggttttcactttggaattggagataagggatcgtgggcccgtgtagtctcggaagaggttgtgtagtttaggatcaaagagctggccgtgatgagggcagggatgcaggcgcagcccgtctgactccaaactgccttgctcttaacccgactgcaagaccctcaagaacacgggccccatggttttcctcttatgtttctatcatctctaaaatacaacagcctggtgggcagggcctcctgcactggccatgcccatgcccacggagggcaccccgccacctctgagtggcacccccatcccagtcccagcctacttccgccacgcagaacctggattctccctcaagaggcccagggggctcagccggagcctcccacctccgccccctgccaagggcagcattcccatcagccgcctcttccctcctcggaccccaggctggcaccagctgcagccccggcgggtgtcattccggggcgaggcctcagagactctgcagagccctgggtatgacccaagccggccagagtccttcttccagcagagcttccagaggctcagccgcctgggccatggctcctacggagaggtcttcaaggtgcgctccaaggaggacggccggctctatgcggtaaagcgttccatgtcaccattccggggccccaaggaccgggcccgcaagttggccgaggtgggcagccacgagaaggtggggcagcacccatgctgcgtgcggctggagcaggcctgggaggagggcggcatcctgtacctgcagacggagctgtgcgggcccagcctgcagcaacactgtgaggcctggggtgccagcctgcctgaggcccaggtctggggctacctgcgggacacgctgcttgccctggcccatctgcacagccagggcctggtgcaccttgatgtcaagcctgccaacatcttcctggggccccggggccgctgcaagctgggtgacttcggactgctggtggagctgggtacagcaggagctggtgaggtccaggagggagacccccgctacatggcccccgagctgctgcagggctcctatgggacagcagcggatgtgttcagtctgggcctcaccatcctggaagtggcatgcaacatggagctgccccacggtggggagggctggcagcagctgcgccagggctacctgccccctgagttcactgccggtctgtcttccgagctgcgttctgtccttgtcatgatgctggagccagaccccaagctgcgggccacggccgaggccctgctggcactgcctgtgttgaggcagccgcgggcctggggtgtgctgtggtgcatggcagcggaggccctgagccgagggtgggccctgtggcaggccctgcttgccctgctctgctggctctggcatgggctggctcaccctgccagctggctacagcccctgggcccgccagccaccccgcctggctcaccaccctgcagtttgctcctggacagcagcctctccagcaactgggatgacgacagcctaggtccatgtgttctgaaaaggacagagggggccttggagtgcagccagatggaaggactttgaaggctgtccaagtgctgctttcagagtgcaccaagtttttattgtccctgactgtggctccctgcctgtttgtcaggcgggagcctggagcctgcacagggacagagctggtttcatccggcactccctagccctggacaccctccttgtctcgcctgccctcctgcaggccttcactctcccctgaggctgtcctggcccggactgtggggagcacctccaccccccggagcaggtgcacacccagggatgccctggacctaagtgacatcaactcagagcctcctcggggctccttcccctcctttgagcctcgg

SEQ ID NO: 170856 - DNA, 2308 bp, Homo sapiens
  Payload ID: 13623
  Gene Symbol: PKMYT1
  Gene Name: protein kinase, membrane associated tyrosine/threonine 1
  ENST ID: ENST00000431515
  CDS Start-End: 387-2093
agtcctccgcccgggcgtccggaacagtcgacggcagactccggcccgctgagccacccgaggggtcccgtggcctccgcggacccggaatctgggccctcgcggacccgcgccccgcccagtcgccccagggcttccccacacccacggagtgaagtcagccgcggccctgcctgggaggaacttaccgtctaccgggaaaggtggccagcagatgtgtcgggcctggtgagagggtgaggcgagacggcccgatcgcccagggccccggaagctgcggaggtcacccccgcctggccttagctcagggacaccctggattcacgtgggagcccctgctcctgcctcccccgtcccaccactgaggctgttgggccaggccagtcatgctagaacggcctcctgcactggccatgcccatgcccacggagggcaccccgccacctctgagtggcacccccatcccagtcccagcctacttccgccacgcagaacctggattctccctcaagaggcccagggggctcagccggagcctcccacctccgccccctgccaagggcagcattcccatcagccgcctcttccctcctcggaccccaggctggcaccagctgcagccccggcgggtgtcattccggggcgaggcctcagagactctgcagagccctgggtatgacccaagccggccagagtccttcttccagcagagcttccagaggctcagccgcctgggccatggctcctacggagaggtcttcaaggtgcgctccaaggaggacggccggctctatgcggtaaagcgttccatgtcaccattccggggccccaaggaccgggcccgcaagttggccgaggtgggcagccacgagaaggtggggcagcacccatgctgcgtgcggctggagcaggcctgggaggagggcggcatcctgtacctgcagacggagctgtgcgggcccagcctgcagcaacactgtgaggcctggggtgccagcctgcctgaggcccaggtctggggctacctgcgggacacgctgcttgccctggcccatctgcacagccagggcctggtgcaccttgatgtcaagcctgccaacatcttcctggggccccggggccgctgcaagctgggtgacttcggactgctggtggagctgggtacagcaggagctggtgaggtccaggagggagacccccgctacatggcccccgagctgctgcagggctcctatgggacagcagcggatgtgttcagtctgggcctcaccatcctggaagtggcatgcaacatggagctgccccacggtggggagggctggcagcagctgcgccagggctacctgccccctgagttcactgccggtctgtcttccgagctgcgttctgtccttgtcatgatgctggagccagaccccaagctgcgggccacggccgaggccctgctggcactgcctgtgttgaggcagccgcgggcctggggtgtgctgtggtgcatggcagcggaggccctgagccgagggtgggccctgtggcaggccctgcttgccctgctctgctggctctggcatgggctggctcaccctgccagctggctacagcccctgggcccgccagccaccccgcctggctcaccaccctgcagtttgctcctggacagcagcctctccagcaactgggatgacgacagcctagggccttcactctcccctgaggctgtcctggcccggactgtggggagcacctccaccccccggagcaggtgcacacccagggtcttaacgcccctgaggctgagccctgctgcagaacccagcgctcctggccttgggccagcagctgaagccccatgctgtgtggagcaaagaggtttcctgagcaggcacatcccccggtccttctctgcattccaggcagctccaccaaagtctgcgtgcaacgcccttcatttgcatggacacacgcaaccctcggcgtttgtatggtcattaacatgctcctcccaccacggaagaactttcgaggcccgtaccaaagtagatcctttattcaaaatctgtgggggttttttgactgtttttgctgacctgtgacctctcactgaggacggcagtccaggaccacccccagaggggttcaaagacctccgaaaccagagaccacccccacatacaggtccatggagagggcctggaccatctggacccccacggtcaggccaagtcccagataatagcaccagatgtttcctgtccgacttttggtctccccaaggcgaccagaggccgagctgcccctacacaggcgc

SEQ ID NO: 170857 - DNA, 2061 bp, Homo sapiens
  Payload ID: 13623
  Gene Symbol: PKMYT1
  Gene Name: protein kinase, membrane associated tyrosine/threonine 1
  Uniprot ID: Q99640
  ENST ID: ENST00000440027
  CDS Start-End: 362-1804
agtcgacggcagactccggcccgctgagccacccgaggggtcccgtggcctccgcggacccggaatctgggccctcgcggacccgcgccccgcccagtcgccccagggcttccccacacccacggagtgaagtcagccgcggccctgcctgggaggaacttaccgtctaccgggaaaggtggccagcagatgtgtcgggcctggtgagagggtgaggcgagacggcccgatcgcccagggccccggaagctgcggaggtcacccccgcctggccttagctcagggacaccctggattcacgtgggagcccctgctcctgcctcccccgtcccaccactgaggctgttgggccaggccagtcatgctagaacggcctcctgcactggccatgcccatgcccacggagggcaccccgccacctctgagtggcacccccatcccagtcccagcctacttccgccacgcagaacctggattctccctcaagaggcccagggggctcagccggagcctcccacctccgccccctgccaagggcagcattcccatcagccgcctcttccctcctcggaccccaggctggcaccagctgcagccccggcgggtgtcattccggggcgaggcctcagagactctgcagagccctgggtatgacccaagccggccagagtccttcttccagcagagcttccagaggctcagccgcctgggccatggctcctacggagaggtcttcaaggtgcgctccaaggaggacggccggctctatgcggtaaagcgttccatgtcaccattccggggccccaaggaccgggcccgcaagttggccgaggtgggcagccacgagaaggtggggcagcacccatgctgcgtgcggctggagcaggcctgggaggagggcggcatcctgtacctgcagacggagctgtgcgggcccagcctgcagcaacactgtgaggcctggggtgccagcctgcctgaggcccaggtctggggctacctgcgggacacgctgcttgccctggcccatctgcacagccagggcctggtgcaccttgatgtcaagcctgccaacatcttcctggggccccggggccgctgcaagctgggtgacttcggactgctggtggagctgggtacagcaggagctggtgaggtccaggagggagacccccgctacatggcccccgagctgctgcagggctcctatgggacagcagcggatgtgttcagtctgggcctcaccatcctggaagtggcatgcaacatggagctgccccacggtggggagggctggcagcagctgcgccagggctacctgccccctgagttcactgccggtctgtcttccgagctgcgttctgtccttgtcatgatgctggagccagaccccaagctgcgggccacggccgaggccctgctggcactgcctgtgttgaggcagccgcgggcctggggtgtgctgtggtgcatggcagcggaggccctgagccgagggtgggccctgtggcaggccctgcttgccctgctctgctggctctggcatgggctggctcaccctgccagctggctacagcccctgggcccgccagccaccccgcctggctcaccaccctgcagtttgctcctggacagcagcctctccagcaactgggatgacgacagcctaggccctggacaccctccttgtctcgcctgccctcctgcaggccttcactctcccctgaggctgtcctggcccggactgtggggagcacctccaccccccggagcaggtgcacacccagggatgccctggacctaagtgacatcaactcagagcctcctcggggctccttcccctcctttgagcctcggaacctcctcagcctgtttgaggacaccctagacccaacctgagccccagactctgcctctgcacttttaaccttttatcctgtgtctctcccgtcgcccttgaaagctggggcccctcgggaactcccatggtcttctctgcctggccgtgtctaataaaaagtatttgaaccttgggagcacccaagcttgctcatgtggcaa

SEQ ID NO: 170858 - DNA, 1091 bp, Homo sapiens
  Payload ID: 13623
  Gene Symbol: PKMYT1
  Gene Name: protein kinase, membrane associated tyrosine/threonine 1
  ENST ID: ENST00000576268
  CDS Start-End: 268-1091
acgggccgttccccctcacgggagtcctccgcccgggcgtccggaacagtcgacggcagactccggcccgctgagccacccgaggggtcccgtggcctccgcggacccggaatctgggccctcgcggacccgcgccccgcccagtcgccccagggcttccccacacccacggagtgaagtcagccgcggccctgcctgggaggaacttaccgtctaccgggaaaggtggccagcagatgtgtcgggcctgggcctcctgcactggccatgcccatgcccacggagggcaccccgccacctctgagtggcacccccatcccagtcccagcctacttccgccacgcagaacctggattctccctcaagaggcccagggggctcagccggagcctcccacctccgccccctgccaagggcagcattcccatcagccgcctcttccctcctcggaccccaggctggcaccagctgcagccccggcgggtgtcattccggggcgaggcctcagagactctgcagagccctgggtatgacccaagccggccagagtccttcttccagcagagcttccagaggctcagccgcctgggccatggctcctacggagaggtcttcaaggtgcgctccaaggaggacggccggctctatgcggtaaagcgttccatgtcaccattccggggccccaaggaccgggcccgcaagttggccgaggtgggcagccacgagaaggtggggcagcacccatgctgcgtgcggctggagcaggcctgggaggagggcggcatcctgtacctgcagacggagctgtgcgggcccagcctgcagcaacactgtgaggcctggggtgccagcctgcctgaggcccaggtctggggctacctgcgggacacgctgcttgccctggcccatctgcacagccagggcctggtgcaccttgatgtcaagcctgccaacatcttcctggggccccggggccgctgcaagctgggtgacttcggactgctggtggagctgggtacagcaggagctggtgaggtccaggagggagacccccgctacatggcccccgagctgctgcagggctcctatgg

SEQ ID NO: 170859 - DNA, 880 bp, Homo sapiens
  Payload ID: 13623
  Gene Symbol: PKMYT1
  Gene Name: protein kinase, membrane associated tyrosine/threonine 1
  ENST ID: ENST00000572059
  CDS Start-End: 439-880
cgtccggaacagtcgacggcagactccggcccgctgagccacccgaggggtcccgtggcctccgcggacccggaatctgggccctcgcggacccgcgccccgcccagtcgccccaggtgagcccagaccccgccgtgaggggcctcggcgtggccacctcgccgctcccctccgcctcgccagggcttccccacacccacggagtgaagtcagccgcggccctgcctgggaggaacttaccgtctaccgggaaaggtggccagcagatgtgtcgggcctggtgagagggtgaggcgagacggcccgatcgcccagggccccggaagctgcggaggtcacccccgcctggccttagctcagggacaccctggattcacgtgggagcccctgctcctgcctcccccgtcccaccactgaggctgttgggccaggccagtcatgctagaacggcctcctgcactggccatgcccatgcccacggagggcaccccgccacctctgagtggcacccccatcccagtcccagcctacttccgccacgcagaacctggattctccctcaagaggcccagggggctcagccggagcctcccacctccgccccctgccaagggcagcattcccatcagccgcctcttccctcctcggaccccaggctggcaccagctgcagccccggcgggtgtcattccggggcgaggcctcagagactctgcagagccctgggtatgacccaagccggccagagtccttcttccagcagagcttccagaggctcagccgcctgggccatggctcctacggagaggtcttcaaggtgcgctccaaggaggacggccggctctatgcggtaaagcgttccatgtcaccattccggggcc

SEQ ID NO: 170860 - DNA, 1892 bp, Homo sapiens
  Payload ID: 13623
  Gene Symbol: PKMYT1
  Gene Name: protein kinase, membrane associated tyrosine/threonine 1
  Uniprot ID: Q99640
  ENST ID: ENST00000574385
  CDS Start-End: 286-1758
ctcacgggagtcctccgcccgggcgtccggaacagtcgacggcagactccggcccgctgagccacccgaggggtcccgtggcctccgcggacccggaatctgggccctcgcggacccgcgccccgcccagtcgccccagcccgtccactgctctgttcgccagggcttccccacacccacggagtgaagtcagccgcggccctgcctgggaggaacttaccgtctaccgggaaaggtggccagcagatgtgtcgggcctggtgagaggggcctcctgcactggccatgcccatgcccacggagggcaccccgccacctctgagtggcacccccatcccagtcccagcctacttccgccacgcagaacctggattctccctcaagaggcccagggggctcagccggagcctcccacctccgccccctgccaagggcagcattcccatcagccgcctcttccctcctcggaccccaggctggcaccagctgcagccccggcgggtgtcattccggggcgaggcctcagagactctgcagagccctgggtatgacccaagccggccagagtccttcttccagcagagcttccagaggctcagccgcctgggccatggctcctacggagaggtcttcaaggtgcgctccaaggaggacggccggctctatgcggtaaagcgttccatgtcaccattccggggccccaaggaccgggcccgcaagttggccgaggtgggcagccacgagaaggtggggcagcacccatgctgcgtgcggctggagcaggcctgggaggagggcggcatcctgtacctgcagacggagctgtgcgggcccagcctgcagcaacactgtgaggcctggggtgccagcctgcctgaggcccaggtctggggctacctgcgggacacgctgcttgccctggcccatctgcacagccagggcctggtgcaccttgatgtcaagcctgccaacatcttcctggggccccggggccgctgcaagctgggtgacttcggactgctggtggagctgggtacagcaggagctggtgaggtccaggagggagacccccgctacatggcccccgagctgctgcagggctcctatgggacagcagcggatgtgttcagtctgggcctcaccatcctggaagtggcatgcaacatggagctgccccacggtggggagggctggcagcagctgcgccagggctacctgccccctgagttcactgccggtctgtcttccgagctgcgttctgtccttgtcatgatgctggagccagaccccaagctgcgggccacggccgaggccctgctggcactgcctgtgttgaggcagccgcgggcctggggtgtgctgtggtgcatggcagcggaggccctgagccgagggtgggccctgtggcaggccctgcttgccctgctctgctggctctggcatgggctggctcaccctgccagctggctacagcccctgggcccgccagccaccccgcctggctcaccaccctgcagtttgctcctggacagcagcctctccagcaactgggatgacgacagcctagggccttcactctcccctgaggctgtcctggcccggactgtggggagcacctccaccccccggagcaggtgcacacccagggatgccctggacctaagtgacatcaactcagagcctcctcggggctccttcccctcctttgagcctcggaacctcctcagcctgtttgaggacaccctagacccaacctgagccccagactctgcctctgcacttttaaccttttatcctgtgtctctcccgtcgcccttgaaagctggggcccctcgggaactcccatggtcttctctgcctggccgtgtctaataaaaagtatttgaaccttg

SEQ ID NO: 170861 - DNA, 1891 bp, Homo sapiens
  Payload ID: 13623
  Gene Symbol: PKMYT1
  Gene Name: protein kinase, membrane associated tyrosine/threonine 1
  Uniprot ID: Q99640
  ENST ID: ENST00000573944
  CDS Start-End: 317-1789
ccggtttggaatttttggcgcgagcagctccgcgcgcgttcacgggccgttccccctcacgggagtcctccgcccgggcgtccggaacagtcgacggcagactccggcccgctgagccacccgaggggtcccgtggcctccgcggacccggaatctgggccctcgcggacccgcgccccgcccagtcgccccagggcttccccacacccacggagtgaagtcagccgcggccctgcctgggaggaacttaccgtctaccgggaaaggtggccagcagatgtgtcgggcctggtgagaggggcctcctgcactggccatgcccatgcccacggagggcaccccgccacctctgagtggcacccccatcccagtcccagcctacttccgccacgcagaacctggattctccctcaagaggcccagggggctcagccggagcctcccacctccgccccctgccaagggcagcattcccatcagccgcctcttccctcctcggaccccaggctggcaccagctgcagccccggcgggtgtcattccggggcgaggcctcagagactctgcagagccctgggtatgacccaagccggccagagtccttcttccagcagagcttccagaggctcagccgcctgggccatggctcctacggagaggtcttcaaggtgcgctccaaggaggacggccggctctatgcggtaaagcgttccatgtcaccattccggggccccaaggaccgggcccgcaagttggccgaggtgggcagccacgagaaggtggggcagcacccatgctgcgtgcggctggagcaggcctgggaggagggcggcatcctgtacctgcagacggagctgtgcgggcccagcctgcagcaacactgtgaggcctggggtgccagcctgcctgaggcccaggtctggggctacctgcgggacacgctgcttgccctggcccatctgcacagccagggcctggtgcaccttgatgtcaagcctgccaacatcttcctggggccccggggccgctgcaagctgggtgacttcggactgctggtggagctgggtacagcaggagctggtgaggtccaggagggagacccccgctacatggcccccgagctgctgcagggctcctatgggacagcagcggatgtgttcagtctgggcctcaccatcctggaagtggcatgcaacatggagctgccccacggtggggagggctggcagcagctgcgccagggctacctgccccctgagttcactgccggtctgtcttccgagctgcgttctgtccttgtcatgatgctggagccagaccccaagctgcgggccacggccgaggccctgctggcactgcctgtgttgaggcagccgcgggcctggggtgtgctgtggtgcatggcagcggaggccctgagccgagggtgggccctgtggcaggccctgcttgccctgctctgctggctctggcatgggctggctcaccctgccagctggctacagcccctgggcccgccagccaccccgcctggctcaccaccctgcagtttgctcctggacagcagcctctccagcaactgggatgacgacagcctagggccttcactctcccctgaggctgtcctggcccggactgtggggagcacctccaccccccggagcaggtgcacacccagggatgccctggacctaagtgacatcaactcagagcctcctcggggctccttcccctcctttgagcctcggaacctcctcagcctgtttgaggacaccctagacccaacctgagccccagactctgcctctgcacttttaaccttttatcctgtgtctctcccgtcgcccttgaaagctggggcccctcgggaactcccatggtcttctctgcct

SEQ ID NO: 170862 - DNA, 605 bp, Homo sapiens
  Payload ID: 13623
  Gene Symbol: PKMYT1
  Gene Name: protein kinase, membrane associated tyrosine/threonine 1
  ENST ID: ENST00000575040
  CDS Start-End: 1-181
agccgagggtgggccctgtggcaggccctgcttgccctgctctgctggctctggcatgggctggctcaccctgccagctggctacagcccctgggcccgccagccaccccgcctggctcaccaccctgcagtttgctcctggacagcagcctctccagcaactgggatgacgacagcctagggccttcactctcccctgaggctgtcctggcccggactgtggggagcacctccaccccccggagcaggtgcacacccaggtaagcaggtccaggggctggggtgggcagggctagcttttggatcctgagtgtcactactctctcctcccagggatgccctggacctaagtgacatcaactcagagcctcctcggggctccttcccctcctttgagcctcggaacctcctcagcctgtttgaggacaccctagacccaacctgagccccagactctgcctctgcacttttaaccttttatcctgtgtctctcccgtcgcccttgaaagctggggcccctcgggaactcccatggtcttctctgcctggccgtgtctaataaaaagtatttgaaccttgggagcacccaagcttgctcatgtggc

SEQ ID NO: 170863 - DNA, 1006 bp, Homo sapiens
  Payload ID: 13623
  Gene Symbol: PKMYT1
  Gene Name: protein kinase, membrane associated tyrosine/threonine 1
  ENST ID: ENST00000574415
  CDS Start-End: 361-1006
gggccctcgcggacccgcgccccgcccagtcgccccaggtgagcccagaccccgccgtgaggggcctcggcgtggccacctcgccgctcccctccgcctcgccagggcttccccacacccacggagtgaagtcagccgcggccctgcctgggaggaacttaccgtctaccgggaaaggtggccagcagatgtgtcgggcctggtgagagggtgaggcgagacggcccgatcgcccagggccccggaagctgcggaggtcacccccgcctggccttagctcagggacaccctggattcacgtgggagcccctgctcctgcctcccccgtcccaccactgaggctgttgggccaggccagtcatgctagaacggcctcctgcactggccatgcccatgcccacggagggcaccccgccacctctgagtggcacccccatcccagtcccagcctacttccgccacgcagaacctggattctccctcaagaggcccagggggctcagccggagcctcccacctccgccccctgccaagggcagcattcccatcagccgcctcttccctcctcggaccccaggctggcaccagctgcagccccggcgggtgtcattccggggcgaggcctcagagactctgcagagccctgggtatgacccaagccggccagagtccttcttccagcagagcttccagaggctcagccgcctgggccatggctcctacggagaggtcttcaagctgctttttccacctcgtgacacatccaagaggtcccctggggtcagtgcaggtcggccctggctcctccgtcgctgggtctccacagacccagcccgagggatggaggtgcgctccaaggaggacggccggctctatgcggtaaagcgttccatgtcaccattccggggccccaaggaccgggcccgcaagttggccgaggtgggcagccacgagaaggtggggcagcacccatgctgcgtgcggctggagcaggcctgggaggagg

SEQ ID NO: 170864 - DNA, 1806 bp, Homo sapiens
  Payload ID: 13623
  Gene Symbol: PKMYT1
  Gene Name: protein kinase, membrane associated tyrosine/threonine 1
  Uniprot ID: Q99640
  ENST ID: ENST00000574730
  CDS Start-End: 410-1702
cacgggccgttccccctcacgggagtcctccgcccgggcgtccggaacagtcgacggcagactccggcccgctgagccacccgaggggtcccgtggcctccgcggacccggaatctgggccctcgcggacccgcgccccgcccagtcgccccagggcttccccacacccacggagtgaagtcagccgcggccctgcctgggaggaacttaccgtctaccgggaaaggtggccagcagatgtgtcgggcctggtgagagggtgaggcgagacggcccgatcgcccagggccccggaagctgcggaggtcacccccgcctggccttagctcagggacaccctggattcacgtgggagcccctgctcctgcctcccccgtcccaccactgaggctgttgggccaggccagtcatgctagaacgctggcaccagctgcagccccggcgggtgtcattccggggcgaggcctcagagactctgcagagccctgggtatgacccaagccggccagagtccttcttccagcagagcttccagaggctcagccgcctgggccatggctcctacggagaggtcttcaaggtgcgctccaaggaggacggccggctctatgcggtaaagcgttccatgtcaccattccggggccccaaggaccgggcccgcaagttggccgaggtgggcagccacgagaaggtggggcagcacccatgctgcgtgcggctggagcaggcctgggaggagggcggcatcctgtacctgcagacggagctgtgcgggcccagcctgcagcaacactgtgaggcctggggtgccagcctgcctgaggcccaggtctggggctacctgcgggacacgctgcttgccctggcccatctgcacagccagggcctggtgcaccttgatgtcaagcctgccaacatcttcctggggccccggggccgctgcaagctgggtgacttcggactgctggtggagctgggtacagcaggagctggtgaggtccaggagggagacccccgctacatggcccccgagctgctgcagggctcctatgggacagcagcggatgtgttcagtctgggcctcaccatcctggaagtggcatgcaacatggagctgccccacggtggggagggctggcagcagctgcgccagggctacctgccccctgagttcactgccggtctgtcttccgagctgcgttctgtccttgtcatgatgctggagccagaccccaagctgcgggccacggccgaggccctgctggcactgcctgtgttgaggcagccgcgggcctggggtgtgctgtggtgcatggcagcggaggccctgagccgagggtgggccctgtggcaggccctgcttgccctgctctgctggctctggcatgggctggctcaccctgccagctggctacagcccctgggcccgccagccaccccgcctggctcaccaccctgcagtttgctcctggacagcagcctctccagcaactgggatgacgacagcctagggccttcactctcccctgaggctgtcctggcccggactgtggggagcacctccaccccccggagcaggtgcacacccagggatgccctggacctaagtgacatcaactcagagcctcctcggggctccttcccctcctttgagcctcggaacctcctcagcctgtttgaggacaccctagacccaacctgagccccagactctgcctctgcacttttaaccttttatcctgtgtctctcccgtcgcccttgaaagctggggcccctcgggaactcccatggtcttctctgcctgg

SEQ ID NO: 170865 - DNA, 979 bp, Homo sapiens
  Payload ID: 13623
  Gene Symbol: PKMYT1
  Gene Name: protein kinase, membrane associated tyrosine/threonine 1
  ENST ID: ENST00000575632
  CDS Start-End: 471-979
gtttggaatttttggcgcgagcagctccgcgcgcgttcacgggccgttccccctcacgggagtcctccgcccgggcgtccggaacagtcgacggcagactccggcccgctgagccacccgaggggtcccgtggcctccgcggacccggaatctgggccctcgcggacccgcgccccgcccagtcgccccagcccgtccactgctctgttcgccagggcttccccacacccacggagtgaagtcagccgcggccctgcctgggaggaacttaccgtctaccgggaaaggtggccagcagatgtgtcgggcctggtgagagggtgaggcgagacggcccgatcgcccagggccccggaagctgcggaggtcacccccgcctggccttagctcagggacaccctggattcacgtgggagcccctgctcctgcctcccccgtcccaccactgaggctgttgggccaggccagtcatgctagaacggcctcctgcactggccatgcccatgcccacggagggcaccccgccacctctgagtggcacccccatcccagtcccagcctacttccgccacgcagaacctggattctccctcaagaggcccagggggctcagccggagcctcccacctccgccccctgccaagggcagcattcccatcagccgcctcttccctcctcggaccccaggctggcaccagctgcagccccggcgggtgtcattccggggcgaggcctcagagactctgcagagccctgggtatgacccaagccggccagagtccttcttccagcagagcttccagaggctcagccgcctgggccatggctcctacggagaggtcttcaaggtgcgctccaaggaggacggccggctctatgcggtaaagcgttccatgtcaccattccggggccccaaggaccgggcccgcaagttggccgaggtgggcagccacgagaaggtggggcagcacccatgctg

SEQ ID NO: 170866 - DNA, 495 bp, Homo sapiens
  Payload ID: 13623
  Gene Symbol: PKMYT1
  Gene Name: protein kinase, membrane associated tyrosine/threonine 1
  ENST ID: ENST00000572619
  CDS Start-End: 344-495
agcccagaccccgccgtgaggggcctcggcgtggccacctcgccgctcccctccgcctcgccagcccgtccactgctctgttcgccagggcttccccacacccacggagtgaagtcagccgcggccctgcctgggaggaacttaccgtctaccgggaaaggtggccagcagatgtgtcgggcctggtgagagggtgaggcgagacggcccgatcgcccagggccccggaagctgcggaggtcacccccgcctggccttagctcagggacaccctggattcacgtgggagcccctgctcctgcctcccccgtcccaccactgaggctgttgggccaggccagtcatgctagaacggcctcctgcactggccatgcccatgcccacggagggcaccccgccacctctgagtggcacccccatcccagtcccagcctacttccgccacgcagaacctggattctccctcaagaggcccagggggctcagccggagcct

SEQ ID NO: 170867 - DNA, 6031 bp, Homo sapiens
  Payload ID: 13624
  Gene Symbol: PRKX
  Gene Name: protein kinase, X-linked
  Uniprot ID: P51817
  ENST ID: ENST00000262848
  CDS Start-End: 356-1432
gagctggaggaggcggcgggcgcgagacccggaatgcgcagggcccccgcctcgccccccccagcccgggccgcggcccccgccttccccgcagtcgtcccgcactcggtgcccgccccccgaggccggcggctgctcccactcggggccgttgctgcttgtgccgtgagcgccgcccagccattgtccccgtcgctccgtcagccgcgccggaccgcgcaccaggaggcgagagcgcgcatggggagcctctgttgatgccgccgccgcgccgccctccgaggctgcgtcccgggaagcccggctccccgagcgctccggcctggcccggtgccccggacctgagtgcgtccccatggaggcgcccgggctggcccaggcggccgcggcggagagcgactcccgcaaggtggcggaggagacccccgacggggcgcccgcgctctgccccagccctgaggcgctgtcgccggagccgcctgtgtacagcctgcaggactttgacacgctggccaccgtgggcactgggacgttcgggcgggtgcacctggtgaaggagaagacagccaagcatttcttcgccctcaaggtgatgagcattcccgacgtcatccgcctaaagcaggagcaacacgtacacaatgagaagtctgtcctgaaggaagtcagccacccgttcctcatcaggctgttctggacgtggcatgacgagcgcttcctctacatgctcatggagtacgtgccgggcggcgagctcttcagctacctgcgcaaccgggggcgcttctccagcaccacggggctcttctactctgcagagatcatctgtgccatcgagtacctgcactccaaagagatcgtctacagggacttgaagccagagaacatcctgctggatagggatggccacattaagctcacggactttgggttcgccaagaagctggtagacaggacttggaccctctgtggaacacccgagtacctagcccccgaagtcattcagagcaagggccacggaagggccgtggactggtgggccctcggcatcctgatattcgagatgctttcggggtttcctccgttttttgatgacaacccgtttggcatttatcagaaaattcttgcaggcaaaatagatttccccagacatttggatttccatgtaaaagacctcattaagaaactgctcgtggttgacagaacaaggcgattaggaaacatgaagaacggggcgaatgatgtgaagcatcatcggtggttccgctccgtggactgggaagctgttccgcagagaaaactgaagcctcccatcgtgcccaagatagctggtgacggcgacacttccaacttcgaaacttaccctgagaatgactgggacacagccgcgcccgtgccgcagaaggatttagaaatcttcaagaatttctgaggacaggagctcacatctggaagaaacaggaagattggaatctgcctggaacaaagaactgcacctaagcagaccagaagcaaaatgtcttcttcacggcataaggacatctccacttttctctgtacctgtgtgtatagaaatagattagagcacagttgaaattcatggaactggcattatttaagcaactggaattccacactgtaggaaggttttgaaaattgtttggttgtagattttatcttatcctttagtgttgtgttcctactgtgatgtcttggtttttgtcatagacttaagtttataagtttgaactggacttgttcgattataaccacaaattgtgtgtgtgtgtgtgtgtgtgtgtgtgtgtgtgtgtgtgtgtgtatgcctgtgtgtatatatagaagtcattatggcagatgcacagaaattgtgcagtgatgtaaatgttcatactttacagagcctataatttttatttttcaatttgttttttcaaaaatctcttctcggggacaacatctgaagggtatgttgcatgcattaaaaaaaatcatctcacatgcattttatagttttggggaagaaaatatcatggggaggtctaccttcagtatctttagtgcttcttacctggtaacttgagactttaaaagaagaaacaaagaggggaagatatgggagcgaatttattccaagaatctacaatgacattgaagttgttggaggaatgtactgtatttaaaaaaaccttctgtgacacattcaaaaatttcatctgagctggatgcagtggcttgttcctatagtcccagcactttgggaggctgaggtgggtggattgcttgagcccaggagttggagaccagtctgggaaacgtggtgagacctcatctctacaaaatacaaaaaaattagccgggcatggtggcacgtgagtgtagtctcagctactcaggaggctgagatgagaggatcacttgagcctggggaggtccaggccgcagtgatccgagatcacaccactgcattccagcctgggtgacagagtgagaccctgtccaaaaaaaaaaaaaaaaaaaaagaaggcaatggctttgtgcttttgaagatggattgaagagaacgtccaccttaaggctttaaaagacagtgaagctgggtgcggtggtgcactcctgtaaccctgggactttgggaagctgaggcaggaagattgagcctaggagttcgagaccgacctgggcagcatagcgagaccccatctctatataaaaaaaaagatgttaaaacagtgaaattacagaaacagaacatagccaccctttttcatcagtgaccttttcttcacgtggaggtcaactcagtaggtgagaataattagtaggttcagcagaataaactctttacaattaataactcagtggaaaatgatgttcagatggtgaaatgtggaaatgttttagacaactctattttcagcctgtgcttctcactcaccatcctgttgggattaacagttgagggccatcgctgcctaaacatttagcgtgcggtttcccatcagttttaccgtgaatgtgaaaaggtgaaactggtgctgacttcggcagcaggtatactaaaattggaatgacacagaggagattagcatggccccctgcgcgaggaagatctgcagattcatgcagcattccatatttttttaagaaaaggttacactgtgcaccgacatgtggagctagaaggaaaagcttttaagtctcatgtttgctgactataaaaataaatcatagtaataatattgaacattctactttaaaaattattaataaaaccataaatgaaacacttgagcacactttaaaaagtacataaatccatgagtccatatgcctatttttaggttgtctgttttattatccaggatttcatactcagatgagaattagcatcaggaaagcctgaaatgccttaattgtgaactgatatgcaggaaaatgaaatatgcaagcacattggtgaccttgttctttacagacgtcgtgatcagcctccagccatacagaacaaatgagaaattagaagcgattccaagaacgtgtgatggtgtgaaacccactttggaccatcacacacatttcagcatttgaagtgacacaagctacctggtaactgcccatggcggggtcatagtttaaatggcccaatgtcatgtagaggttaatttaatcaaaatgagctataaacatggagcaatcactgtataattttaaaatagtttacctggccaggcatggtggctcacgcctgtaatcccagcactttgggaggccgaggcaggtggatcacctgaggtcaggagttcgagaccagcctggccaacatggcaaaacccccatctctactaaaatacaaaaattaggtgtggtggcgggcacctgtaatcctggctactcgggaggctgaggcaggagaatcgcttgaacccgggaggcagaggctgcagtaagccgagatcgtgccactgcactccagcctgggccacagagcaagactccgtctcaaaacataaaaataaaaaaaatacaaatagctgacccgggtgggcattccaaaatgtccgcatggacgatcacgaaacaatcacggtgcgaaatgtccgcatggatgatcacgaaacaatcacggtgcagaatgtccgtatggatgatcatgacaaacaatcactgcgcaaaatgtggaggaaaattcattaccataatcacaacatttgtatcagaaaaacattacaaatttactttgcttcatgtaattttacgagttggcaatattttcttaaattggaatactctaagagaataggacatggatatgttacaagaagaagtgtattggggcaagtcttgtttttctgaagggaaatgccaccggcctgctttcataggcattgataaagccaggaaggaaataaagtcacaaccaaatagtatacactgtctctactgaattcttctaattccttcgcaacagaagtctaaatcctgcttagcctaaacatatctatagccagcgatgggcaaattatatttgctgtcagcatgatagaataagaagcagaaaccccccagcagtggggtaagattgcgcgcttcatcccctcaaaatgcagttcagccccactccctctccatgcccatcaaacaactgcacaatcacttgttactgaatttcccattcagcgttttgtttctttctgtccatacttaaagaccaaatcatttgtttgctttgaagaaaaagcaaaaacaagaacaaaaacaccaaatcatttgaaatcactgtccattaaaaaaaatcaccagtggaactaaacagttgagtggtttgggatgtgttcgccatttctgtgtttgacctacatggcctctaattctttggaccattgtaactgtgaaactatggcttaatactgttaaagaccccaaggctccactctgtagccaggtgcacctcaggctgcacaaataccccaccagaatgtcacaatcattcattgctccagctactgagtgaacagggtgcaagacagcactggcttgggttgtatttttgcagccagttaactttgcatcaggtctacacagtccttgcagcctttgatttctccagttgtagagatttgaaatggggtgcccgggttcctctcgtttttccttcaatctacctagcatgcattttacacacattggaggagtcgtatgcactgtttttctgttgctgatggaggcaagcaggccttctaattagtctaacttaaacggatgggattcacttaacaaaagcaagaagaaaagcacacgaacaggtgtcttaatgcatttggatagtttctttgcggggtgtgtgtgtgtgtgtgtgtgtgtgtgtgtgtgtgtgtgtgtgtgtgtcttggtgaaggtgaggggctgtattttcaccaagccttttcataatcaagtttgctttgcaaaccttatggccttgcaccccgcagaacagtcccttcctaatagcagggatgctctgtcatggttttctgtaaattatcgtgtgttgggaagttctgttgaggcttagtttgatcttccatggtggacacgtctgttctgtatgtaaaaggcattacaattgtgttttagcagatgagacttgaagcctttccacagtccttgtgctctgagatggctgttgagctctgctcaactgtcgtagctgaattctttctttgcgctgaacactgggcagcctcaccatgttgccaacgtgcttctggggcccctgtcactgccgccggatgccgcgcacacaggcagagtgccttggcaggtttgtgcaccccttggcgagccagaactgggaaccccgcggggtgaccccttctcatggggggtcggggaggggagtgcctatttttaatcctgtctgtttgttgcacaatggaaatcactgtgatttgtacatatgccctaggaaaattttactgctgtctaatttatgtaataatactgttgattccaggtttgtttaataaaactttgtatcttttcagaa

SEQ ID NO: 170868 - DNA, 1507 bp, Homo sapiens
  Payload ID: 13625
  Gene Symbol: POFUT1
  Gene Name: protein O-fucosyltransferase 1
  Uniprot ID: Q9H488
  ENST ID: ENST00000375730
  CDS Start-End: 50-634
cttccctccccgactgtgcgccgcggctggctcgggttcccgggccgacatgggcgccgccgcgtgggcacggccgctgagcgtgtctttcctgctgctgcttctgccgctcccggggatgcctgcgggctcctgggacccggccggttacctgctctactgcccctgcatggggcgctttgggaaccaggccgatcacttcttgggctctctggcatttgcaaagctgctaaaccgtaccttggctgtccctccttggattgagtaccagcatcacaagcctcctttcaccaacctccatgtgtcctaccagaagtacttcaagctggagcccctccaggcttaccatcgggtcatcagcttggaggatttcatggagaagctggcacccacccactggccccctgagaagcgggtggcatactgctttgaggtggcagcccagcgaagcccagataagaagacgtgccccatgaaggaaggaaacccctttggcccattctgggatcagtttcatgtgagtttcaacaagtcggagctttttacaggcatttccttcagtgcttcctacagagaacaatggagccagaggcgtgagaatcactcctgtgttaccttactcttcccaaggtgaaactggaagcagcttctagagaacagcttcaggtgcagaccgagaaatgacgtcatcctgataattattggacgtgtttattaattgcaccccattagcccctgtttttaaaaaatataggttagcaggacgtgggcacaggccgtgaaacatttatagggcgcctgtcacgtgtgagacatagtaatcagaggccaatggtgatgtgtgaaaatgaggatgaccagctctggttttctaggagctatggtctcataatgacaataatcagcatagtgtacttgtccttaatgttatagcatggcaggaaagaccatgggcttagaaggcagacattggttaggaggtgcagggaacatactaattcatgtgcggtcaaagcacttggcatttaatagggcaaaggtaaacagatgtagagaaatgagtctcatgcctgtaatcccagcactttgggaggccaaggtgggtggatcacttgagcctaagagatcaaggctgcagtgagccatgatggtacccctgcactccagcccaggttacagagcaagggcctgtctcagcaaaacaaaacaagcacaggccaaggagtgagatagccagcgctgatggtatctgcctcgtagtgcatgaagtgcatgtcatacactaagcagccagccagtgttggctgtcagtgttattactcacatgctttattttatttaagactttgagatagttcatgaagtgggtattattatcaatttccattttataggtgaggaaactgagcccagtgaagttaaataacttcccaaggtcattgagctgttgagtggacagctcaggtctgtttgtaaatctttaataaataacaacagctaagattca

SEQ ID NO: 170869 - DNA, 5235 bp, Homo sapiens
  Payload ID: 13625
  Gene Symbol: POFUT1
  Gene Name: protein O-fucosyltransferase 1
  Uniprot ID: Q9H488
  ENST ID: ENST00000375749
  CDS Start-End: 63-1229
gctcgcgtccctccttccctccccgactgtgcgccgcggctggctcgggttcccgggccgacatgggcgccgccgcgtgggcacggccgctgagcgtgtctttcctgctgctgcttctgccgctcccggggatgcctgcgggctcctgggacccggccggttacctgctctactgcccctgcatggggcgctttgggaaccaggccgatcacttcttgggctctctggcatttgcaaagctgctaaaccgtaccttggctgtccctccttggattgagtaccagcatcacaagcctcctttcaccaacctccatgtgtcctaccagaagtacttcaagctggagcccctccaggcttaccatcgggtcatcagcttggaggatttcatggagaagctggcacccacccactggccccctgagaagcgggtggcatactgctttgaggtggcagcccagcgaagcccagataagaagacgtgccccatgaaggaaggaaacccctttggcccattctgggatcagtttcatgtgagtttcaacaagtcggagctttttacaggcatttccttcagtgcttcctacagagaacaatggagccagagattttctccaaaggaacatccggtgcttgccctgccaggagccccagcccagttccccgtcctagaggaacacaggccactacagaagtacatggtatggtcagacgaaatggtgaagacgggagaggcccagattcatgcccaccttgtccggccctatgtgggcattcatctgcgcattggctctgactggaagaacgcctgtgccatgctgaaggacgggactgcaggctcgcacttcatggcctctccgcagtgtgtgggctacagccgcagcacagcggcccccctcacgatgactatgtgcctgcctgacctgaaggagatccagagggctgtgaagctctgggtgaggtcgctggatgcccagtcggtctacgttgctactgattccgagagttatgtgcctgagctccaacagctcttcaaagggaaggtgaaggtggtgagcctgaagcctgaggtggcccaggtcgacctgtacatcctcggccaagccgaccactttattggcaactgtgtctcctccttcactgcctttgtgaagcgggagcgggacctccaggggaggccgtcttctttcttcggcatggacaggccccctaagctgcgggacgagttctgattctggccggagcaccagaccctctgatcctggagggaccagagtctgagctggtccttccagccaggcctggcagccagaggtgctccgggattgcaaactcctcttctcacctgccaaagatggagaagagtgccagggacccctcaaggagggagacgctccatatcccagggcataggacttgcaggttcctaggagcaggagcatctcccatcgcacgtgctttctgctcttctgggaatttctcacactggcaaagcagtccagcctccgtcttctggtccactctgctctgagcagcctgggatgctgaactcttcagagagatttttttatagagagatttctataattttgatacaaggtcatgactatcctagaactctctgtggtttttgaaaatcattgaattctattaatgtaggtacctaaagtgaccttaactgaatgtggatgaggctggggctggtgtgggtcttttggctgcttttcaaggtgtcccccaatgtggccctcaagagccatccccactgcctggccagagccattgttgtcccctacttcctaggccatttctggggcttgggggatgaatgctgtcctgtgctgtaaacactatgcaaatggaagttatcggttgtggtgctgtgcagcgctctgtgggcgactaagtgccactcacgcagcatgttcctggcaaggagcacataccatcaagccacactatcatggtattgttctcacagtcttttggtggttgatggccactgcaaacctggcaccatcagatctcttctgatctcttgccccagtggggcctggttggtagaatgttggcattcggttgatatccaaagcctgttctcccagccgtcctcctgcagctggagccttcaggccgtattctcacgagggaacgtttgccaaggctctgacctcacagaagatgcccagggcccagaagccatcagaattatcagtggagaagcaccttttgactcttcccttccaatgtaatctctgccaacaccatgaggcttaaggtgctctaagtcatgagtgttttggtctcaaatgctgcagttttaataatctgtgactcctgagagcccatggttttttgaccttgtggttctaaaattccttgtctgacccctgtagatcttttccttgccatgtcacctcccttggcctttgatcctggaaaggtggcagagcctccactgagccaggcccagagctccttgcagtgccttcttccttgtttacctgtgggaggaaacactttttttgtcaggggcagcctggttcagagctcagaggtcacactgtatcaaagatctcaaacagcaaagtcagcatttgctgtatagagctgccacccaactctaagcaggagaaactgtacagaaagggctttgctatttttcccttttgggaaaacaatgaagtgttttaagtcctgggtggactgagagatggtttgcctgtccagacttgctctcaagcctcatccagagaaggagctgcagatgagggagcccgtacactccctgccaccactaggttgtaagcctgtagctggctggctgatttcattttggaattcatttgccatccacagccttacactaggcacacactttagagtctggggctccagtggggcccgcctaattttttttccccccaagacagggccttgctctgtctcccaggctggagtgcagtggcatgatcatggcttactgcagccttgatctcccaggctcaagcgatccttctgcctcagcctctctggtagctgagactgcatgcccagctccaaatcaccttgattcatatcagcagtaataatcacttgtgttctgaaagaaagggcaccagaagttctagcaaaattcagttgtgttctgtgagctagcactttttcctctgacccaattttcttacctataaaatggtgataaaaaccgacaggttgttcaaaggcccagatcagctaaagcatgtatataagagcacgttgtaaacttgaaagagacaaaggcacaaatgtggctgttgattaatttgactgcttctcgttgctcgtcacctccatgccaggcactgtgcttgctaattgctttatgggggcattctcttatttattccccagccctgggaaataggagctgtcattatccttctctttctgcacaaggaaaaattaatgccctgagaattgtcataattttcccaaggctgcccagctggtggtgttaagccagaatttgacctcccagagccagtttccattagctgccatgctctgctgcctctaattcacagaatgcactttctaccctgtgtgccatggagacctcctatggaaaaatgatcagccaccttaccttctactgggtacctgctgtgagtctgcctatgccagaaggattaaggaggggaggttacccaagaaacaaagcctacatgccgcttacagcccccgttggatggttgctcagtacaacagtcttgcattcagcaggtgtttgttcatcacctactatgtgtcaggctctatgctaggtactggggatacaggagagaatcaagcgtaaagtctttgttctcaaggaatttgcattctagaaagtagaagatgtaataaatgtactgtgggacatgttaataagtgctataaagaaatataaagggtttgggagcaaaaagagggagtggatctattttagatgagcccaggtaagacctctctgaagagctgtcatgaaggagggagggagcacattcctggcagagaaaacagcacgtgcaaaggccccgagactggagtgtgttcctgaagagcagccaggaggccagcatggctggagaggcaggcataggcagggaaccgagcagcaggtcagagcaggcgagctgacattctgcagcctggacggccatggcaggaagcttttagttggagagatacaggaagcctcctagggttctgagcagaagaggggcatgagctgattcacattctgaaggacctctctagctggccagtgctgaggaggttggagagagaaagggtgaaagcagagagaccagtgcagggctgttaacagggttgcaggcgagagactggggtgctgggctcccctagactaggactccagtgccctcctctcccaagagacaaaggccattgcattgaaggaggtgggaaatgattagattctgaacatatgtaattatttttcagtctttttcaaagatacaaatatttacatagttttaatcatgtaatatatacaatttaatgtcctagtgttttacttaatagtgtatcatgttttccctgttggtatgtagcctggataaatgctcttaattataaaaaattctgtcgaggagtgttccatagtttattgttttcctattatgagaatttaggccaagtgtggtggctcatgcctgtaatcccagcactttgcgaggccgaggtgggcagatcacttgaggtgaggagttcaagaccagcctggccaacatggtgaattatctctactaaaaatacaaaaaaataataataatagccaggcgtggtggcacatgcctgtattcccagctgcttgggaggctgaggcaggagaatggcttgaacctgggaggtggaggttgcagtgagccgagatggtgccactgcattccagcctgggcaacagagcgagactccatctcaaaaaaaaggagacttcatgtgcccccaatttttcactattgttatttgaaaaaatatttttatttgtaagagtttttctttatttaaaatgttcattaataaagttgttggacgggaagcaaaaaaaaaaagttgtttaagataaattcccagaagtgaatttgttagatcaaacacttaaaactttttgttatggaagaattcaaatataaataaaaaattgtgagtaataaaatgaactcacagtttcaacaatgacccacattt

SEQ ID NO: 170870 - DNA, 4825 bp, Homo sapiens
  Payload ID: 13626
  Gene Symbol: POFUT2
  Gene Name: protein O-fucosyltransferase 2
  Uniprot ID: Q9Y2G5
  ENST ID: ENST00000331343
  CDS Start-End: 28-1302
gccggaagtgcgtggccgcccggggccatggcgacactcagcttcgtcttcctgctgctgggggcagtgtcctggcctccggcttctgcctccggccaggagttctggcccggacaatcggcggccgatattctgtcgggggcggcttcccgcagacggtatcttctgtatgacgtcaaccccccggaaggcttcaacctgcgcagggatgtctatatccgaatcgcctctctcctgaagactctgctgaagacggaggagtgggtgcttgtcctgcctccatggggccgcctctatcactggcagagtcctgacatccaccaggtccggattccctggtctgagttttttgatcttccaagtctcaataaaaacatccccgtcatcgagtatgagcagttcatcgcagaatctggtgggccctttattgaccaggtttacgtcctgcaaagttacgcagaggggtggaaagaagggacctgggaagagaaggtggacgagcggccgtgtattgatcagctcctgtactcccaggacaagcacgagtactacagaggatggttttggggttatgaggagaccaggggtctaaacgtctcctgtctgtccgtccagggctcagcctccatcgtggcgcccctgctgctgagaaacacatcagcccggtccgtgatgttagacagagccgagaacctacttcacgaccactatggagggaaagaatactgggatacccgtcgcagcatggtgtttgccaggcacctgcgggaggtgggagacgagttcaggagcagacatctcaactccacggacgacgcagacaggatccccttccaggaggactggatgaagatgaaggtcaagctgggctccgcgctagggggcccctacctgggagtccacctgagaagaaaagatttcatctggggtcacagacaggatgtacccagtctggaaggggccgtgaggaagatccgcagcctcatgaagacccaccggctggacaaggtgtttgtggccacagatgccgtcagaaaggaatatgaagagctaaaaaagctgttacccgagatggtgaggtttgaacccacgtgggaggagctggagctctacaaggacggaggcgttgcgattattgaccagtggatctgcgcacacgccaggtgcctgcccacgtcactgtcggccgagagcgggtcgggtggctttcaaaggttcttctgtcccaagtactcggtgtcagagcagatggtcgcctgtgttcacagtggtcatttccatactgtttgcctcctcgtctgagtctcctgtagcatctggttcagtgtttccctgggctgaagttaattgttcatcttgcccctttagttctcatgcacagaattcctccatagcaggctgttggcatagctggcctcgtctcagaacctcttcttgtgtcgcattttcccatcattcccggtttctgcccctgtctgccccctgccctgagagttgcccgtgccctggacttgggcatgtccttgttgctgtgttgttgagcatccgtgagcgtccccgaggccgggagcgtgggccctcgtgtgatcattctcgtggggctgccatgagcgtccccaaggctgggagcatgggccctcgtgtgatcgttcttgtggggctgccgtgagcgtccccgaggccgggagcgtgggccctcgtgtgatcattctcgtggggctgccgtgagcgtcccagaggccgggagcgtgggccctgcgtgcagtcattcctctggggttgctgtgggaggtacgcctgggcctctgttcctccaaagacctgcctgcccatctgcataggagatgaaggctggggttagggtgaaacggtttgagttaaatggaaaatgaaagtagagggaatgatcttccccgtggttagcactgtgcacacgcgtgcgtctctgtgggttagtctgtctctctcctgcccgaggaatgctgagcgccctgagccggtgcctcttcacacatctgctatttcctgtggtgttctgggcatggtgtgtaagacccacagaggctccgggtgatgctgtctgctgggtgtgggtccctttccctgttaagcagacaggatgcagcgctgacttcttaggtcagggcggaggtgtgcaggagcccagttacgaactcacccctgcttctcaggtgtggccttgggattttgactgcgaccttggcggtgctgtctccgcagcccaggaagcctgctgtggggaggcttcgcactgagctctcagcctcctgccctcagctgcgcgaagcgctcggcccagctcactgaagctgccctgcctccgggccggcgcggcctgctctggcaggcccctgtgtgtggggtggtgagggtctccccaccagtgctgcaccccgcagcagcatacaggcctgtgtggcctgctggccctgtggctctgtgtacagcgctgtgcatgttacatttgctctggaaacatctctggggtttgcttgttcacgaagttcatgaagtgccgctggagagccagagaccagctgcgcaggagccggaggaacgggcaggccgctgacctgaggtctggagaaacccctggagaagggtgtccccaccagcccatacagcgtgtgtgtggagggggccttgacctccgtgatgtctactgtgcctcaggataaggacccgccatgccctggctagacagtgtgtggttagtaggaatctctcattgttcaccatgtgacccccaggaggtattcgacctgcactggcgtgcctggcctgggatttggtgacggagaggagggctcccagggggacatgcggtgggacaggagcgtggcggctgctgactgtggggtgtggatggggctgcagcaccaggcagagcccctcagggcgccgatgtcgagggcacctgagcgaggggtgccagcaagggggcggccggctggtgggtgctcgggggacggccgtgttggttccatgtaactgtggaactcatttcactcagctgctcctctcagttctccctgactctggaacctctgtgacgccagttctccctgactctggaacctctgtgatcctttgcaggttttttattggcacctcagtctcaacattttcttttcggattcatgaggaaagagaaatcctggggttggaccccaagacgacgtacaacaggttctgcggagaccaagagaaggcgtgtgagcaacccacccactggaagatcacctactgaggaggatcctccagggccgctccccggacccgacaggcgcgggtggatgcaggttctgtcgccgtggagtcaccgtctactgccagccgggagctgggcggacaggaccgtccctcgcagggtcccaggcccagaagaggccccacgcctctagagctgggctccgtcctcggcgttgccagccgccatggctgatgaagaggctccgctgctctcgggggtggcggttgttttcaggcagcgtctgtgaacccacagctcggttgccagcagtgcccgcgtggtgacccagaagcaggagtgtttgtcaggctcccgctctggcctttccagccacctttcatgtcttcatattttaagtgcattgaggatagatgcaggcgggtgagctgccctccgtcaggtggacccgggctgacatttccctgggagctggtgcaaggagaagcgtcattttaaatgtctgcagagcgaccaggggcctcatgaatctctccgttgccctccgcgcagcaggaggctgcctgtgtgtttcctcctgggatgcgtgcaaggcagacctggtgctgcaaaggaaagggcctgaggcctcagggagccccgtggagggatgacagttcaggccctactgctggcacgtcagagcactgggaagtttttcagtgacgtctctggggcactcagtggattgtctgtaggaaacttgcagctctgctcctcacaccaggcccggctggccacccaccctcgcccccactggccacccctccctcgccccgactgccccgccccaccctcaccccgactgccccgccctcgcccggctggccgtccctgccctcgccccggctggcaggtgcacatggggcctccaggtctgccattcgctattgagaactagaaatgaggaaggacagttacgctaactccaaaaggctgtctaggatgagctgctttatcagggagctccttgtacccattttacagaaatcatttttaggtctttgtgccaccaccacgaggggcatctgcaaagagggcaacgctagacacagaatccgtggaaggtgcagcagtgcctcaggggtcctcagggtcagggagcccccctcaccctcttggcccgttaccctttgtgactttccaccatggtgtcgtgtgaccctcagtcaggttggtgggggctgagtcctcactgagcagccactttccacatctgctagaggaacagtgacatggacacctgtgacagagagaggacagttaggagggacagacagctcttcctttcggagcctggctagtctaggacatcaccttgctgtgtcttctcaagcttttaaaattgaccctgaacgtgtgacagggtcctatggtgttactcaaagctgtgcagggtaaatgatgacatatttattctttttccatttgttctagaaacagtgcctttttcatcagttgcattttccaggctgagagctgtataaaacattttggactgtgaccatgtaccttcctttttaagaaaaataaactgctttatggaagttggta

SEQ ID NO: 170871 - DNA, 3077 bp, Homo sapiens
  Payload ID: 13626
  Gene Symbol: POFUT2
  Gene Name: protein O-fucosyltransferase 2
  Uniprot ID: Q9Y2G5
  ENST ID: ENST00000334538
  CDS Start-End: 28-1170
gccggaagtgcgtggccgcccggggccatggcgacactcagcttcgtcttcctgctgctgggggcagtgtcctggcctccggcttctgcctccggccaggagttctggcccggacaatcggcggccgatattctgtcgggggcggcttcccgcagacggtatcttctgtatgacgtcaaccccccggaaggcttcaacctgcgcagggatgtctatatccgaatcgcctctctcctgaagactctgctgaagacggaggagtgggtgcttgtcctgcctccatggggccgcctctatcactggcagagtcctgacatccaccaggtccggattccctggtctgagttttttgatcttccaagtctcaataaaaacatccccgtcatcgagtatgagcagttcatcgcagaatctggtgggccctttattgaccaggtttacgtcctgcaaagttacgcagaggggtggaaagaagggacctgggaagagaaggtggacgagcggccgtgtattgatcagctcctgtactcccaggacaagcacgagtactacagaggatggttttggggttatgaggagaccaggggtctaaacgtctcctgtctgtccgtccagggctcagcctccatcgtggcgcccctgctgctgagaaacacatcagcccggtccgtgatgttagacagagccgagaacctacttcacgaccactatggagggaaagaatactgggatacccgtcgcagcatggtgtttgccaggcacctgcgggaggtgggagacgagttcaggagcagacatctcaactccacggacgacgcagacaggatccccttccaggaggactggatgaagatgaaggtcaagctgggctccgcgctagggggcccctacctgggagtccacctgagaagaaaagatttcatctggggtcacagacaggatgtacccagtctggaaggggccgtgaggaagatccgcagcctcatgaagacccaccggctggacaaggtgtttgtggccacagatgccgtcagaaaggaatatgaagagctaaaaaagctgttacccgagatggtgaggtttgaacccacgtgggaggagctggagctctacaaggacggaggcgttgcgattattgaccagtggatctgcgcacacgccagttcatgaagtgccgctggagagccagagaccagctgcgcaggagccggaggaacgggcaggccgctgacctgaggtctggagaaacccctggagaagggtgtccccaccagcccatacagcgtgtgtgtggagggggccttgacctccgtgatgtctactgtgcctcaggataaggacccgccatgccctggctagacagtgtgtggttttttattggcacctcagtctcaacattttcttttcggattcatgaggaaagagaaatcctggggttggaccccaagacgacgtacaacaggttctgcggagaccaagagaaggcgtgtgagcaacccacccactggaagatcacctactgaggaggatcctccagggccgctccccggacccgacaggcgcgggtggatgcaggttctgtcgccgtggagtcaccgtctactgccagccgggagctgggcggacaggaccgtccctcgcagggtcccaggcccagaagaggccccacgcctctagagctgggctccgtcctcggcgttgccagccgccatggctgatgaagaggctccgctgctctcgggggtggcggttgttttcaggcagcgtctgtgaacccacagctcggttgccagcagtgcccgcgtggtgacccagaagcaggagtgtttgtcaggctcccgctctggcctttccagccacctttcatgtcttcatattttaagtgcattgaggatagatgcaggcgggtgagctgccctccgtcaggtggacccgggctgacatttccctgggagctggtgcaaggagaagcgtcattttaaatgtctgcagagcgaccaggggcctcatgaatctctccgttgccctccgcgcagcaggaggctgcctgtgtgtttcctcctgggatgcgtgcaaggcagacctggtgctgcaaaggaaagggcctgaggcctcagggagccccgtggagggatgacagttcaggccctactgctggcacgtcagagcactgggaagtttttcagtgacgtctctggggcactcagtggattgtctgtaggaaacttgcagctctgctcctcacaccaggcccggctggccacccaccctcgcccccactggccacccctccctcgccccgactgccccgccccaccctcaccccgactgccccgccctcgcccggctggccgtccctgccctcgccccggctggcaggtgcacatggggcctccaggtctgccattcgctattgagaactagaaatgaggaaggacagttacgctaactccaaaaggctgtctaggatgagctgctttatcagggagctccttgtacccattttacagaaatcatttttaggtctttgtgccaccaccacgaggggcatctgcaaagagggcaacgctagacacagaatccgtggaaggtgcagcagtgcctcaggggtcctcagggtcagggagcccccctcaccctcttggcccgttaccctttgtgactttccaccatggtgtcgtgtgaccctcagtcaggttggtgggggctgagtcctcactgagcagccactttccacatctgctagaggaacagtgacatggacacctgtgacagagagaggacagttaggagggacagacagctcttcctttcggagcctggctagtctaggacatcaccttgctgtgtcttctcaagcttttaaaattgaccctgaacgtgtgacagggtcctatggtgttactcaaagctgtgcagggtaaatgatgacatatttattctttttccatttgttctagaaacagtgcctttttcatcagttgcattttccaggctgagagctgtataaaacattttggactgtgaccatgtaccttcctttttaagaaaaataaactgctttatggaagttggta

SEQ ID NO: 170872 - DNA, 2871 bp, Homo sapiens
  Payload ID: 13626
  Gene Symbol: POFUT2
  Gene Name: protein O-fucosyltransferase 2
  Uniprot ID: Q9Y2G5
  ENST ID: ENST00000349485
  CDS Start-End: 28-1317
gccggaagtgcgtggccgcccggggccatggcgacactcagcttcgtcttcctgctgctgggggcagtgtcctggcctccggcttctgcctccggccaggagttctggcccggacaatcggcggccgatattctgtcgggggcggcttcccgcagacggtatcttctgtatgacgtcaaccccccggaaggcttcaacctgcgcagggatgtctatatccgaatcgcctctctcctgaagactctgctgaagacggaggagtgggtgcttgtcctgcctccatggggccgcctctatcactggcagagtcctgacatccaccaggtccggattccctggtctgagttttttgatcttccaagtctcaataaaaacatccccgtcatcgagtatgagcagttcatcgcagaatctggtgggccctttattgaccaggtttacgtcctgcaaagttacgcagaggggtggaaagaagggacctgggaagagaaggtggacgagcggccgtgtattgatcagctcctgtactcccaggacaagcacgagtactacagaggatggttttggggttatgaggagaccaggggtctaaacgtctcctgtctgtccgtccagggctcagcctccatcgtggcgcccctgctgctgagaaacacatcagcccggtccgtgatgttagacagagccgagaacctacttcacgaccactatggagggaaagaatactgggatacccgtcgcagcatggtgtttgccaggcacctgcgggaggtgggagacgagttcaggagcagacatctcaactccacggacgacgcagacaggatccccttccaggaggactggatgaagatgaaggtcaagctgggctccgcgctagggggcccctacctgggagtccacctgagaagaaaagatttcatctggggtcacagacaggatgtacccagtctggaaggggccgtgaggaagatccgcagcctcatgaagacccaccggctggacaaggtgtttgtggccacagatgccgtcagaaaggaatatgaagagctaaaaaagctgttacccgagatggtgaggtttgaacccacgtgggaggagctggagctctacaaggacggaggcgttgcgattattgaccagtggatctgcgcacacgccaggttttttattggcacctcagtctcaacattttcttttcggattcatgaggaaagagaaatcctggggttggaccccaagacgacgtacaacaggttctgcggagaccaagagaaggcgtgtgagcaacccacccactggaagatcacctactgaggaggatcctccagggccgctccccggacccgacaggcgcgggtggatgcaggttctgtcgccgtggagtcaccgtctactgccagccgggagctgggcggacaggaccgtccctcgcagggtcccaggcccagaagaggccccacgcctctagagctgggctccgtcctcggcgttgccagccgccatggctgatgaagaggctccgctgctctcgggggtggcggttgttttcaggcagcgtctgtgaacccacagctcggttgccagcagtgcccgcgtggtgacccagaagcaggagtgtttgtcaggctcccgctctggcctttccagccacctttcatgtcttcatattttaagtgcattgaggatagatgcaggcgggtgagctgccctccgtcaggtggacccgggctgacatttccctgggagctggtgcaaggagaagcgtcattttaaatgtctgcagagcgaccaggggcctcatgaatctctccgttgccctccgcgcagcaggaggctgcctgtgtgtttcctcctgggatgcgtgcaaggcagacctggtgctgcaaaggaaagggcctgaggcctcagggagccccgtggagggatgacagttcaggccctactgctggcacgtcagagcactgggaagtttttcagtgacgtctctggggcactcagtggattgtctgtaggaaacttgcagctctgctcctcacaccaggcccggctggccacccaccctcgcccccactggccacccctccctcgccccgactgccccgccccaccctcaccccgactgccccgccctcgcccggctggccgtccctgccctcgccccggctggcaggtgcacatggggcctccaggtctgccattcgctattgagaactagaaatgaggaaggacagttacgctaactccaaaaggctgtctaggatgagctgctttatcagggagctccttgtacccattttacagaaatcatttttaggtctttgtgccaccaccacgaggggcatctgcaaagagggcaacgctagacacagaatccgtggaaggtgcagcagtgcctcaggggtcctcagggtcagggagcccccctcaccctcttggcccgttaccctttgtgactttccaccatggtgtcgtgtgaccctcagtcaggttggtgggggctgagtcctcactgagcagccactttccacatctgctagaggaacagtgacatggacacctgtgacagagagaggacagttaggagggacagacagctcttcctttcggagcctggctagtctaggacatcaccttgctgtgtcttctcaagcttttaaaattgaccctgaacgtgtgacagggtcctatggtgttactcaaagctgtgcagggtaaatgatgacatatttattctttttccatttgttctagaaacagtgcctttttcatcagttgcattttccaggctgagagctgtataaaacattttggactgtgaccatgtaccttcctttttaagaaaaataaactgctttatggaagttggta

SEQ ID NO: 170873 - DNA, 795 bp, Homo sapiens
  Payload ID: 13626
  Gene Symbol: POFUT2
  Gene Name: protein O-fucosyltransferase 2
  ENST ID: ENST00000451615
  CDS Start-End: 1-795
gcagttcatcgcagaatctggtgggccctttattgaccaggtttacgtcctgcaaagttacgcagaggggtggaaagaagggacctgggaagagaaggtggacgagcggccgtgtattgatcagctcctgtactcccaggacaagcacgagtactacagggatggaggtcttgtcagtcccaagtgtcgattgccattaaaggctctgacactaccaggcctcctgtggaaaagctgtcagttaacagcctccatgtgtccagtgccagggcagctggctctaaagcatggcagaggatggttttggggttatgaggagaccaggggtctaaacgtctcctgtctgtccgtccagggctcagcctccatcgtggcgcccctgctgctgagaaacacatcagcccggtccgtgatgttagacagagccgagaacctacttcacgaccactatggagggaaagaatactgggatacccgtcgcagcatggtgtttgccaggcacctgcgggaggtgggagacgagttcaggagcagacatctcaactccacggacgacgcagacaggatccccttccaggaggactggatgaagatgaaggtcaagctgggctccgcgctagggggcccctacctgggagtccacctgagaagaaaagatttcatctggggtcacagacaggatgtacccagtctggaaggggccgtgaggaagatccgcagcctcatgaagacccaccggctggacaaggtgtttgtggccacagatgccgtcagaaaggaatatgaagagctaaa

SEQ ID NO: 170874 - DNA, 2959 bp, Homo sapiens
  Payload ID: 13626
  Gene Symbol: POFUT2
  Gene Name: protein O-fucosyltransferase 2
  ENST ID: ENST00000612472
  CDS Start-End: 26-664
cggaagtgcgtggccgcccggggccatggcgacactcagcttcgtcttcctgctgctgggggcagtgtcctggcctccggcttctgcctccggccaggagttctggcccggacaatcggcggccgatattctgtcgggggcggcttcccgcagacggtatcttctgtatgacgtcaaccccccggaaggcttcaacctgcgcagggatgtctatatccgaatcgcctctctcctgaagactctgctgaagacggaggagtgggtgcttgtcctgcctccatggggccgcctctatcactggcagagtcctgacatccaccaggtccggattccctggtctgagttttttgatcttccaagtctcaataaaaacatccccgtcatcgagtatgagcagttcatcgcaggaagacgcactgcgtgtggagtatgcttcgtggtgtctcagtgcagcgccagggataaagaatctggtgggccctttattgaccaggtttacgtcctgcaaagttacgcagaggggtggaaagaagggacctgggaagagaaggtggacgagcggccgtgtattgatcagctcctgtactcccaggacaagcacgagtactacaggtgcctgctgaggctgctccccctgccgcagaggatggttttggggttatgaggagaccaggggtctaaacgtctcctgtctgtccgtccagggctcagcctccatcgtggcgcccctgctgctgagaaacacatcagcccggtccgtgatgttagacagagccgagaacctacttcacgaccactatggagggaaagaatactgggatacccgtcgcagcatggtgtttgccaggcacctgcgggaggtgggagacgagttcaggagcagacatctcaactccacggacgacgcagacaggatccccttccaggaggactggatgaagatgaaggtcaagctgggctccgcgctagggggcccctacctgggagtccacctgagaagaaaagatttcatctggggtcacagacaggatgtacccagtctggaaggggccgtgaggaagatccgcagcctcatgaagacccaccggctggacaaggtgtttgtggccacagatgccgtcagaaaggaatatgaagagctaaaaaagctgttacccgagatggtgaggtttgaacccacgtgggaggagctggagctctacaaggacggaggcgttgcgattattgaccagtggatctgcgcacacgccaggttttttattggcacctcagtctcaacattttcttttcggattcatgaggaaagagaaatcctggggttggaccccaagacgacgtacaacaggttctgcggagaccaagagaaggcgtgtgagcaacccacccactggaagatcacctactgaggaggatcctccagggccgctccccggacccgacaggcgcgggtggatgcaggttctgtcgccgtggagtcaccgtctactgccagccgggagctgggcggacaggaccgtccctcgcagggtcccaggcccagaagaggccccacgcctctagagctgggctccgtcctcggcgttgccagccgccatggctgatgaagaggctccgctgctctcgggggtggcggttgttttcaggcagcgtctgtgaacccacagctcggttgccagcagtgcccgcgtggtgacccagaagcaggagtgtttgtcaggctcccgctctggcctttccagccacctttcatgtcttcatattttaagtgcattgaggatagatgcaggcgggtgagctgccctccgtcaggtggacccgggctgacatttccctgggagctggtgcaaggagaagcgtcattttaaatgtctgcagagcgaccaggggcctcatgaatctctccgttgccctccgcgcagcaggaggctgcctgtgtgtttcctcctgggatgcgtgcaaggcagacctggtgctgcaaaggaaagggcctgaggcctcagggagccccgtggagggatgacagttcaggccctactgctggcacgtcagagcactgggaagtttttcagtgacgtctctggggcactcagtggattgtctgtaggaaacttgcagctctgctcctcacaccaggcccggctggccacccaccctcgcccccactggccacccctccctcgccccgactgccccgccccaccctcaccccgactgccccgccctcgcccggctggccgtccctgccctcgccccggctggcaggtgcacatggggcctccaggtctgccattcgctattgagaactagaaatgaggaaggacagttacgctaactccaaaaggctgtctaggatgagctgctttatcagggagctccttgtacccattttacagaaatcatttttaggtctttgtgccaccaccacgaggggcatctgcaaagagggcaacgctagacacagaatccgtggaaggtgcagcagtgcctcaggggtcctcagggtcagggagcccccctcaccctcttggcccgttaccctttgtgactttccaccatggtgtcgtgtgaccctcagtcaggttggtgggggctgagtcctcactgagcagccactttccacatctgctagaggaacagtgacatggacacctgtgacagagagaggacagttaggagggacagacagctcttcctttcggagcctggctagtctaggacatcaccttgctgtgtcttctcaagcttttaaaattgaccctgaacgtgtgacagggtcctatggtgttactcaaagctgtgcagggtaaatgatgacatatttattctttttccatttgttctagaaacagtgcctttttcatcagttgcattttccaggctgagagctgtataaaacattttggactgtgaccatgtaccttcctttttaagaaaaataaactgctttatggaagttggt

SEQ ID NO: 170875 - DNA, 2472 bp, Homo sapiens
  Payload ID: 13626
  Gene Symbol: POFUT2
  Gene Name: protein O-fucosyltransferase 2
  ENST ID: ENST00000615172
  CDS Start-End: 191-616
ctgagcccagtgtgtgccgcagcttcccacggcaggggctggcagagccggcaggggtgggcggcttgccctgcgttggcttcatgcaggagaccctccaagagcctccaccgtggatggcgctgcttctcaggcgaccgtggatgacgtgtctgaggggcttgttccagctgcggggacccgtcgcagcatggtgtttgccaggcacctgcgggaggtgggagacgagttcaggagcagacatctcaactccacggacgacgcagacaggatccccttccaggaggactggatgaagatgaaggtcaagctgggctccgcgctagggggcccctacctgggagtccacctgagaagaaaagatttcatctggggtcacagacaggatgtacccagtctggaaggggccgtgaggaagatccgcagcctcatgaagacccaccggctggacaaggtgtttgtggccacagatgccgtcagaaaggaatatgaagagctaaaaaagctgttacccgagatggtgaggtttgaacccacgtgggaggagctggagctctacaaggacggaggcgttgcgattattgaccagtggatctgcgcacacgccagttcatgaagtgccgctggagagccagagaccagctgcgcaggagccggaggaacgggcaggccgctgacctgaggtctggagaaacccctggagaagggtgtccccaccagcccatacagcgtgtgtgtggagggggccttgacctccgtgatgtctactgtgcctcaggataaggacccgccatgccctggctagacagtgtgtggttttttattggcacctcagtctcaacattttcttttcggattcatgaggaaagagaaatcctggggttggaccccaagacgacgtacaacaggttctgcggagaccaagagaaggcgtgtgagcaacccacccactggaagatcacctactgaggaggatcctccagggccgctccccggacccgacaggcgcgggtggatgcaggttctgtcgccgtggagtcaccgtctactgccagccgggagctgggcggacaggaccgtccctcgcagggtcccaggcccagaagaggccccacgcctctagagctgggctccgtcctcggcgttgccagccgccatggctgatgaagaggctccgctgctctcgggggtggcggttgttttcaggcagcgtctgtgaacccacagctcggttgccagcagtgcccgcgtggtgacccagaagcaggagtgtttgtcaggctcccgctctggcctttccagccacctttcatgtcttcatattttaagtgcattgaggatagatgcaggcgggtgagctgccctccgtcaggtggacccgggctgacatttccctgggagctggtgcaaggagaagcgtcattttaaatgtctgcagagcgaccaggggcctcatgaatctctccgttgccctccgcgcagcaggaggctgcctgtgtgtttcctcctgggatgcgtgcaaggcagacctggtgctgcaaaggaaagggcctgaggcctcagggagccccgtggagggatgacagttcaggccctactgctggcacgtcagagcactgggaagtttttcagtgacgtctctggggcactcagtggattgtctgtaggaaacttgcagctctgctcctcacaccaggcccggctggccacccaccctcgcccccactggccacccctccctcgccccgactgccccgccccaccctcaccccgactgccccgccctcgcccggctggccgtccctgccctcgccccggctggcaggtgcacatggggcctccaggtctgccattcgctattgagaactagaaatgaggaaggacagttacgctaactccaaaaggctgtctaggatgagctgctttatcagggagctccttgtacccattttacagaaatcatttttaggtctttgtgccaccaccacgaggggcatctgcaaagagggcaacgctagacacagaatccgtggaaggtgcagcagtgcctcaggggtcctcagggtcagggagcccccctcaccctcttggcccgttaccctttgtgactttccaccatggtgtcgtgtgaccctcagtcaggttggtgggggctgagtcctcactgagcagccactttccacatctgctagaggaacagtgacatggacacctgtgacagagagaggacagttaggagggacagacagctcttcctttcggagcctggctagtctaggacatcaccttgctgtgtcttctcaagcttttaaaattgaccctgaacgtgtgacagggtcctatggtgttactcaaagctgtgcagggtaaatgatgacatatttattctttttccatttgttctagaaacagtgcctttttcatcagttgcattttccaggctgagagctgtataaaacattttggactgtg

SEQ ID NO: 170876 - DNA, 3533 bp, Homo sapiens
  Payload ID: 13627
  Gene Symbol: POGLUT1
  Gene Name: protein O-glucosyltransferase 1
  Uniprot ID: Q8NBL1
  ENST ID: ENST00000295588
  CDS Start-End: 85-1263
gtgctgcggctcccgggccatctttgtgcggggccgcgcttccgccagcgccgcagcggggaatctgcagtaggtctgccggcgatggagtggtgggctagctcgccgcttcggctctggctgctgttgttcctcctgccctcagcgcagggccgccagaaggagtcaggttcaaaatggaaagtatttattgaccaaattaacaggtctttggagaattacgaaccatgttcaagtcaaaactgcagctgctaccatggtgtcatagaagaggatctaactcctttccgaggaggcatctccaggaagatgatggcagaggtagtcagacggaagctagggacccactatcagatcactaagaacagactgtaccgggaaaatgactgcatgttcccctcaaggtgtagtggtgttgagcactttattttggaagtgatcgggcgtctccctgacatggagatggtgatcaatgtacgagattatcctcaggttcctaaatggatggagcctgccatcccagtcttctccttcagtaagacatcagagtaccatgatatcatgtatcctgcttggacattttgggaagggggacctgctgtttggccaatttatcctacaggtcttggacggtgggacctcttcagagaagatctggtaaggtcagcagcacagtggccatggaaaaagaaaaactctacagcatatttccgaggatcaaggacaagtccagaacgagatcctctcattcttctgtctcggaaaaacccaaaacttgttgatgcagaatacaccaaaaaccaggcctggaaatctatgaaagataccttaggaaagccagctgctaaggatgtccatcttgtggatcactgcaaatacaagtatctgtttaattttcgaggcgtagctgcaagtttccggtttaaacacctcttcctgtgtggctcacttgttttccatgttggtgatgagtggctagaattcttctatccacagctgaagccatgggttcactatatcccagtcaaaacagatctctccaatgtccaagagctgttacaatttgtaaaagcaaatgatgatgtagctcaagagattgctgaaaggggaagccagtttattaggaaccatttgcagatggatgacatcacctgttactgggagaacctcttgagtgaatactctaaattcctgtcttataatgtaacgagaaggaaaggttatgatcaaattattcccaaaatgttgaaaactgaactatagtagtcatcataggaccatagtcctctttgtggcaacagatctcagatatcctacggtgagaagcttaccataagcttggcacctataccttgaatatctgctatcaagccaaatacctggttttccttatcatgctgcacccagagcaactcttgagaaagatttaaaatgtgtctaatacactgatatgaagcagttcaactttttggatgaataaggaccagaaatcgtgagatgtggattttgaacccaactctacctttcattttcttaagaccaatcacagcttgtgcctcagatcatccacctgtgtgagtccatcactgtgaaattgactgtgtccatgtgatgatgccctttgtcccattatttggagcagaaaattcgtcatttggaagtagtacaactcattgctggaattgtgaaattattcaaggcgtgatctctgtcactttattttaatgtaggaaaccctatggggtttatgaaaaatacttggggatcattctctgaatggtctaaggaagcggtagccatgccatgcaatgatgtaggagttctcttttgtaaaaccataaactgtgttactcaggaggtttctataatgccacatagaaagaggccaattgcatgagtaattattgcaattggatttcaggttccctttttgtgccttcatgccctacttcttaatgcctctctaaagccaaaaaaaaaaaaaaagacaaagcctcttaataaatttaatggaactatacatagaacagcagctcttcctcaccctttgcatacctttaatatttttccttcttaaattggccacagcaggggtcattcacactctcactgtcttgcaggaatcacaagaagtcttcatatgtgaacgtgccattcagttggtagttaagagcattcaacttcaaatatatagaagatatttgttttagtgcaaatccatgatggagtgcctcccttttccttttttcactttttgaaaaagatgttttgggtagtagtttaatatctcagggtgctctttctaacatagtaaaaaatgaagaaaaatgtttagattaaaactctgtagtctgatgacttagaaccatccttgacccttaggcccaacctttccacagagaaatcacctctcttcctttgtcttttaagaactatttggtattaactagtttcagaattagtaaatgtgagattcagtcacataattatcagacattccatttgtcagaaatgtatttggctttttaaactcctttccacaaaagtttaagtctaatgaccttcttagagaagttgagcatgcctggcaagatcatttcatggaataagcagatgtttaaagttggatttttttttttttttttttttgagtactagcaatgcacagggaccgtgttcttaggttcttagtctgtgaatctagcaataggcagtccagatttctgagtcgtactatggttttgccttgtcactgtgaggccctactaggtgtaagcattctctctgaattttaatttcctctcattaaaataggaacaaaatttgctatcctttagattaggagctgaagattcatttccctgggaatgtttcccatttagcttcaagtttcagctcaaacatcaccttctttctgactcctttcattcattcctccaggcagtaaggggctaccatagtactttgtttatgcctgtattatatgacatcactgtagttgcttgactgtttctcctactgttctgtaaacttattaatgggtgagaatctaattttactcatcttgatggcttcatgatccagcacagtgcctcacacaaagaactattgggtgggtggatggatggatggaggaatggagacagttggcttaaccagatcctatatacagattattactggctccaaaggatgagtagataagaccataagaattggatcaatgtaaatcctcacctgccctttgaagagccaataagggcatctttgtctttaaatacagcaaatgttattcagattttgtacttgtctatctgtttacctcagtgtagatgatatgaggatggtataactatgtaaattgtttttgaaaataatttgtttccccacaacttttgaaggttttatttgttgttgttattactagttcagtcccaaacttaccctttccttttcagagagctaatggccatgcttttcttcaaggaaagaataatttatttgaatgaagtgggatacttgcataacacaaa

SEQ ID NO: 170877 - DNA, 1361 bp, Homo sapiens
  Payload ID: 13627
  Gene Symbol: POGLUT1
  Gene Name: protein O-glucosyltransferase 1
  ENST ID: ENST00000497447
  CDS Start-End: 60-623
gtgcggggccgcgcttccgccagcgccgcagcggggaatctgcagtaggtctgccggcgatggagtggtgggctagctcgccgcttcggctctggctgctgttgttcctcctgccctcagcgcagggccgccagaaggagtcaggttcaaaatggaaagtatttattgaccaaattaacaggtctttggagaattacgaaccatgttcaagtcaaaactgcagctgctaccatggtgtcatagaagaggatctaactcctttccgaggaggcatctccaggaagatgatggcagaggtagtcagacggaagctagggacccactatcagatcactaagaacagactgtaccgggaaaatgactgcatgttcccctcaaggtgtagtggtgttgagcactttattttggaagtgatcgggcgtctccctgacatggagatggtgatcaatgtacgagattatcctcaggttcctaaatggatggagcctgccatcccagtcttctccttcagtaagacttgttttatttcctgtgttgcaagtgggcagaggccacatttgtgttgcatttcccatggtctagcctcatttctcgaaagtgtttggttccattgtttgtcatgaaactcactcagaagaacagatagaggctcccatgctagactttggaaaatagggaaaatatatctttgacaatgtgacactaaaccaaggctgtccagatcctgtggcatgattgcagttgcctcttttcactgttccaagactgatttaggacgacctgtctgtttttgttgaagacatcagagtaccatgatatcatgtatcctgcttggacattttgggaagggggacctgctgtttggccaatttatcctacaggtcttggacggtgggacctcttcagagaagatctggtaaggtcagcagcacagtggccatggaaaaagaaaaactctacagcatatttccgaggatcaaggacaagtccagaacgagatcctctcattcttctgtctcggaaaaacccaaaacttgttgatgcagaatacaccaaaaaccaggcctggaaatctatgaaagtaatcaccagtcatctgactagaactacagcagtgaacattctcactcaaagaacattgccacctgggtagaatttgagattaggtttcctgtcagtggtgaggataccttaggaaagccagctgctaaggatgtccatcttgtggatcactgcaaatacaagtatctgtttaattttcgaggcgtagctgcaagtttccggtttaaacacctcttcctgtgtggctcacttgttttccatgttggtgatgagtggctagaattcttctatccacagct

SEQ ID NO: 170878 - DNA, 567 bp, Homo sapiens
  Payload ID: 13627
  Gene Symbol: POGLUT1
  Gene Name: protein O-glucosyltransferase 1
  ENST ID: ENST00000476573
  CDS Start-End: 1-567
gtgcggggccgcgcttccgccagcgccgcagcggggaatctgcagttcaaaatggaaagtatttattgaccaaattaacaggtctttggagaattacgaaccatgttcaagtcaaaactgcagctgctaccatggtgtcatagaagaggatctaactcctttccgaggaggcatctccaggaagatgatggcagaggtagtcagacggaagctagggacccactatcagatcactaagaacagactgtaccgggaaaatgactgcatgttcccctcaaggtgtagtggtgttgagcactttattttggaagtgatcgggcgtctccctgacatggagatggtgatcaatgtacgagattatcctcaggttcctaaatggatggagcctgccatcccagtcttctccttcagtaagacatcagagtaccatgatatcatgtatcctgcttggacattttgggaagggggacctgctgtttggccaatttatcctacaggtcttggacggtgggacctcttcagagaagatctggtaaggtcagcagcacagtggccatggaaaaagaa

SEQ ID NO: 170879 - DNA, 1420 bp, Homo sapiens
  Payload ID: 13627
  Gene Symbol: POGLUT1
  Gene Name: protein O-glucosyltransferase 1
  ENST ID: ENST00000486607
  CDS Start-End: 60-551
gtgcggggccgcgcttccgccagcgccgcagcggggaatctgcagtaggtctgccggcgatggagtggtgggctagctcgccgcttcggctctggctgctgttgttcctcctgccctcagcgcagggccgccagaaggagtcaggttcaaaatggaaagtatttattgaccaaattaacaggtctttggagaattacgaaccatgttcaagtcaaaactgcagctgctaccatggtgtcatagaagaggatctaactcctttccgaggaggcatctccaggaagatgatggcagaggtagtcagacggaagctagggacccactatcagatcactaagaacagactgtaccgggaaaatgactgcatgttcccctcaaggtgtagtggtgttgagcactttattttggaagtgatcgggcgtctccctgacatggagatggtgatcaatgtacgagattatcctcaggttcctaaatggatggagcctgccatcccagtcttctccttcagtaaggctagactttggaaaatagggaaaatatatctttgacaatgtgacactaaaccaaggctgtccagatcctgtggcatgattgcagttgcctcttttcactgttccaagactgatttaggacgacctgtctgtttttgttgaagacatcagagtaccatgatatcatgtatcctgcttggacattttgggaagggggacctgctgtttggccaatttatcctacaggtcttggacggtgggacctcttcagagaagatctggtaaggtcagcagcacagtggccatggaaaaagaaaaactctacagcatatttccgaggatcaaggacaagtccagaacgagatcctctcattcttctgtctcggaaaaacccaaaacttgttgatgcagaatacaccaaaaaccaggcctggaaatctatgaaagataccttaggaaagccagctgctaaggatgtccatcttgtggatcactgcaaatacaagtatctgtttaattttcgaggcgtagctgcaagtttccggtttaaacacctcttcctgtgtggctcacttgttttccatgttggtgatgagtggctagaattcttctatccacagctgaagccatgggttcactatatcccagtcaaaacagatctctccaatgtccaagagctgttacaatttgtaaaagcaaatgatgatgtagctcaagagattgctgaaaggggaagccagtttattaggaaccatttgcagatggatgacatcacctgttactgggagaacctcttgagtgaatactctaaattcctgtcttataatgtaacgagaaggaaaggttatgatcaaattattcccaaaatgttgaaaactgaactatagtagtcatcataggaccatagtcctctttgtggcaacaga

SEQ ID NO: 170880 - DNA, 589 bp, Homo sapiens
  Payload ID: 13627
  Gene Symbol: POGLUT1
  Gene Name: protein O-glucosyltransferase 1
  ENST ID: ENST00000460339
  CDS Start-End: 23-358
atctgcagtaggtctgccggcgatggagtggtgggctagctcgccgcttcggctctggctgctgttgttcctcctgccctcagcgcagggccgccagaaggagtcaggtgggctccgggcagtgccgagcctgccccttgggctcggggtctggccggagtcccgaggcgctcccccgcgcggccggctcccgggaagatgccgtggccgctgtagctcggagctgggcagaaggcaccggggcgccttgcggcggagagttcaaaatggaaagtatttattgaccaaattaacaggtctttggagaattacgaaccatgttcaagtcaaaactgcagctgctaccatggtgtcatagaagaggatctaactcctttccgaggaggcatctccaggaagatgatggcagaggtagtcagacggaagctagggacccactatcagatcactaagaacagactgtaccgggaaaatgactgcatgttcccctcaaggtgtagtggtgttgagcactttattttggaagtgatcgggcgtctccctgacatggagatggtgatcaatgtacgagattatcctcaggttccta

SEQ ID NO: 170881 - DNA, 2728 bp, Homo sapiens
  Payload ID: 13628
  Gene Symbol: POMGNT1
  Gene Name: protein O-linked mannose N-acetylglucosaminyltransferase 1 (beta 1,2-)
  Uniprot ID: Q8WZA1
  ENST ID: ENST00000371984
  CDS Start-End: 159-2141
ggccggggcggggccgcaagcggcatggaggaggcggaggccgcggcgagccgggccgagcagtgagggccctagcggggcccgagcggggcccggggcccctaagccattcctgaagtcatgggctggccaggacattggtgacccgccaatccggtatggacgactggaagcccagccccctcatcaagccctttggggctcggaagaagcggagctggtaccttacctggaagtataaactgacaaaccagcgggccctgcggagattctgtcagacaggggccgtgcttttcctgctggtgactgtcattgtcaatatcaagttgatcctggacactcggcgagccatcagtgaagccaatgaagacccagagccagagcaagactatgatgaggccctaggccgcctggagcccccacggcgcagaggcagtggtccccggcgggtcctggacgtagaggtgtattcaagtcgcagcaaagtatatgtggcagtggatggcaccacggtgctggaggatgaggcccgggagcagggccggggcatccatgtcattgtcctcaaccaggccacgggccacgtgatggcaaaacgtgtgtttgacacgtactcacctcatgaggatgaggccatggtgctattcctcaacatggtagcgcccggccgagtgctcatctgcactgtcaaggatgagggctccttccacctcaaggacacagccaaggctctgctgaggagcctgggcagccaggctggccctgccctgggctggagggacacatgggccttcgtgggacgaaaaggaggtcctgtcttcggggagaaacattctaaatcacctgccctctcttcctggggggacccagtcctgctgaagacagatgtgccattgagctcagcagaagaggcagagtgccactgggcagacacagagctgaaccgtcgccgccggcgcttctgcagcaaagttgagggctatggaagtgtatgcagctgcaaggaccccacacccatcgagttcagccctgacccactcccagacaacaaggtcctcaatgtgcctgtggctgtcattgcagggaaccgacccaattacctgtacaggatgctgcgctctctgctttcagcccagggggtgtctcctcagatgataacagttttcattgacggctactatgaggaacccatggatgtggtggcactgtttggtctgaggggcatccagcatactcccatcagcatcaagaatgcccgcgtgtctcagcactacaaggccagcctcactgccactttcaacctgtttccggaggccaagtttgctgtggttctggaagaggacctggacattgctgtggattttttcagtttcctgagccaatccatccacctactggaggaggatgacagcctgtactgcatctctgcctggaatgaccaggggtatgaacacacggctgaggacccagcactactgtaccgtgtggagaccatgcctgggctgggctgggtgctcaggaggtccttgtacaaggaggagcttgagcccaagtggcctacaccggaaaagctctgggattgggacatgtggatgcggatgcctgaacaacgccggggccgagagtgcatcatccctgacgtttcccgatcctaccactttggcatcgtcggcctcaacatgaatggctactttcacgaggcctacttcaagaagcacaagttcaacacggttccaggtgtccagctcaggaatgtggacagtctgaagaaagaagcttatgaagtggaagttcacaggctgctcagtgaggctgaggttctggaccacagcaagaacccttgtgaagactctttcctgccagacacagagggccacacctacgtggcctttattcgaatggagaaagatgatgacttcaccacctggacccagcttgccaagtgcctccatatctgggacctggatgtgcgtggcaaccatcggggcctgtggagattgtttcggaagaagaaccacttcctgatggtgggggtcccggcttccccctactcagtgaagaagccaccctcagtcaccccaattttcctggagccacccccaaaggaggagggagccccaggagccccagaacagacatgagacctcctccaggaccctgcggggctgggtactgtgtacccccaggctggctagcccttccctccatcctgtaggattttgtagatgctggtaggggctggggctaccttgtttttaacatgagacttaattactaactccaaggggagggttcccctgctccaacaccccgttcctgagttaaaagtctatttatttacttccttgttggagaagggcaggagagtacctgggaatcattacgatccctagcagctcatcctgccctttgaataccctcactttccaggcctggctcagaatctaacctatttattgactgtcctgagggccttgaaaacaggccgaacctggagggcctggatttctttttgggctggaatgctgccctgagggtggggctggctcttactcaggaaactgctgtgcccaacccatggacaggcccagctggggcccacatgctgacacagactcactcagagacccttagacactggaccaggcctcctctcagccttctctttgtccagatttccaaagctggataagttggtcattgattaaaaaaggagaagccctctggg

SEQ ID NO: 170882 - DNA, 2934 bp, Homo sapiens
  Payload ID: 13628
  Gene Symbol: POMGNT1
  Gene Name: protein O-linked mannose N-acetylglucosaminyltransferase 1 (beta 1,2-)
  Uniprot ID: Q8WZA1
  ENST ID: ENST00000371992
  CDS Start-End: 652-2898
ctcagactgagggagaatcaattttgggggagaccacatctaatggataaaagagccacaggattacaaaagggtggaatagttgttacaagaaggtcacatcatcctggcactgctcccagaaccagtgggcctcgaagcccagcttggcactctcatcctctggtgactcaggtggtccaccttgaagcctctcccctgggggcttccacacagctctcaagctccctagcctggtggctgccacatccacctcagtcctggccctctctccaccagctataacttttgcccagtccatctcggaacgtggagccccaggtgggccctgttcatccagctcgctgggggccactgtgtccaggaagctgccaatagagacactgtccagccggtcggtggtgctggtgtctggcaggctgtcccagctgcctcgccttgagcggcctgggctcccgcctgtcaggctatattgactgctggtgaggctgctgcaatgactggtcaacgtcccccgctcctccaacagccagcgcactgcctcgatgccctcattcaaggtcaccagctgctgcaggatcttcacatcgatggctcgcagattcctgaagtcatgggctggccaggacattggtgacccgccaatccggtatggacgactggaagcccagccccctcatcaagccctttggggctcggaagaagcggagctggtaccttacctggaagtataaactgacaaaccagcgggccctgcggagattctgtcagacaggggccgtgcttttcctgctggtgactgtcattgtcaatatcaagttgatcctggacactcggcgagccatcagtgaagccaatgaagacccagagccagagcaagactatgatgaggccctaggccgcctggagcccccacggcgcagaggcagtggtccccggcgggtcctggacgtagaggtgtattcaagtcgcagcaaagtatatgtggcagtggatggcaccacggtgctggaggatgaggcccgggagcagggccggggcatccatgtcattgtcctcaaccaggccacgggccacgtgatggcaaaacgtgtgtttgacacgtactcacctcatgaggatgaggccatggtgctattcctcaacatggtagcgcccggccgagtgctcatctgcactgtcaaggatgagggctccttccacctcaaggacacagccaaggctctgctgaggagcctgggcagccaggctggccctgccctgggctggagggacacatgggccttcgtgggacgaaaaggaggtcctgtcttcggggagaaacattctaaatcacctgccctctcttcctggggggacccagtcctgctgaagacagatgtgccattgagctcagcagaagaggcagagtgccactgggcagacacagagctgaaccgtcgccgccggcgcttctgcagcaaagttgagggctatggaagtgtatgcagctgcaaggaccccacacccatcgagttcagccctgacccactcccagacaacaaggtcctcaatgtgcctgtggctgtcattgcagggaaccgacccaattacctgtacaggatgctgcgctctctgctttcagcccagggggtgtctcctcagatgataacagttttcattgacggctactatgaggaacccatggatgtggtggcactgtttggtctgaggggcatccagcatactcccatcagcatcaagaatgcccgcgtgtctcagcactacaaggccagcctcactgccactttcaacctgtttccggaggccaagtttgctgtggttctggaagaggacctggacattgctgtggattttttcagtttcctgagccaatccatccacctactggaggaggatgacagcctgtactgcatctctgcctggaatgaccaggggtatgaacacacggctgaggacccagcactactgtaccgtgtggagaccatgcctgggctgggctgggtgctcaggaggtccttgtacaaggaggagcttgagcccaagtggcctacaccggaaaagctctgggattgggacatgtggatgcggatgcctgaacaacgccggggccgagagtgcatcatccctgacgtttcccgatcctaccactttggcatcgtcggcctcaacatgaatggctactttcacgaggcctacttcaagaagcacaagttcaacacggttccaggtgtccagctcaggaatgtggacagtctgaagaaagaagcttatgaagtggaagttcacaggctgctcagtgaggctgaggttctggaccacagcaagaacccttgtgaagactctttcctgccagacacagagggccacacctacgtggcctttattcgaatggagaaagatgatgacttcaccacctggacccagcttgccaagtgcctccatatctgggacctggatgtgcgtggcaaccatcggggcctgtggagattgtttcggaagaagaaccacttcctgatgagtgaagaagccaccctcagtcaccccaattttcctggagccacccccaaaggaggagggagccccaggagccccagaacagacatgagacctcctccaggaccctgcggggctgggcctggctcagaatctaacctatttattgactgtcctgagggccttgaaaacaggccgaacctggagggcctggatttctttttgggctggaatgctgccctgagggtggggctggctcttactcaggaaactgctgtgcccaacccatggacaggcccagctggggcccacatgctgacacagactcactcagagacccttagacactggaccaggcctcctctcagccttctctttgtccagatttccaaagctggataagttggtcattgattaaaaaaggagaagccctctggg

SEQ ID NO: 170883 - DNA, 3480 bp, Homo sapiens
  Payload ID: 13628
  Gene Symbol: POMGNT1
  Gene Name: protein O-linked mannose N-acetylglucosaminyltransferase 1 (beta 1,2-)
  ENST ID: ENST00000396420
  CDS Start-End: 638-1240
gaatcaattttgggggagaccacatctaatggataaaagagccacaggattacaaaagggtggaatagttgttacaagaaggtcacatcatcctggcactgctcccagaaccagtgggcctcgaagcccagcttggcactctcatcctctggtgactcaggtggtccaccttgaagcctctcccctgggggcttccacacagctctcaagctccctagcctggtggctgccacatccacctcagtcctggccctctctccaccagctataacttttgcccagtccatctcggaacgtggagccccaggtgggccctgttcatccagctcgctgggggccactgtgtccaggaagctgccaatagagacactgtccagccggtcggtggtgctggtgtctggcaggctgtcccagctgcctcgccttgagcggcctgggctcccgcctgtcaggctatattgactgctggtgaggctgctgcaatgactggtcaacgtcccccgctcctccaacagccagcgcactgcctcgatgccctcattcaaggtcaccagctgctgcaggatcttcacatcgatggctcgcagattcctgaagtcatgggctggccaggacattggtgacccgccaatccggtatggacgactggaagcccagccccctcatcaagccctttggggctcggaagaagcggagctggtaccttacctggaagtataaactgacaaaccagcgggccctgcggagattctgtcagacaggggccgtgcttttcctgctggtgactgtcattgtcaatatcaagttgatcctggacactcggcgagccatcagtgaagccaatgaagacccagagccagagcaagactatgatgaggccctaggccgcctggagcccccacggcgcagaggcagtggtccccggcgggtcctggacgtagaggtgtattcaagtcgcagcaaagtatatgtggcagtggatggcaccacggtgctggaggatgaggcccgggagcagggccggggcatccatgtcattgtcctcaaccaggccacgggccacgtgatggcaaaacgtgtgtttgacacgtactcacctcatgaggatgaggccatggtgctattcctcaacatggtagcgcccggccgagtgctcatctgcactgtcaaggtcctgtcttcggggagaaacattctaaatcacctgccctctcttcctggggggacccagtcctgctgaagacagatgtgccattgagctcagcagaagaggcagagtgccactgggcagacacagagctgaaccgtcgccgccggcgcttctgcagcaaagttgagggctatggaagtgtatgcagctgcaaggaccccacacccatcgagttcagccctgacccactcccagacaacaaggtcctcaatgtgcctgtggctgtcattgcagggaaccgacccaattacctgtacaggtaagcctgggaatgggctatacccagcactgaacaggagggtgcttaggtcatctacctccaggaggaactcttgaggtgggcagaaaggcaatagattctagacgcattcacctctgtgggtaagcatagggactctgggcccagctgtaaacacaggggaacctgagttgaggggtgatgaagtgaccctaacctatccctgggctccccaggatgctgcgctctctgctttcagcccagggggtgtctcctcagatgataacagttttcattgacggctactatgaggtgagcaggacttggggggtgcctcgggtggagtacaacatggagcagcagtgattgccagggacgggcaagggagaccgcccaggcaagggctgtgaaatgtgaaggccttggattgcagaggtgggcagagggaaagtgacctcacatggtgagcagtggccatgtcccccaggaacccatggatgtggtggcactgtttggtctgaggggcatccagcatactcccatcagcatcaagaatgcccgcgtgtctcagcactacaaggccagcctcactgccactttcaacctgtttccggaggccaagtttgctgtggttctggaagaggacctggacattgctgtggattttttcagtttcctgagccaatccatccacctactggaggaggatgacagcctgtactgcatctctgcctggaatgaccaggggtatgaacacacggctgaggacccagcactactgtaccgtgtggagaccatgcctgggctgggctgggtgctcaggaggtccttgtacaaggaggagcttgagcccaagtggcctacaccggaaaagctctgggattgggacatgtggatgcggatgcctgaacaacgccggggccgagagtgcatcatccctgacgtttcccgatcctaccactttggcatcgtcggcctcaacatgaatggctactttcacgaggcctacttcaagaagcacaagttcaacacggttccaggtgtccagctcaggaatgtggacagtctgaagaaagaagcttatgaagtggaagttcacaggctgctcagtgaggctgaggttctggaccacagcaagaacccttgtgaagactctttcctgccagacacagagggccacacctacgtggcctttattcgaatggagaaagatgatgacttcaccacctggacccagcttgccaagtgcctccatatctgggacctggatgtgcgtggcaaccatcggggcctgtggagattgtttcggaagaagaaccacttcctgatggtgggggtcccggcttccccctactcagtgaagaagccaccctcagtcaccccaattttcctggagccacccccaaaggaggagggagccccaggagccccagaacagacatgagacctcctccaggaccctgcggggctgggtactgtgtacccccaggctggctagcccttccctccatcctgtaggattttgtagatgctggtaggggctggggctaccttgtttttaacatgagacttaattactaactccaaggggagggttcccctgctccaacaccccgttcctgagttaaaagtctatttatttacttccttgttggagaagggcaggagagtacctgggaatcattacgatccctagcagctcatcctgccctttgaataccctcactttccaggcctggctcagaatctaacctatttattgactgtcctgagggccttgaaaacaggccgaacctggagggcctggatttctttttgggctggaatgctgccctgagggtggggctggctcttactcaggaaactgctgtgcccaacccatggacaggcccagctggggcccacatgctgacacagactcactcagagacccttagacactggaccaggcctcctctcagccttctctttgtccagatttccaaagctggataagttggtcattgattaaaaaaggagaagccctctgggg

SEQ ID NO: 170884 - DNA, 2544 bp, Homo sapiens
  Payload ID: 13629
  Gene Symbol: POMGNT2
  Gene Name: protein O-linked mannose N-acetylglucosaminyltransferase 2 (beta 1,4-)
  Uniprot ID: Q8NAT1
  ENST ID: ENST00000344697
  CDS Start-End: 347-2089
caggctccgcgccgggctcgcccgccgggcaggcgcacggcggacacctgcgagcctggaggtggcggtcgctgcgaacccggcggcgcggccaaacctgtgctggctgcctgggccttctgggcctcctgggccagaagctggcgctgggggcggcggcggggtgggaaagcggcgccgccgtggggcctcctggacgcgtcggcggaggtggcttcgtcccgcggagtccaggcttcaggctttcaccagttctcaggatgcccatagggatgggtgaagcctgcctggcctgtggtgcttcccagtggccgtcatctcattagggccccacagtggcattaggatgcacctctcggcggtgttcaacgccctcctggtgtcggtgctggcagcggtcctgtggaagcatgtgcggctgcgtgagcatgcagccacactggaggaggagctggccctcagccgacaggccacagagccagccccagcactgaggatcgactacccgaaggcactgcagatcctgatggagggcggcacacacatggtgtgcacgggccgcacgcacacagaccgcatctgccgcttcaagtggctctgctactccaacgaggctgaggagttcatcttcttccatggcaacacctctgtcatgctgcccaacctgggctcccggcgcttccagccagccctgctcgacctatccaccgtggaggaccacaacactcagtacttcaacttcgtggagctgcctgctgctgccctgcgcttcatgcccaagccggtgttcgtgccagacgtggccctcatcgccaaccgcttcaaccccgacaacctcatgcacgtctttcatgacgacctgctgccactcttctacaccctgcggcagtttcccggcctggcccacgaggcacggctcttcttcatggagggctggggcgagggtgcacacttcgacctctacaagctgctcagccccaagcagcctctcctgcgggcacagctgaagaccctgggccggctgctgtgcttctcccatgcttttgtgggcctctccaagatcactacctggtaccagtatggctttgtgcagccccagggcccgaaggccaacatcctcgtctcaggcaatgagatccggcagtttgcacggttcatgacagaaaagctgaacgtgagccacacaggagtccccctaggcgaggagtacattctggtctttagccgaacccagaacagactcattctgaatgaggcagagctgctgctggcactggcccaggagttccagatgaagacagtgacagtgtccctggaggaccacacctttgctgatgtcgtgcggctggtcagcaatgcctccatgctggtcagcatgcatggggcccagctggtcaccaccctcttcctgccccgtggggcaactgtggtagagctcttcccatatgctgtcaatcccgaccactacactccctataagacgctggccatgctgcctggcatggacctccagtatgtagcctggcggaacatgatgccagagaacacagtcacacaccctgagcggccctgggatcaggggggcatcacccatctggaccgggctgagcaagcccgtatcctgcaaagccgtgaggtcccacggcatctctgttgccggaaccccgagtggctcttccgaatctaccaggacaccaaggtggacatcccgtccctcattcaaaccatacggcgcgtggtgaagggccggccaggaccacggaagcagaagtggacagtcggcctatatccaggcaaggtgcgggaggcacggtgccaggcgtcagtgcatggcgcctccgaggcccgcctcactgtctcctggcagatcccatggaaccttaaatacctgaaggtgagggaggtgaagtacgaggtgtggctgcaggagcagggggagaacacctacgtgccttacatcctggctctgcagaaccacaccttcactgagaacatcaagcccttcaccacctacctggtgtgggtccgctgcatcttcaacaagatcctcctgggaccctttgcagatgtgctggtgtgcaacacgtagcgagcaggccacagcctggcctcgggaaggtggctcctgcagttcagcgtccctgggcccattaatcccactgtggagacttctgggaactatttattgagcaggcctgtgcctccacatcatcttgttgtctctggggtgtggtgtcacagcactcctctttgccctagagataagggacctgacttccccttctcccatcctgaacatttgtacccctggagaagttccttagcagggaggaggaagaggagaggaggaagcaaagaatcacaaggaacctctggctaggtgatcctgatgtttcctactgagtttttctggtatccagatttctggaaaccgagtaatcatgtactgtttgattgggtggttcatctgcttccatcccagtgaaatttacctgtagcccagtgaagggtgtgtttggaacattcattaaatgattctaagca

SEQ ID NO: 170885 - DNA, 2531 bp, Homo sapiens
  Payload ID: 13629
  Gene Symbol: POMGNT2
  Gene Name: protein O-linked mannose N-acetylglucosaminyltransferase 2 (beta 1,4-)
  Uniprot ID: Q8NAT1
  ENST ID: ENST00000441964
  CDS Start-End: 332-2074
aagctggcgctgggggcggcggcggggtgggaaagcggcgccgccgtggggcctcctggacgcgtcggcggaggtggcttcgtcccgcggagtccaggcttcagctcctggcttctcttctttcctcctagagatcagatgtcggaactccagctgagggcatgtcttactgggcacgcaggtgtcctctcttgagaagaactgtccataccatggtggtggtaaggctttcaccagttctcaggatgcccatagggatgggtgaagcctgcctggcctgtggtgcttcccagtggccgtcatctcattagggccccacagtggcattaggatgcacctctcggcggtgttcaacgccctcctggtgtcggtgctggcagcggtcctgtggaagcatgtgcggctgcgtgagcatgcagccacactggaggaggagctggccctcagccgacaggccacagagccagccccagcactgaggatcgactacccgaaggcactgcagatcctgatggagggcggcacacacatggtgtgcacgggccgcacgcacacagaccgcatctgccgcttcaagtggctctgctactccaacgaggctgaggagttcatcttcttccatggcaacacctctgtcatgctgcccaacctgggctcccggcgcttccagccagccctgctcgacctatccaccgtggaggaccacaacactcagtacttcaacttcgtggagctgcctgctgctgccctgcgcttcatgcccaagccggtgttcgtgccagacgtggccctcatcgccaaccgcttcaaccccgacaacctcatgcacgtctttcatgacgacctgctgccactcttctacaccctgcggcagtttcccggcctggcccacgaggcacggctcttcttcatggagggctggggcgagggtgcacacttcgacctctacaagctgctcagccccaagcagcctctcctgcgggcacagctgaagaccctgggccggctgctgtgcttctcccatgcttttgtgggcctctccaagatcactacctggtaccagtatggctttgtgcagccccagggcccgaaggccaacatcctcgtctcaggcaatgagatccggcagtttgcacggttcatgacagaaaagctgaacgtgagccacacaggagtccccctaggcgaggagtacattctggtctttagccgaacccagaacagactcattctgaatgaggcagagctgctgctggcactggcccaggagttccagatgaagacagtgacagtgtccctggaggaccacacctttgctgatgtcgtgcggctggtcagcaatgcctccatgctggtcagcatgcatggggcccagctggtcaccaccctcttcctgccccgtggggcaactgtggtagagctcttcccatatgctgtcaatcccgaccactacactccctataagacgctggccatgctgcctggcatggacctccagtatgtagcctggcggaacatgatgccagagaacacagtcacacaccctgagcggccctgggatcaggggggcatcacccatctggaccgggctgagcaagcccgtatcctgcaaagccgtgaggtcccacggcatctctgttgccggaaccccgagtggctcttccgaatctaccaggacaccaaggtggacatcccgtccctcattcaaaccatacggcgcgtggtgaagggccggccaggaccacggaagcagaagtggacagtcggcctatatccaggcaaggtgcgggaggcacggtgccaggcgtcagtgcatggcgcctccgaggcccgcctcactgtctcctggcagatcccatggaaccttaaatacctgaaggtgagggaggtgaagtacgaggtgtggctgcaggagcagggggagaacacctacgtgccttacatcctggctctgcagaaccacaccttcactgagaacatcaagcccttcaccacctacctggtgtgggtccgctgcatcttcaacaagatcctcctgggaccctttgcagatgtgctggtgtgcaacacgtagcgagcaggccacagcctggcctcgggaaggtggctcctgcagttcagcgtccctgggcccattaatcccactgtggagacttctgggaactatttattgagcaggcctgtgcctccacatcatcttgttgtctctggggtgtggtgtcacagcactcctctttgccctagagataagggacctgacttccccttctcccatcctgaacatttgtacccctggagaagttccttagcagggaggaggaagaggagaggaggaagcaaagaatcacaaggaacctctggctaggtgatcctgatgtttcctactgagtttttctggtatccagatttctggaaaccgagtaatcatgtactgtttgattgggtggttcatctgcttccatcccagtgaaatttacctgtagcccagtgaagggtgtgtttggaacattcattaaatgattctaagcatc

SEQ ID NO: 170886 - DNA, 1389 bp, Homo sapiens
  Payload ID: 13630
  Gene Symbol: PPP1CA
  Gene Name: protein phosphatase 1, catalytic subunit, alpha isozyme
  Uniprot ID: P62136
  ENST ID: ENST00000312989
  CDS Start-End: 12-1037
gcggcgccgccatgtccgacagcgagaagctcaacctggactcgatcatcgggcgcctgctggaagggtccagggtcctgacaccccattgcgccccagtgcagggctcgcggcctggcaagaatgtacagctgacagagaacgagatccgcggtctgtgcctgaaatcccgggagatttttctgagccagcccattcttctggagctggaggcacccctcaagatctgcggtgacatacacggccagtactacgaccttctgcgactatttgagtatggcggtttccctcccgagagcaactacctctttctgggggactatgtggacaggggcaagcagtccttggagaccatctgcctgctgctggcctataagatcaagtaccccgagaacttcttcctgctccgtgggaaccacgagtgtgccagcatcaaccgcatctatggtttctacgatgagtgcaagagacgctacaacatcaaactgtggaaaaccttcactgactgcttcaactgcctgcccatcgcggccatagtggacgaaaagatcttctgctgccacggaggcctgtccccggacctgcagtctatggagcagattcggcggatcatgcggcccacagatgtgcctgaccagggcctgctgtgtgacctgctgtggtctgaccctgacaaggacgtgcagggctggggcgagaacgaccgtggcgtctcttttacctttggagccgaggtggtggccaagttcctccacaagcacgacttggacctcatctgccgagcacaccaggtggtagaagacggctacgagttctttgccaagcggcagctggtgacacttttctcagctcccaactactgtggcgagtttgacaatgctggcgccatgatgagtgtggacgagaccctcatgtgctctttccagatcctcaagcccgccgacaagaacaaggggaagtacgggcagttcagtggcctgaaccctggaggccgacccatcaccccaccccgcaattccgccaaagccaagaaatagcccccgcacaccaccctgtgccccagatgatggattgattgtacagaaatcatgctgccatgctgggggggggtcaccccgacccctcaggcccacctgtcacggggaacatggagccttggtgtatttttcttttctttttttaatgaatcaatagcagcgtccagtcccccagggctgcttcctgcctgcacctgcggtgactgtgagcaggatcctggggccgaggctgcagctcagggcaacggcaggccaggtcgtgggtctccagccgtgcttggcctcagggctggcagccggatcctggggcaacccatctggtctcttgaataaaggtcaaagctggattctc

SEQ ID NO: 170887 - DNA, 1054 bp, Homo sapiens
  Payload ID: 13630
  Gene Symbol: PPP1CA
  Gene Name: protein phosphatase 1, catalytic subunit, alpha isozyme
  Uniprot ID: P62136
  ENST ID: ENST00000358239
  CDS Start-End: 90-950
cggaaggagagccaggccggaaggaggctgccggagggcgggaggcaggagcgggccaggagctgctgggctggagcggcggcgccgccatgtccgacagcgagaagctcaacctggactcgatcatcgggcgcctgctggaaggtgacatacacggccagtactacgaccttctgcgactatttgagtatggcggtttccctcccgagagcaactacctctttctgggggactatgtggacaggggcaagcagtccttggagaccatctgcctgctgctggcctataagatcaagtaccccgagaacttcttcctgctccgtgggaaccacgagtgtgccagcatcaaccgcatctatggtttctacgatgagtgcaagagacgctacaacatcaaactgtggaaaaccttcactgactgcttcaactgcctgcccatcgcggccatagtggacgaaaagatcttctgctgccacggaggcctgtccccggacctgcagtctatggagcagattcggcggatcatgcggcccacagatgtgcctgaccagggcctgctgtgtgacctgctgtggtctgaccctgacaaggacgtgcagggctggggcgagaacgaccgtggcgtctcttttacctttggagccgaggtggtggccaagttcctccacaagcacgacttggacctcatctgccgagcacaccaggtggtagaagacggctacgagttctttgccaagcggcagctggtgacacttttctcagctcccaactactgtggcgagtttgacaatgctggcgccatgatgagtgtggacgagaccctcatgtgctctttccagatcctcaagcccgccgacaagaacaaggggaagtacgggcagttcagtggcctgaaccctggaggccgacccatcaccccaccccgcaattccgccaaagccaagaaatagcccccgcacaccaccctgtgccccagatgatggattgattgtacagaaatcatgctgccatgctgggggggggtcaccccgacccctcaggcccacctgtcacg

SEQ ID NO: 170888 - DNA, 1476 bp, Homo sapiens
  Payload ID: 13630
  Gene Symbol: PPP1CA
  Gene Name: protein phosphatase 1, catalytic subunit, alpha isozyme
  Uniprot ID: P62136
  ENST ID: ENST00000376745
  CDS Start-End: 150-1142
gcggggcgggcccgggaggcctggaggcggggccgcgggccgggggcggactggggcgggcggaaggagagccaggccggaaggaggctgccggagggcgggaggcaggagcgggccaggagctgctgggctggagcggcggcgccgccatgtccgacagcgagaagctcaacctggactcgatcatcgggcgcctgctggaagtgcagggctcgcggcctggcaagaatgtacagctgacagagaacgagatccgcggtctgtgcctgaaatcccgggagatttttctgagccagcccattcttctggagctggaggcacccctcaagatctgcggtgacatacacggccagtactacgaccttctgcgactatttgagtatggcggtttccctcccgagagcaactacctctttctgggggactatgtggacaggggcaagcagtccttggagaccatctgcctgctgctggcctataagatcaagtaccccgagaacttcttcctgctccgtgggaaccacgagtgtgccagcatcaaccgcatctatggtttctacgatgagtgcaagagacgctacaacatcaaactgtggaaaaccttcactgactgcttcaactgcctgcccatcgcggccatagtggacgaaaagatcttctgctgccacggaggcctgtccccggacctgcagtctatggagcagattcggcggatcatgcggcccacagatgtgcctgaccagggcctgctgtgtgacctgctgtggtctgaccctgacaaggacgtgcagggctggggcgagaacgaccgtggcgtctcttttacctttggagccgaggtggtggccaagttcctccacaagcacgacttggacctcatctgccgagcacaccaggtggtagaagacggctacgagttctttgccaagcggcagctggtgacacttttctcagctcccaactactgtggcgagtttgacaatgctggcgccatgatgagtgtggacgagaccctcatgtgctctttccagatcctcaagcccgccgacaagaacaaggggaagtacgggcagttcagtggcctgaaccctggaggccgacccatcaccccaccccgcaattccgccaaagccaagaaatagcccccgcacaccaccctgtgccccagatgatggattgattgtacagaaatcatgctgccatgctgggggggggtcaccccgacccctcaggcccacctgtcacggggaacatggagccttggtgtatttttcttttctttttttaatgaatcaatagcagcgtccagtcccccagggctgcttcctgcctgcacctgcggtgactgtgagcaggatcctggggccgaggctgcagctcagggcaacggcaggccaggtcgtgggtctccagccgtgcttggcctcagggctggcagccggatcctggggcaacccatctggtctcttgaataaa

SEQ ID NO: 170889 - DNA, 765 bp, Homo sapiens
  Payload ID: 13630
  Gene Symbol: PPP1CA
  Gene Name: protein phosphatase 1, catalytic subunit, alpha isozyme
  ENST ID: ENST00000527663
  CDS Start-End: 7-765
gccgccatgtccgacagcgagaagctcaacctggactcgatcatcgggcgcctgctggaagtgcagggctcgcggcctggcaagaatgtacagctgacagagaacgagatccgcggtctgtgcctgaaatcccgggagatttttctgagccagcccattcttctggagctggaggcacccctcaagatctgcggtgacatacacggccagtactacgaccttctgcgactatttgagtatggcggtttccctcccgagagcaactacctctttctgggggactatgtggacaggggcaagcagtccttggagaccatctgcctgctgctggcctataagatcaagtaccccgagaacttcttcctgctccgtgggaaccacgagtgtgccagcatcaaccgcatctatggtttctacgatgagtgcctgtccccggacctgcagtctatggagcagattcggcggatcatgcggcccacagatgtgcctgaccagggcctgctgtgtgacctgctgtggtctgaccctgacaaggacgtgcagggctggggcgagaacgaccgtggcgtctcttttacctttggagccgaggtggtggccaagttcctccacaagcacgacttggacctcatctgccgagcacaccaggtggtagaagacggctacgagttctttgccaagcggcagctggtgacacttttctcagctcccaactactgtggcgagtttgacaatgctggcgccatgatgagtgtggacgagacc

SEQ ID NO: 170890 - DNA, 588 bp, Homo sapiens
  Payload ID: 13630
  Gene Symbol: PPP1CA
  Gene Name: protein phosphatase 1, catalytic subunit, alpha isozyme
  ENST ID: ENST00000542876
  CDS Start-End: 50-588
cttcttgctgacgccgccagcgccgaccaccagcagctgttttccctccatgaggcagcgcgccgaccgccgaagcatggtctccaccagcggcgccgccaccgcctcgtcggccgccggccccagccgcggcgcggcccacagcccctccagcgcgccgcacgcctccagacacaggccgccgttcagctccagggccactgggcttctccagcagcgccagcactgtgtccaccactgcacccagctctgcccgcgggtgcagacgccatgcctgccgcccccgccagcgccagccactgagcttcacagctacctgcagcaaggaggggaaaggggcctcctggacaccaccccaggtactgcagggtggggcacttccgccacaggagccgtgcagggctcgcggcctggcaagaatgtacagctgacagagaacgagatccgcggtctgtgcctgaaatcccgggagatttttctgagccagcccattcttctggagctggaggcacccctcaagatctgcggtgacatacacggccagtactacgaccttctgcgactatttgagtatggcggtttccctcc

SEQ ID NO: 170891 - DNA, 554 bp, Homo sapiens
  Payload ID: 13630
  Gene Symbol: PPP1CA
  Gene Name: protein phosphatase 1, catalytic subunit, alpha isozyme
  ENST ID: ENST00000546202
  CDS Start-End: 48-554
tcttgctgacgccgccagcgccgaccaccagcagctgttttccctccatgaggcagcgcgccgaccgccgaagcatggtctccaccagcggcgccgccaccgcctcgtcggccgccggccccagccgcggcgcggcccacagcccctccagcgcgccgcacgcctccagacacaggccgccgttcagctccagggccactgggcttctccagcagcgccagcactgtgtccaccactgcacccagctctgcccgcgggtgcagacgccatgcctgccgcccccgccagcgccagccactgagcttcacagctacctgcagcaaggaggggaaaggggcctcctggacaccaccccagtgcagggctcgcggcctggcaagaatgtacagctgacagagaacgagatccgcggtctgtgcctgaaatcccgggagatttttctgagccagcccattcttctggagctggaggcacccctcaagatctgcggtgacatacacggccagtactacgaccttctgcgactatttgagtatggcggtttccctcccgag

SEQ ID NO: 170892 - DNA, 3527 bp, Homo sapiens
  Payload ID: 13631
  Gene Symbol: PPP1CB
  Gene Name: protein phosphatase 1, catalytic subunit, beta isozyme
  Uniprot ID: P62140
  ENST ID: ENST00000296122
  CDS Start-End: 199-1182
ggcgctggtgagctttgcggagctgggcggtgccgaggaggaggaggtggcggcctgggtctgacgcggccctgttcgagggggcctctcttgtttatttatttattttccgtgagagaacgccgagccgtcgccgcagcctccgccgccgagaagcccttgttcccgctgctgggaaggagagtctgtgccgacaagatggcggacggggagctgaacgtggacagcctcatcacccggctgctggaggtacgaggatgtcgtccaggaaagattgtgcagatgactgaagcagaagttcgaggcttatgtatcaagtctcgggagatctttctcagccagcctattcttttggaattggaagcaccgctgaaaatttgtggagatattcatggacaatatacagatttactgagattatttgaatatggaggtttcccaccagaagccaactatcttttcttaggagattatgtggacagaggaaagcagtctttggaaaccatttgtttgctattggcttataaaatcaaatatccagagaacttctttctcttaagaggaaaccatgagtgtgctagcatcaatcgcatttatggattctatgatgaatgcaaacgaagatttaatattaaattgtggaagaccttcactgattgttttaactgtctgcctatagcagccattgtggatgagaagatcttctgttgtcatggaggattgtcaccagacctgcaatctatggagcagattcggagaattatgagacctactgatgtccctgatacaggtttgctctgtgatttgctatggtctgatccagataaggatgtgcaaggctggggagaaaatgatcgtggtgtttcctttacttttggagctgatgtagtcagtaaatttctgaatcgtcatgatttagatttgatttgtcgagctcatcaggtggtggaagatggatatgaattttttgctaaacgacagttggtaaccttattttcagccccaaattactgtggcgagtttgataatgctggtggaatgatgagtgtggatgaaactttgatgtgttcatttcagatattgaaaccatctgaaaagaaagctaaataccagtatggtggactgaattctggacgtcctgtcactccacctcgaacagctaatccgccgaagaaaaggtgaagaaaggaattctgtaaagaaaccatcagatttgttaaggacatacttcataatatataagtgtgcactgtaaaaccatccagccatttgacaccctttatgatgtcacacctttaacttaaggagacgggtaaaggatcttaaatttttttctaatagaaagatgtgctacactgtattgtaataagtatactctgttatagtcaacaaagttaaatccaaattcaaaattatccattaaagttacatcttcatgtatcacaatttttaaagttgaaaagcatcccagttaaactagatgtgatagttaaaccagatgaaagcatgatgatccatctgtgtaatgtggttttagtgttgcttggttgtttaattattttgagcttgttttgtttttgtttgttttcactagaataatggcaaatacttctaatttttttccctaaacatttttaaaagtgaaatatgggaagagctttacagacattcaccaactattattttcccttgtttatctacttagatatctgtttaatcttactaagaaaactttcgcctcattacattaaaaaggaattttagagattgattgttttaaaaaaaaatacgcacattgtccaatccagtgattttaatcatacagtttgactgggcaaactttacagctgatagtgaatattttgctttatacaggaattgacactgatttggatttgtgcactctaatttttaacttattgatgctctattgtgcagtagcatttcatttaagataaggctcatatagtattacccaactagttggtaatgtgattatgtggtaccttggctttaggttttcattcgcacggaacaccttttggcatgcttaacttcctggtaacaccttcacctgcattggttttctttttcttttttctttctttttttttttttttttttttttgagttgttgtttgtttttagatccacagtacatgagaatccttttttgacaagccttggaaagctgacactgtctctttttcctccctctatacgaaggatgtatttaaatgaatgctggtcagtgggacattttgtcaactatgggtattgggtgcttaactgtctaatattgccatgtgaatgttgtatacgattgtaaggcttatgtcactaaagatttttattctgattttttcataatcaaaggtcatatgatactgtatagacaagctttgtagtgaagtatagtagcaataatttctgtacctgatcaagtttattgcagcctttcttttcctatttcttttttttaagggttagtattaacaaatggcaatgagtagaaaagttaacatgaagattttagaaggagagaacttacaggacacagatttgtgattctttgactgtgacactattggatgtgattctaaaagcttttattgagcattgtcaaatttgtaagcttcatagggatggacatcatatctataatgcccttctatatgtgctaccatagatgtgacatttttgaccttaatatcgtctttgaaaatgttaaattgagaaacctgttaacttacattttatgaattggcacattgtattacttactgcaagagatatttcattttcagcacagtgcaaaagttctttaaaatgcatatgtctttttttctaattccgttttgttttaaagcacattttaaatgtagttttctcatttagtaaaagttgtctaattgatatgaagcctgactgattttttttttccttacagtgagacatttaagcacacattttattcacatagatactatgtccttgacatattgaaatgattcttttctgaaagtattcatgatctgcatatgatgtattaggttaggtcacaaaggttttatctgaggtgatttaaataacttcctgattggagtgtgtaagctgagcgatttctaataaaattttagttgtacacttttagtagtcatagtgaagcaggtctagaaaataagcctttggcagggaaaaagggcaatgttgattaatctcagtattaaaccacattaatctgtatcccattgtctggcttttgtaaattcatccaggtcaagactaagtatgttggttaataggaatccttttttttttttttaaagactaaatgtgaaaaaataatcactacttaagctaattaatattggtcattaaatttaaaggatggaaatttatcatgtttaaaaattattcaagcactcttaaaaccacttaaacagcctccagtcataaaaatgtgttctttacaaatatttgcttggcaacacgacttgaaataaataaaactttgtttcttagga

SEQ ID NO: 170893 - DNA, 4771 bp, Homo sapiens
  Payload ID: 13631
  Gene Symbol: PPP1CB
  Gene Name: protein phosphatase 1, catalytic subunit, beta isozyme
  Uniprot ID: P62140
  ENST ID: ENST00000358506
  CDS Start-End: 161-1144
gctgcgtgacgcggcggcgcgcaagggacgtgcggagtgagtggcgctgcgggtggggccgtcggcggcgctggtgagagaacgccgagccgtcgccgcagcctccgccgccgagaagcccttgttcccgctgctgggaaggagagtctgtgccgacaagatggcggacggggagctgaacgtggacagcctcatcacccggctgctggaggtacgaggatgtcgtccaggaaagattgtgcagatgactgaagcagaagttcgaggcttatgtatcaagtctcgggagatctttctcagccagcctattcttttggaattggaagcaccgctgaaaatttgtggagatattcatggacaatatacagatttactgagattatttgaatatggaggtttcccaccagaagccaactatcttttcttaggagattatgtggacagaggaaagcagtctttggaaaccatttgtttgctattggcttataaaatcaaatatccagagaacttctttctcttaagaggaaaccatgagtgtgctagcatcaatcgcatttatggattctatgatgaatgcaaacgaagatttaatattaaattgtggaagaccttcactgattgttttaactgtctgcctatagcagccattgtggatgagaagatcttctgttgtcatggaggattgtcaccagacctgcaatctatggagcagattcggagaattatgagacctactgatgtccctgatacaggtttgctctgtgatttgctatggtctgatccagataaggatgtgcaaggctggggagaaaatgatcgtggtgtttcctttacttttggagctgatgtagtcagtaaatttctgaatcgtcatgatttagatttgatttgtcgagctcatcaggtggtggaagatggatatgaattttttgctaaacgacagttggtaaccttattttcagccccaaattactgtggcgagtttgataatgctggtggaatgatgagtgtggatgaaactttgatgtgttcatttcagatattgaaaccatctgaaaagaaagctaaataccagtatggtggactgaattctggacgtcctgtcactccacctcgaacagctaatccgccgaagaaaaggtgaagaaaggaattctgtaaagaaaccatcagatttgttaaggacatacttcataatatataagtgtgcactgtaaaaccatccagccatttgacaccctttatgatgtcacacctttaacttaaggagacgggtaaaggatcttaaatttttttctaatagaaagatgtgctacactgtattgtaataagtatactctgttatagtcaacaaagttaaatccaaattcaaaattatccattaaagttacatcttcatgtatcacaatttttaaagttgaaaagcatcccagttaaactagatgtgatagttaaaccagatgaaagcatgatgatccatctgtgtaatgtggttttagtgttgcttggttgtttaattattttgagcttgttttgtttttgtttgttttcactagaataatggcaaatacttctaatttttttccctaaacatttttaaaagtgaaatatgggaagagctttacagacattcaccaactattattttcccttgtttatctacttagatatctgtttaatcttactaagaaaactttcgcctcattacattaaaaaggaattttagagattgattgttttaaaaaaaaatacgcacattgtccaatccagtgattttaatcatacagtttgactgggcaaactttacagctgatagtgaatattttgctttatacaggaattgacactgatttggatttgtgcactctaatttttaacttattgatgctctattgtgcagtagcatttcatttaagataaggctcatatagtattacccaactagttggtaatgtgattatgtggtaccttggctttaggttttcattcgcacggaacaccttttggcatgcttaacttcctggtaacaccttcacctgcattggttttctttttcttttttctttctttttttttttttttttttttttgagttgttgtttgtttttagatccacagtacatgagaatccttttttgacaagccttggaaagctgacactgtctctttttcctccctctatacgaaggatgtatttaaatgaatgctggtcagtgggacattttgtcaactatgggtattgggtgcttaactgtctaatattgccatgtgaatgttgtatacgattgtaaggcttatgtcactaaagatttttattctgattttttcataatcaaaggtcatatgatactgtatagacaagctttgtagtgaagtatagtagcaataatttctgtacctgatcaagtttattgcagcctttcttttcctatttcttttttttaagggttagtattaacaaatggcaatgagtagaaaagttaacatgaagattttagaaggagagaacttacaggacacagatttgtgattctttgactgtgacactattggatgtgattctaaaagcttttattgagcattgtcaaatttgtaagcttcatagggatggacatcatatctataatgcccttctatatgtgctaccatagatgtgacatttttgaccttaatatcgtctttgaaaatgttaaattgagaaacctgttaacttacattttatgaattggcacattgtattacttactgcaagagatatttcattttcagcacagtgcaaaagttctttaaaatgcatatgtctttttttctaattccgttttgttttaaagcacattttaaatgtagttttctcatttagtaaaagttgtctaattgatatgaagcctgactgattttttttttccttacagtgagacatttaagcacacattttattcacatagatactatgtccttgacatattgaaatgattcttttctgaaagtattcatgatctgcatatgatgtattaggttaggtcacaaaggttttatctgaggtgatttaaataacttcctgattggagtgtgtaagctgagcgatttctaataaaattttagttgtacacttttagtagtcatagtgaagcaggtctagaaaataagcctttggcagggaaaaagggcaatgttgattaatctcagtattaaaccacattaatctgtatcccattgtctggcttttgtaaattcatccaggtcaagactaagtatgttggttaataggaatccttttttttttttttaaagactaaatgtgaaaaaataatcactacttaagctaattaatattggtcattaaatttaaaggatggaaatttatcatgtttaaaaattattcaagcactcttaaaaccacttaaacagcctccagtcataaaaatgtgttctttacaaatatttgcttggcaacacgacttgaaataaataaaactttgtttcttaggagaaaatgattctgtaattccagtgtcactaatttatattgttctttcctctgatttttttcaggttagtgatttttttgtatacaatttaatccaaatgttatgacattcagaaatcatgaaacacagtagatatctgttataatgtggtgtatcacatggattataaagcaaagttatggtcgatttctattcttgaaagaatcaactacagtgaatcctttgcatttgaagccttaacatgcattgctttaattttgcccagggacaaattttaataatcagcaagactggtttgtgcaaagcgttgagtcatcaggtatttagagcctagccagctacccagtatccatgctgccatatcccttcattgtaaaaagtacctaaacattcgtgaaatgattttttttagctgaaaaatgctggcaagaagaattttaaagcttaaaataggtggtaaatttgaagtatgagtgtgttcacgagaaacataggcttttcaaaaaaatttttattcaaggcaaagcaaggaacatcttgagatatgtctcaagaatataaagatgtattattttaagccaaggagctgaaatatatctcagtttataaattcaggtatattctttttgtctccatggcaaccataacttttgaaccaaaaaaaattgtttttacatctttatgctgaaaatgtgtttagattaggaatatggtcgggctgaatttgctgttgctccctaaccaaatccacctcttgttttccttgtgagtccatggctaaatcaaagctgcccctgagaagagacttaatccaagcctgattgtactagtggcatcacttagaagtaggctttccctcttcctagtagatctcaatgttttataattccttaaaacagctgaaaattgggacaacatactttacgcaatgaacagtagttaaataggaaataaactagttccatataagtatacacctagagttttaattacctttataatgtttcttaaaagtgaaacttagatacaattgtgattggatacttagatactaagtgaaacttagtgtaacaattttgatctgttaaattggattttacatgtacatttgaatgccagaatttctaaataaatcccctggttaggaaattttaaaagtcaaagcttgttttcttcaaccactaccttctacattggttgacttagaccgtaagctttttaagtttctcattgtaatttaccttctcatgcagattgctgatgttttattaaaccttattttt

SEQ ID NO: 170894 - DNA, 4893 bp, Homo sapiens
  Payload ID: 13631
  Gene Symbol: PPP1CB
  Gene Name: protein phosphatase 1, catalytic subunit, beta isozyme
  Uniprot ID: P62140
  ENST ID: ENST00000395366
  CDS Start-End: 273-1256
ggaggaggtggcggcctgggtctgacgcggccctgttcgagggggcctctcttgtttatttatttattttccgtgggtgcctccgagtgtgcgcgcgctctcgctacccggcggggagggggtggggggagggcccgggaaaagggggagttggagccggggtcgaaacgccgcgtgacttgtaggtgagagaacgccgagccgtcgccgcagcctccgccgccgagaagcccttgttcccgctgctgggaaggagagtctgtgccgacaagatggcggacggggagctgaacgtggacagcctcatcacccggctgctggaggtacgaggatgtcgtccaggaaagattgtgcagatgactgaagcagaagttcgaggcttatgtatcaagtctcgggagatctttctcagccagcctattcttttggaattggaagcaccgctgaaaatttgtggagatattcatggacaatatacagatttactgagattatttgaatatggaggtttcccaccagaagccaactatcttttcttaggagattatgtggacagaggaaagcagtctttggaaaccatttgtttgctattggcttataaaatcaaatatccagagaacttctttctcttaagaggaaaccatgagtgtgctagcatcaatcgcatttatggattctatgatgaatgcaaacgaagatttaatattaaattgtggaagaccttcactgattgttttaactgtctgcctatagcagccattgtggatgagaagatcttctgttgtcatggaggattgtcaccagacctgcaatctatggagcagattcggagaattatgagacctactgatgtccctgatacaggtttgctctgtgatttgctatggtctgatccagataaggatgtgcaaggctggggagaaaatgatcgtggtgtttcctttacttttggagctgatgtagtcagtaaatttctgaatcgtcatgatttagatttgatttgtcgagctcatcaggtggtggaagatggatatgaattttttgctaaacgacagttggtaaccttattttcagccccaaattactgtggcgagtttgataatgctggtggaatgatgagtgtggatgaaactttgatgtgttcatttcagatattgaaaccatctgaaaagaaagctaaataccagtatggtggactgaattctggacgtcctgtcactccacctcgaacagctaatccgccgaagaaaaggtgaagaaaggaattctgtaaagaaaccatcagatttgttaaggacatacttcataatatataagtgtgcactgtaaaaccatccagccatttgacaccctttatgatgtcacacctttaacttaaggagacgggtaaaggatcttaaatttttttctaatagaaagatgtgctacactgtattgtaataagtatactctgttatagtcaacaaagttaaatccaaattcaaaattatccattaaagttacatcttcatgtatcacaatttttaaagttgaaaagcatcccagttaaactagatgtgatagttaaaccagatgaaagcatgatgatccatctgtgtaatgtggttttagtgttgcttggttgtttaattattttgagcttgttttgtttttgtttgttttcactagaataatggcaaatacttctaatttttttccctaaacatttttaaaagtgaaatatgggaagagctttacagacattcaccaactattattttcccttgtttatctacttagatatctgtttaatcttactaagaaaactttcgcctcattacattaaaaaggaattttagagattgattgttttaaaaaaaaatacgcacattgtccaatccagtgattttaatcatacagtttgactgggcaaactttacagctgatagtgaatattttgctttatacaggaattgacactgatttggatttgtgcactctaatttttaacttattgatgctctattgtgcagtagcatttcatttaagataaggctcatatagtattacccaactagttggtaatgtgattatgtggtaccttggctttaggttttcattcgcacggaacaccttttggcatgcttaacttcctggtaacaccttcacctgcattggttttctttttcttttttctttctttttttttttttttttttttttgagttgttgtttgtttttagatccacagtacatgagaatccttttttgacaagccttggaaagctgacactgtctctttttcctccctctatacgaaggatgtatttaaatgaatgctggtcagtgggacattttgtcaactatgggtattgggtgcttaactgtctaatattgccatgtgaatgttgtatacgattgtaaggcttatgtcactaaagatttttattctgattttttcataatcaaaggtcatatgatactgtatagacaagctttgtagtgaagtatagtagcaataatttctgtacctgatcaagtttattgcagcctttcttttcctatttcttttttttaagggttagtattaacaaatggcaatgagtagaaaagttaacatgaagattttagaaggagagaacttacaggacacagatttgtgattctttgactgtgacactattggatgtgattctaaaagcttttattgagcattgtcaaatttgtaagcttcatagggatggacatcatatctataatgcccttctatatgtgctaccatagatgtgacatttttgaccttaatatcgtctttgaaaatgttaaattgagaaacctgttaacttacattttatgaattggcacattgtattacttactgcaagagatatttcattttcagcacagtgcaaaagttctttaaaatgcatatgtctttttttctaattccgttttgttttaaagcacattttaaatgtagttttctcatttagtaaaagttgtctaattgatatgaagcctgactgattttttttttccttacagtgagacatttaagcacacattttattcacatagatactatgtccttgacatattgaaatgattcttttctgaaagtattcatgatctgcatatgatgtattaggttaggtcacaaaggttttatctgaggtgatttaaataacttcctgattggagtgtgtaagctgagcgatttctaataaaattttagttgtacacttttagtagtcatagtgaagcaggtctagaaaataagcctttggcagggaaaaagggcaatgttgattaatctcagtattaaaccacattaatctgtatcccattgtctggcttttgtaaattcatccaggtcaagactaagtatgttggttaataggaatccttttttttttttttaaagactaaatgtgaaaaaataatcactacttaagctaattaatattggtcattaaatttaaaggatggaaatttatcatgtttaaaaattattcaagcactcttaaaaccacttaaacagcctccagtcataaaaatgtgttctttacaaatatttgcttggcaacacgacttgaaataaataaaactttgtttcttaggagaaaatgattctgtaattccagtgtcactaatttatattgttctttcctctgatttttttcaggttagtgatttttttgtatacaatttaatccaaatgttatgacattcagaaatcatgaaacacagtagatatctgttataatgtggtgtatcacatggattataaagcaaagttatggtcgatttctattcttgaaagaatcaactacagtgaatcctttgcatttgaagccttaacatgcattgctttaattttgcccagggacaaattttaataatcagcaagactggtttgtgcaaagcgttgagtcatcaggtatttagagcctagccagctacccagtatccatgctgccatatcccttcattgtaaaaagtacctaaacattcgtgaaatgattttttttagctgaaaaatgctggcaagaagaattttaaagcttaaaataggtggtaaatttgaagtatgagtgtgttcacgagaaacataggcttttcaaaaaaatttttattcaaggcaaagcaaggaacatcttgagatatgtctcaagaatataaagatgtattattttaagccaaggagctgaaatatatctcagtttataaattcaggtatattctttttgtctccatggcaaccataacttttgaaccaaaaaaaattgtttttacatctttatgctgaaaatgtgtttagattaggaatatggtcgggctgaatttgctgttgctccctaaccaaatccacctcttgttttccttgtgagtccatggctaaatcaaagctgcccctgagaagagacttaatccaagcctgattgtactagtggcatcacttagaagtaggctttccctcttcctagtagatctcaatgttttataattccttaaaacagctgaaaattgggacaacatactttacgcaatgaacagtagttaaataggaaataaactagttccatataagtatacacctagagttttaattacctttataatgtttcttaaaagtgaaacttagatacaattgtgattggatacttagatactaagtgaaacttagtgtaacaattttgatctgttaaattggattttacatgtacatttgaatgccagaatttctaaataaatcccctggttaggaaattttaaaagtcaaagcttgttttcttcaaccactaccttctacattggttgacttagaccgtaagctttttaagtttctcattgtaatttaccttctcatgcagattgctgatgttttattaaaccttatttttacaaaaatga

SEQ ID NO: 170895 - DNA, 281 bp, Homo sapiens
  Payload ID: 13631
  Gene Symbol: PPP1CB
  Gene Name: protein phosphatase 1, catalytic subunit, beta isozyme
  ENST ID: ENST00000418910
  CDS Start-End: 1-249
tgtgctagcatcaatcgcatttatggattctatgatgaatgcaaacgaagatttaatattaaattgtggaagaccttcactgattgttttaactgtctgcctatagcagccattgtggatgagaagatcttctgttgtcatggaggtagactagtaaatttgccttacagattttttttttcttctattattcggaaaatacctataataatcaagaggctgtgggaaaacaaagcagtgcttgtatgaaaactcaagtgattaaaactgttttaaacatg

SEQ ID NO: 170896 - DNA, 721 bp, Homo sapiens
  Payload ID: 13631
  Gene Symbol: PPP1CB
  Gene Name: protein phosphatase 1, catalytic subunit, beta isozyme
  ENST ID: ENST00000455580
  CDS Start-End: 214-721
cacctgcgcgaagacggcagcgggagaagccgctccagtgcggttgcgcggcggcccaggcgtcgaggggagcctcggcggggagcgcaccgcgcgcctgcgcggagagctgcgtgacgcggcggcgcgcaagggacgtgcggagtgagtggcgctgcgggtggggccgtcggcggcgctgtacgaggatgtcgtccaggaaagattgtgcagatgactgaagcagaagttcgaggcttatgtatcaagtctcgggagatctttctcagccagcctattcttttggaattggaagcaccgctgaaaatttgtggagatattcatggacaatatacagatttactgagattatttgaatatggaggtttcccaccagaagccaactatcttttcttaggagattatgtggacagaggaaagcagtctttggaaaccatttgtttgctattggcttataaaatcaaatatccagagaacttctttctcttaagaggaaaccatgagtgtgctagcatcaatcgcatttatggattctatgatgaatgcaaacgaagatttaatattaaattgtggaagaccttcactgattgttttaactgtctgcctatagcagccattgtggatgagaagatcttctgttgtcatggaggattgtcaccagacctgcaatctatggagcagattcggagaattatgagacctactgatgtccctgatacag

SEQ ID NO: 170897 - DNA, 569 bp, Homo sapiens
  Payload ID: 13631
  Gene Symbol: PPP1CB
  Gene Name: protein phosphatase 1, catalytic subunit, beta isozyme
  ENST ID: ENST00000427786
  CDS Start-End: 108-302
gagctgcgtgacgcggcggcgcgcaagggacgtgcggagtgagtggcgctgcgggtggggccgtcggcggcgctgtacgaggatgtcgtccaggaaagattgtgcagatgactgaagcagaagttcgaggcttatgtatcaagtctcgggagatctttctcagccagcctattcttttggaattggaagcaccgctgaaaatttgtggaattcaggaacagcttagtgggtcctctggctctgggtctctcacaaggctccaattaaggcgtgatctcgggctgcagtcatctgaaggttgaactgtgaaaggattcagttccttatagactgatggactaagagcctcagttccaaatgagctgttggtcagaggcctccctcagttctttgctacgtgggatgcttcattagacagctggtttcatcagcgagcatggaagaaggagatattcatggacaatatacagatttactgagattatttgaatatggaggtttcccaccagaagccaactatcttttcttaggagattatgtggacagaggaaagcagtctttggaaacca

SEQ ID NO: 170898 - DNA, 570 bp, Homo sapiens
  Payload ID: 13631
  Gene Symbol: PPP1CB
  Gene Name: protein phosphatase 1, catalytic subunit, beta isozyme
  ENST ID: ENST00000420282
  CDS Start-End: 196-570
agtgcggttgcgcggcggcccaggcgtcgaggggagcctcggcggggagcgcaccgcgcgcctgcgcggagagctgcgtgacgcggcggcgcgcaagggacgtgcggagtgagagaacgccgagccgtcgccgcagcctccgccgccgagaagcccttgttcccgctgctgggaaggagagtctgtgccgacaagatggcggacggggagctgaacgtggacagcctcatcacccggctgctggaggtacgaggatgtcgtccaggaaagattgtgcagatgactgaagcagaagttcgaggcttatgtatcaagtctcgggagatctttctcagccagcctattcttttggaattggaagcaccgctgaaaatttgtggagatattcatggacaatatacagatttactgagattatttgaatatggaggtttcccaccagaagccaactatcttttcttaggagattatgtggacagaggaaagcagtctttggaaaccatttgtttgctattggcttataaaatcaaatatccagagaacttctttctcttaagaggaaaccatgag

SEQ ID NO: 170899 - DNA, 584 bp, Homo sapiens
  Payload ID: 13631
  Gene Symbol: PPP1CB
  Gene Name: protein phosphatase 1, catalytic subunit, beta isozyme
  ENST ID: ENST00000441461
  CDS Start-End: 170-584
gcgcggagagctgcgtgacgcggcggcgcgcaagggacgtgcggagtgagtggcgctgcgggtggggccgtcggcggcgctggtgagagaacgccgagccgtcgccgcagcctccgccgccgagaagcccttgttcccgctgctgggaaggagagtctgtgccgacaagatggcggacggggagctgaacgtggacagcctcatcacccggctgctggaggtacgaggatgtcgtccaggaaagattgtgcagatgactgaagcagaagttcgaggcttatgtatcaagtctcgggagatctttctcagccagcctattcttttggaattggaagcaccgctgaaaatttgtggagatattcatggacaatatacagatttactgagattatttgaatatggaggtttcccaccagaagccaactatcttttcttaggagattatgtggacagaggaaagcagtctttggaaaccatttgtttgctattggcttataaaatcaaatatccagagaacttctttctcttaagaggaaaccatgagtgtgctagcatcaatcgcatttatggattctatgatgaat

SEQ ID NO: 170900 - DNA, 2559 bp, Homo sapiens
  Payload ID: 13632
  Gene Symbol: PPP1CC
  Gene Name: protein phosphatase 1, catalytic subunit, gamma isozyme
  Uniprot ID: P36873
  ENST ID: ENST00000335007
  CDS Start-End: 192-1163
ttttgttcttctcgtggttccagtggggagagaaggaggaagtagggagcggggtggcaggggggggacccgccgcggctgctgccaccgccgccaccaccgcctctgctcgtggcgtgggaaaggaggtgtgagtcccgggcgcgagccggcggcggcgccgctgcgggagggtcggcggtgggaaggcgatggcggatttagataaactcaacatcgacagcattatccaacggctgctggaagtgagagggtccaagcctggtaagaatgtccagcttcaggagaatgaaatcagaggactgtgcttaaagtctcgtgaaatctttctcagtcagcctatcctactagaacttgaagcaccactcaaaatatgtggtgacatccatggacaatactatgatttgctgcgactttttgagtacggtggtttcccaccagaaagcaactacctgtttcttggggactatgtggacaggggaaagcagtcattggagacgatctgcctcttactggcctacaaaataaaatatcctgagaatttttttcttctcagagggaaccatgaatgtgccagcatcaacagaatttatggattttatgatgaatgtaaaagaagatacaacattaaactatggaaaactttcacagactgttttaactgtttaccgatagcagccatcgtggatgagaagatattctgctgtcatggaggtttatcaccagatcttcaatctatggagcagattcggcgaattatgcgaccaactgatgtaccagatcaaggtcttctttgtgatcttttgtggtctgaccccgataaagatgtcttaggctggggtgaaaatgacagaggagtgtccttcacatttggtgcagaagtggttgcaaaatttctccataagcatgatttggatcttatatgtagagcccatcaggtggttgaagatggatatgaattttttgcaaagaggcagttggtcactctgttttctgcgcccaattattgcggagagtttgacaatgcaggtgccatgatgagtgtggatgaaacactaatgtgttcttttcagattttaaagcctgcagagaaaaagaagccaaatgccacgagacctgtaacgcctccaaggggtatgatcacaaagcaagcaaagaaatagatgtcgttttgacactgcctagtcgggacttgtaacatagagtatataaccttcatttttaagactgtaatgtgtactggtcagcttgctcagatagatctgtgtttgtgggggcccttccttccatttttgatttagtgaatggcatttgctggttataacagcaaatgaaagactcttcactccaaaaagaaaagtgttttgttttttaattctctgttccttttgcaaacaattttaatgatggtgttaaagctgtacaccccaggacagtttatcctgtctgaggagtaagtgtacaattgatcttttttaattcagtacaacccataatcatgtaaatgctcattttctttaggacataaagagagccctagggtgctctgaatctgtacatgttcttgtcataaaatgcatactgttgatacaaaccactgtgaacattttttatttgagaattttgtttcaaagggattgctttttcctctcattgtcttgttatgtacaaactagtttttatagctatcaacattaggagtaactttcaaccttgccagcatcactggtatgatgtatatttaattaaagcacacttttccccgaccgtatacttaaaatgacaaagccattcttttaaatatttgtgactctttcctaaagccaaagtttctgttgaattatgttttgacacacccctaagtacaaggtggtatggttgtatacacatgctgccttcttggggattcaaaaacaggtttttgattttgaatagcaattagtgatatagtgctgtttaagctactaacgataaaaggtaataacattttatacaatttccatatagtctattcattaagtaatctttttacagttgcatcaggcctgaacccgtccattcagaaagcttcaaattatagaaacaatactgttctatacgagtgaccgattatgctttctttggcctacattctttattctgcggtgaagttgaggcttataagttaaaacaaaggaactaacttactgtccaccagtttatacagaactcacagtacctatgacttttttaaactaagatctgttaaaaaagaaatctgtttcaacagatgaccgtgtacaataccgtgtggtgaaaatgaattcagacttattaaatgatgaacttgttaaatcttctcagtgtctatttatcagcacaatacacacaggagaactgttgatggcatattgaatagattttcctgaataaattgctctggaaaccacacggttgcattttggttttgcttctttcaaatagtctgttttccaaagatggattataatacagatactaatactctttgagttgtaacctggagacatctatttgtgtaatagagtgatgaggtggaac

SEQ ID NO: 170901 - DNA, 1472 bp, Homo sapiens
  Payload ID: 13632
  Gene Symbol: PPP1CC
  Gene Name: protein phosphatase 1, catalytic subunit, gamma isozyme
  Uniprot ID: P36873
  ENST ID: ENST00000340766
  CDS Start-End: 233-1246
atccgtgcgccgcccgaggctgtctaaggagtcggcggccattttgttcttctcgtggttccagtggggagagaaggaggaagtagggagcggggtggcaggggggggacccgccgcggctgctgccaccgccgccaccaccgcctctgctcgtggcgtgggaaaggaggtgtgagtcccgggcgcgagccggcggcggcgccgctgcgggagggtcggcggtgggaaggcgatggcggatttagataaactcaacatcgacagcattatccaacggctgctggaagtgagagggtccaagcctggtaagaatgtccagcttcaggagaatgaaatcagaggactgtgcttaaagtctcgtgaaatctttctcagtcagcctatcctactagaacttgaagcaccactcaaaatatgtggtgacatccatggacaatactatgatttgctgcgactttttgagtacggtggtttcccaccagaaagcaactacctgtttcttggggactatgtggacaggggaaagcagtcattggagacgatctgcctcttactggcctacaaaataaaatatcctgagaatttttttcttctcagagggaaccatgaatgtgccagcatcaacagaatttatggattttatgatgaatgtaaaagaagatacaacattaaactatggaaaactttcacagactgttttaactgtttaccgatagcagccatcgtggatgagaagatattctgctgtcatggaggtttatcaccagatcttcaatctatggagcagattcggcgaattatgcgaccaactgatgtaccagatcaaggtcttctttgtgatcttttgtggtctgaccccgataaagatgtcttaggctggggtgaaaatgacagaggagtgtccttcacatttggtgcagaagtggttgcaaaatttctccataagcatgatttggatcttatatgtagagcccatcaggtggttgaagatggatatgaattttttgcaaagaggcagttggtcactctgttttctgcgcccaattattgcggagagtttgacaatgcaggtgccatgatgagtgtggatgaaacactaatgtgttcttttcagattttaaagcctgcagagaaaaagaagccaaatgccacgagacctgtaacgcctccaagggttgcatcaggcctgaacccgtccattcagaaagcttcaaattatagaaacaatactgttctatacgagtgaccgattatgctttctttggcctacattctttattctgcggtgaagttgaggcttataagttaaaacaaaggaactaacttactgtccaccagtttatacagaactcacagtacctatgacttttttaaactaagatctgttaaaaaagaaatctgtttcaacagatgaccgtgtacaataccgtgtggtgaaaatgaattcagacttattaaatgatgaacttgtt

SEQ ID NO: 170902 - DNA, 563 bp, Homo sapiens
  Payload ID: 13632
  Gene Symbol: PPP1CC
  Gene Name: protein phosphatase 1, catalytic subunit, gamma isozyme
  ENST ID: ENST00000551582
  CDS Start-End: 1-252
aactgtttaccgatagcagccatcgtggatgagaagatattctgctgtcatggaggtttatcaccagatcttcaatctatggagcagattcggcgaattatgcgaccaactgatgtaccagatcaagattttaaagcctgcagagaaaaagaagccaaatgccacgagacctgtaacgcctccaaggggtatgatcacaaagcaagcaaagaaatagatgtcgttttgacactgcctagtcgggacttgtaacatagagtatataaccttcatttttaagactgtaatgtgtactggtcagcttgctcagatagatctgtgtttgtgggggcccttccttccatttttgatttagtgaatggcatttgctggttataacagcaaatgaaagactcttcactccaaaaagaaaagtgttttgttttttaattctctgttccttttgcaaacaattttaatgatggtgttaaagctgtacaccccaggacagtttatcctgtctgaggagtaagtgtacaattgatcttttttaattcagtacaacccataatcatgtaaatgct

SEQ ID NO: 170903 - DNA, 2154 bp, Homo sapiens
  Payload ID: 13632
  Gene Symbol: PPP1CC
  Gene Name: protein phosphatase 1, catalytic subunit, gamma isozyme
  ENST ID: ENST00000546933
  CDS Start-End: 1001-1999
atcagaacgagacttagttacatattttggggtccaaaagtgaactttataactgtaaaattaaggtacatttagcagttccgtgctactttatctgtatctaatgactatccagtctgttacaactggaaccaaaacaaaatttctttcccacaactacctacgtgctgacaagtgagttctgttgcaaagtttgtactttgatagaagaaccctaagtgctctggtggtgtggatgccccatgctgtgcaatgatttctttctcccattattatcttatctgttcaaattattagggaacgtgctttcttacagtatagcacatgactgacatcctttgccctatatagacatgagcataaacacaaatgcaggcccagaaaatgcatggcaaaataagtacaatgaaccaacattttcttaatgaaatgaaaacaacactaacattttttcataggtaaattaaatcagagatcctcaggaggagatacccatggtcctctggaaaacactgatgggggagggttctgagtatttccaatcctgtttcttttcttttcttttctttccttttcttttttttttttgagacggagtctcgctgtgttgccaggctggagtgcagtggcgcgatcttggctcactgcaacctccgcctcccgggtgcaggcgattctcctgagtagctgggattacaggtgcacgccatgttggcgaggatggtctggatctcttgacctcatcatgatctgcccgcctcaccctcccaaagtgctgggattacaagcgtgagccattgcatctggcctgcagtcctgtttctaacagcattcgcacagacaggatggctccttttttggaatactataaaagaagtcttacttggtatcgaagatgcaattaagtcttgtctaagattttaagattctaattagacattaaaaccatgtttattataagtgtcctgaaaatgaagccactcagaaagctagttaaaccatgtttttgcccctttatctaaatctcgtattgtattttgtattttggcttcattggactaattgcgatttttctcttgcagtgagagggtccaagcctggtaagaatgtccagcttcaggagaatgaaatcagaggactgtgcttaaagtctcgtgaaatctttctcagtcagcctatcctactagaacttgaagcaccactcaaaatatgtggtgacatccatggacaatactatgatttgctgcgactttttgagtacggtggtttcccaccagaaagcaactacctgtttcttggggactatgtggacaggggaaagcagtcattggagacgatctgcctcttactggcctacaaaataaaatatcctgagaatttttttcttctcagagggaaccatgaatgtgccagcatcaacagaatttatggattttatgatgaatgtaaaagaagatacaacattaaactatggaaaactttcacagactgttttaactgtttaccgatagcagccatcgtggatgagaagatattctgctgtcatggaggtttatcaccagatcttcaatctatggagcagattcggcgaattatgcgaccaactgatgtaccagatcaaggtcttctttgtgatcttttgtggtctgaccccgataaagatgtcttaggctggggtgaaaatgacagaggagtgtccttcacatttggtgcagaagtggttgcaaaatttctccataagcatgatttggatcttatatgtagagcccatcaggtggttgaagatggatatgaattttttgcaaagaggcagttggtcactctgttttctgcgcccaattattgcggagagtttgacaatgcaggtgccatgatgagtgtggatgaaacactaatgtgttcttttcagattttaaagcctgcagagaaaaagaagccaaatgccacgagacctgtaacgcctccaaggggtatgatcacaaagcaagcaaagaaatagatgtcgttttgacactgcctagtcgggacttgtaacatagagtatataaccttcatttttaagactgtaatgtgtactggtcagcttgctcagatagatctgtgtttgtgggggcccttccttccatttttgatttagtgaatggcatttgctgg

SEQ ID NO: 170904 - DNA, 747 bp, Homo sapiens
  Payload ID: 13632
  Gene Symbol: PPP1CC
  Gene Name: protein phosphatase 1, catalytic subunit, gamma isozyme
  ENST ID: ENST00000550261
  CDS Start-End: 1-163
catccatggacaatactatgatttgctgcgactttttgagtacggtggtttcccaccagaaagcaactacctgtttcttggggactatgtggacaggggaaagcagtttatcaccagatcttcaatctatggagcagattcggcgaattatgcgaccaactgatgtaccagatcaaggtcttctttgtgatcttttgtggtctgaccccgataaagatgtcttaggctggggtgaaaatgacagaggagtgtccttcacatttggtgcagaagtggttgcaaaatttctccataagcatgatttggatcttatatgtagagcccatcaggtggttgaagatggatatgaattttttgcaaagaggcagttggtcactctgttttctgcgcccaattattgcggagagtttgacaatgcaggtgccatgatgagtgtggatgaaacactaatgtgttcttttcagattttaaagcctgcagagaaaaagaagccaaatgccacgagacctgtaacgcctccaagggttgcatcaggcctgaacccgtccattcagaaagcttcaaattatagaaacaatactgttctatacgagtgaccgattatgctttctttggcctacattctttattctgcggtgaagttgaggcttataagttaaaacaaaggaactaacttactgtccaccagtttatacagaactcacagtacctatgacttttttaaactaagatctgttaaaaaagaaa

SEQ ID NO: 170905 - DNA, 1581 bp, Homo sapiens
  Payload ID: 13632
  Gene Symbol: PPP1CC
  Gene Name: protein phosphatase 1, catalytic subunit, gamma isozyme
  ENST ID: ENST00000551676
  CDS Start-End: 133-945
ggggggggacccgccgcggctgctgccaccgccgccaccaccgcctctgctcgtggcgtgggaaaggaggtgtgagtcccgggcgcgagccggcggcggcgccgctgcgggagggtcggcggtgggaaggcgatggcggatttagataaactcaacatcgacagcattatccaacggctgctggaagtgagagggtccaagcctggtaagaatgtccagcttcaggagaatgaaatcagaggactgtgcttaaagtctcgtgaaatctttctcagtcagcctatcctactagaacttgaagcaccactcaaaatatgtggtgacatccatggacaatactatgatttgctgcgactttttgagtacggtggtttcccaccagaaagcaactacctgtttcttggggactatgtggacaggggaaagcagtcattggagacgatctgcctcttactggcctacaaaataaaatatcctgagaatttttttcttctcagagggaaccatgaatgtgccagcatcaacagaatttatggattttatgatgaatgtaaaagaagatacaacattaaactatggaaaactttcacagactgttttaactgtttaccgatagcagccatcgtggatgagaagatattctgctgtcatggaggtttatcaccagatcttcaatctatggagcagattcggcgaattatgcgaccaactgatgtaccagatcaaggtcttctttgtgatcttttgtggtctgaccccgataaagatgtcttaggctggggtgaaaatgacagaggagtgtccttcacatttggtgcagaagtggttgcaaaatttctccataagcatgatttggatcttatatgtagagcccatcaggtattgattttgaattttacatgtacacttaagagcatgtgtgtgagcacagattctccttgttgattttggtgggtaggtattgcttatttatacaaagtgtttctggaacacaagatatcaggctcaatgggaaactgaaacatggttttactcacctaatatttgcacctatttatattgaaaaaattttctcttcaaggtggttgaagatggatatgaattttttgcaaagaggcagttggtcactctgttttctgcgcccaattattgcggagagtttgacaatgcaggtgccatgatgagtgtggatgaaacactaatgtgttcttttcaggtagagcatgctttcaacatgatttccttttaatatgtttacactttgctgattgaaaaatataattgctactttttgcctagtgttcacttatgctgagtaggctaagtttttattttcccttaaccagtgtgtattatagttgaataatgtgtggatcccttgtaaaagaaaaaattaattatggcaccttttcccagtgttgaattataaatttttgcattgcatattggctccttaatgcttatggctcttttactgtaaatctaaaaccttaatgacaatgtaatgttcagctaaaattaaatcaccacttgaatgtgaaaagtactgagtgccttgtgctatgtgtttacttagttctg

SEQ ID NO: 170906 - DNA, 1882 bp, Homo sapiens
  Payload ID: 13632
  Gene Symbol: PPP1CC
  Gene Name: protein phosphatase 1, catalytic subunit, gamma isozyme
  ENST ID: ENST00000550991
  CDS Start-End: 167-1081
gggagagaaggaggaagtagggagcggggtggcaggggggggacccgccgcggctgctgccaccgccgccaccaccgcctctgctcgtggcgtgggaaaggaggtgtgagtcccgggcgcgagccggcggcggcgccgctgcgggagggtcggcggtgggaaggcgatggcggatttagataaactcaacatcgacagcattatccaacggctgctggaagtgagagggtccaagcctggtaagaatgtccagcttcaggagaatgaaatcagaggactgtgcttaaagtctcgtgaaatctttctcagtcagcctatcctactagaacttgaagcaccactcaaaatatgtggtgacatccatggacaatactatgatttgctgcgactttttgagtacggtggtttcccaccagaaagcaactacctgtttcttggggactatgtggacaggggaaagcagtcattggagacgatctgcctcttactggcctacaaaataaaatatcctgagaatttttttcttctcagagggaaccatgaatgtgccagcatcaacagaatttatggattttatgatgaatgtaaaagaagatacaacattaaactatggaaaactttcacagactgttttaactgtttaccgatagcagccatcgtggatgagaagatattctgctgtcatggaggtttatcaccagatcttcaatctatggagcagattcggcgaattatgcgaccaactgatgtaccagatcaaggtcttctttgtgatcttttgtggtctgaccccgataaagatgtcttaggctggggtgaaaatgacagaggagtgtccttcacatttggtgcagaagtggttgcaaaatttctccataagcatgatttggatcttatatgtagagcccatcaggtggttgaagatggatatgaattttttgcaaagaggcagttggtcactctgttttctgcgcccaattattgcggagagtttgacaatgcaggtgccatgatgagtgtggatgaaacactaatgtgttcttttcaggtagagcatgctttcaacatgatttccttttaatatgtttacactttgctgattgaaaaatataattgctactttttgcctagtgttcacttatgctgagtaggctaagtttttattttcccttaaccagtgtgtattatagttgaataatgtgtggatcccttgtaaaagaaaaaattaattatggcaccttttcccagtgttgaattataaatttttgcattgcatattggctccttaatgcttatggctcttttactgtaaatctaaaaccttaatgacaatgtaatgttcagctaaaattaaatcaccacttgaatgtgaaaagtactgagtgccttgtgctatgtgtttacttagttctgccctctagtctaacttccacaaaacttctgttaatgtaccatgacatcatttggccttcagttggcacaaaagcattatttagaatctgcctcagcctttttctcatttgcttattatgatacttgtacaacttcaagccagcctagtcataaacataaatacagccaccaaatcatgtggcactcatcagttaaatgaattaaaatagttttttaccaattatcagagagaacttgcagctttcaaaattccaaagattgtgcaaggatcccctacaggttggagaaacacttttgtaaagaactttttcccctgtatcagaaggagtagctaaagatactaccaggtgtagacttcagaagattgtcattatactcagaggcaaaataatttgtccagataatagattttatctgttcgtcatagcgttaattaccaaatgtttacattcaacatagcttgtgttaa

SEQ ID NO: 170907 - DNA, 582 bp, Homo sapiens
  Payload ID: 13632
  Gene Symbol: PPP1CC
  Gene Name: protein phosphatase 1, catalytic subunit, gamma isozyme
  ENST ID: ENST00000620030
  CDS Start-End: 161-582
gaaggaggaagtagggagcggggtggcaggggggggacccgccgcggctgctgccaccgccgccaccaccgcctctgctcgtggcgtgggaaaggaggtgtgagtcccgggcgcgagccggcggcggcgccgctgcgggagggtcggcggtgggaaggcgatggcggatttagataaactcaacatcgacagcattatccaacggctgctggaagtgagagggtccaagcctggtaagaatgtccagcttcaggagaatgaaatcagaggactgtgcttaaagtctcgtgaaatctttctcagtcagcctatcctactagaacttgaagcaccactcaaaatatgtggtgacatccatggacaatactatgatttgctgcgactttttgagtacggtggtttcccaccagaaagcaactacctgtttcttggggactatgtggacaggggaaagcagtcattggagacgatctgcctcttactggcctacaaaataaaatatcctgagaatttttttcttctcagagggaaccatgaatgtgccagcatcaacagaatttatggattttatgatgaatgtaa

SEQ ID NO: 170908 - DNA, 1723 bp, Homo sapiens
  Payload ID: 13633
  Gene Symbol: PPP1R11
  Gene Name: protein phosphatase 1, regulatory (inhibitor) subunit 11
  ENST ID: ENST00000376758
  CDS Start-End: 472-696
ggaaaaaggaagggagatcaaagattaggtgctggggactgaaaaataattttcatgtattaatactaccaaggatgatttggggaggaagacggagaaacagcaaggattatattttcctttgaagagttgctgggacctttcctaggttaggaattgtgtcttctcttatactggtggtataagaacaggaaataatacttattcctcaagggactatctgaggtaaaagacctgttctgttttatcttctgtcagctcctctggtgctatgcctatggtactgattgagctaaagaagaaaagagaggaggttccctgggagggagtgggaaaggttagtaagaggggactagataggtatgctcatccttaaccttctaggagaaccggagccttaccatcaaacttcggaaacggaagccagagaaaaaggtagaatggacaagtgacactgtggacaatgaacacatgggccgccgctcatccaaatgctgctgtatttatgagaaacctcgggcctttggcgagagctccacggaaagtgatgaggaggaagaagagggctgtggtcatacacactgtgtacgtggccaccgcaaaggacggcgtcgtgcaaccctaggaccgacccccaccacccctccccagcctcctgacccttcccagccccctccagggccaatgcagcactaaatccctctctcctccagcattcctgtgtctgtctggccctaaatgtatccatgtggctacttctccagccccctccttccctctcttctgcctgatagagggaagaggaagaggaggacgaacagagatcctgaaattctgacttgctgctattccagaacccagcctcctgggtttccccagtcctcatttttcctcccaatacccacccttctctctcgagggatctaggcaccttggtcccagtgtcttccttttgttctcactgccaaactgcctgtcctgggatctagttatcttggccctgcactctcaacatgagtagcgaacacttaaattgggttttcaacagtcccagctttcactgccagggtcccagtcagattccaggaatttgcgccctaactttgcttgctaatcctggtttagagctatcccactaaaatatttaatcctaattcttagtccttgcctgtgagatatgaggtcttacaggagacctcagagctcccagcccttctcctcctgctaacccttctcacaccctcaagaggagttagaaaagaggtccttgtcattctcacctcttatggaaaatggaataagaaataatcatatcctttcttcccacccttctcctgttatttaggatttctgacaaagctggcttgagattggtcacttagagccgactgtctcctctgccttttgtttttcagcttcagagacagatccaatatagtcccagggacctgggtctctgggagaggaaggaagagggagggagcaaagagattggggtatgtcccctgtagtacactcttacctcttacttcctagactttgatttctccggcagcccagatgttcagttctcttggcccctctctaccccttactgggatccggttttcattttccggtccttttgccatacacagttacagagatcagtcaaatccataccaccactgagatctcatttattgccacagatgcacaaaataaataacccaaaatcacaaaa

SEQ ID NO: 170909 - DNA, 1464 bp, Homo sapiens
  Payload ID: 13633
  Gene Symbol: PPP1R11
  Gene Name: protein phosphatase 1, regulatory (inhibitor) subunit 11
  ENST ID: ENST00000376763
  CDS Start-End: 213-437
gggatatgggaggtgtggggttgaatatctagggctgggagaatcggaaggatgatttggggaggaagacggagaaacagcaaggattatattttcctttgaagagttgctgggacctttcctaggagaaccggagccttaccatcaaacttcggaaacggaagccagagaaaaaggtagaatggacaagtgacactgtggacaatgaacacatgggccgccgctcatccaaatgctgctgtatttatgagaaacctcgggcctttggcgagagctccacggaaagtgatgaggaggaagaagagggctgtggtcatacacactgtgtacgtggccaccgcaaaggacggcgtcgtgcaaccctaggaccgacccccaccacccctccccagcctcctgacccttcccagccccctccagggccaatgcagcactaaatccctctctcctccagcattcctgtgtctgtctggccctaaatgtatccatgtggctacttctccagccccctccttccctctcttctgcctgatagagggaagaggaagaggaggacgaacagagatcctgaaattctgacttgctgctattccagaacccagcctcctgggtttccccagtcctcatttttcctcccaatacccacccttctctctcgagggatctaggcaccttggtcccagtgtcttccttttgttctcactgccaaactgcctgtcctgggatctagttatcttggccctgcactctcaacatgagtagcgaacacttaaattgggttttcaacagtcccagctttcactgccagggtcccagtcagattccaggaatttgcgccctaactttgcttgctaatcctggtttagagctatcccactaaaatatttaatcctaattcttagtccttgcctgtgagatatgaggtcttacaggagacctcagagctcccagcccttctcctcctgctaacccttctcacaccctcaagaggagttagaaaagaggtccttgtcattctcacctcttatggaaaatggaataagaaataatcatatcctttcttcccacccttctcctgttatttaggatttctgacaaagctggcttgagattggtcacttagagccgactgtctcctctgccttttgtttttcagcttcagagacagatccaatatagtcccagggacctgggtctctgggagaggaaggaagagggagggagcaaagagattggggtatgtcccctgtagtacactcttacctcttacttcctagactttgatttctccggcagcccagatgttcagttctcttggcccctctctaccccttactgggatccggttttcattttccggtccttttgccatacacagttacagagatcagtcaaatccataccaccactgagatctcatttattgccacagatgcacaaaataaataacccaaaatcacaaaa

SEQ ID NO: 170910 - DNA, 1536 bp, Homo sapiens
  Payload ID: 13633
  Gene Symbol: PPP1R11
  Gene Name: protein phosphatase 1, regulatory (inhibitor) subunit 11
  ENST ID: ENST00000376765
  CDS Start-End: 285-509
ggattagaagagttgttggaggagctaggcctagggatatgggaggtgtggggttgaatatctagggctgggagaatcggaaggtattggagctatttggagtggcagagatggtgcaggaggatgatttggggaggaagacggagaaacagcaaggattatattttcctttgaagagttgctgggacctttcctaggagaaccggagccttaccatcaaacttcggaaacggaagccagagaaaaaggtagaatggacaagtgacactgtggacaatgaacacatgggccgccgctcatccaaatgctgctgtatttatgagaaacctcgggcctttggcgagagctccacggaaagtgatgaggaggaagaagagggctgtggtcatacacactgtgtacgtggccaccgcaaaggacggcgtcgtgcaaccctaggaccgacccccaccacccctccccagcctcctgacccttcccagccccctccagggccaatgcagcactaaatccctctctcctccagcattcctgtgtctgtctggccctaaatgtatccatgtggctacttctccagccccctccttccctctcttctgcctgatagagggaagaggaagaggaggacgaacagagatcctgaaattctgacttgctgctattccagaacccagcctcctgggtttccccagtcctcatttttcctcccaatacccacccttctctctcgagggatctaggcaccttggtcccagtgtcttccttttgttctcactgccaaactgcctgtcctgggatctagttatcttggccctgcactctcaacatgagtagcgaacacttaaattgggttttcaacagtcccagctttcactgccagggtcccagtcagattccaggaatttgcgccctaactttgcttgctaatcctggtttagagctatcccactaaaatatttaatcctaattcttagtccttgcctgtgagatatgaggtcttacaggagacctcagagctcccagcccttctcctcctgctaacccttctcacaccctcaagaggagttagaaaagaggtccttgtcattctcacctcttatggaaaatggaataagaaataatcatatcctttcttcccacccttctcctgttatttaggatttctgacaaagctggcttgagattggtcacttagagccgactgtctcctctgccttttgtttttcagcttcagagacagatccaatatagtcccagggacctgggtctctgggagaggaaggaagagggagggagcaaagagattggggtatgtcccctgtagtacactcttacctcttacttcctagactttgatttctccggcagcccagatgttcagttctcttggcccctctctaccccttactgggatccggttttcattttccggtccttttgccatacacagttacagagatcagtcaaatccataccaccactgagatctcatttattgccacagatgcacaaaataaataacccaaaatcacaaaa

SEQ ID NO: 170911 - DNA, 1689 bp, Homo sapiens
  Payload ID: 13633
  Gene Symbol: PPP1R11
  Gene Name: protein phosphatase 1, regulatory (inhibitor) subunit 11
  ENST ID: ENST00000376769
  CDS Start-End: 438-662
ccggaagcggcgagccggaagtggggttagccaggttatccccaggggtggagaagcggaggcccaggaggagggggaataaagaaggtggaggatcctggctaccactctgaatccgataccgcttctcttagacctcagcgacagaaaaagggaagggtgtctcatcccccttcctcctctcctccctgtcctgagccttagccatggccgaggcaggggctgggctgagcgagaccgtcactgagacaacggttaccgtgacaaccgagcccgatgatttggggaggaagacggagaaacagcaaggattatattttcctttgaagagttgctgggacctttcctaggagaaccggagccttaccatcaaacttcggaaacggaagccagagaaaaaggtagaatggacaagtgacactgtggacaatgaacacatgggccgccgctcatccaaatgctgctgtatttatgagaaacctcgggcctttggcgagagctccacggaaagtgatgaggaggaagaagagggctgtggtcatacacactgtgtacgtggccaccgcaaaggacggcgtcgtgcaaccctaggaccgacccccaccacccctccccagcctcctgacccttcccagccccctccagggccaatgcagcactaaatccctctctcctccagcattcctgtgtctgtctggccctaaatgtatccatgtggctacttctccagccccctccttccctctcttctgcctgatagagggaagaggaagaggaggacgaacagagatcctgaaattctgacttgctgctattccagaacccagcctcctgggtttccccagtcctcatttttcctcccaatacccacccttctctctcgagggatctaggcaccttggtcccagtgtcttccttttgttctcactgccaaactgcctgtcctgggatctagttatcttggccctgcactctcaacatgagtagcgaacacttaaattgggttttcaacagtcccagctttcactgccagggtcccagtcagattccaggaatttgcgccctaactttgcttgctaatcctggtttagagctatcccactaaaatatttaatcctaattcttagtccttgcctgtgagatatgaggtcttacaggagacctcagagctcccagcccttctcctcctgctaacccttctcacaccctcaagaggagttagaaaagaggtccttgtcattctcacctcttatggaaaatggaataagaaataatcatatcctttcttcccacccttctcctgttatttaggatttctgacaaagctggcttgagattggtcacttagagccgactgtctcctctgccttttgtttttcagcttcagagacagatccaatatagtcccagggacctgggtctctgggagaggaaggaagagggagggagcaaagagattggggtatgtcccctgtagtacactcttacctcttacttcctagactttgatttctccggcagcccagatgttcagttctcttggcccctctctaccccttactgggatccggttttcattttccggtccttttgccatacacagttacagagatcagtcaaatccataccaccactgagatctcatttattgccacagatgcacaaaataaataacccaaaatcacaaaa

SEQ ID NO: 170912 - DNA, 1731 bp, Homo sapiens
  Payload ID: 13633
  Gene Symbol: PPP1R11
  Gene Name: protein phosphatase 1, regulatory (inhibitor) subunit 11
  Uniprot ID: O60927
  ENST ID: ENST00000376772
  CDS Start-End: 324-704
ctttctttcagcgcctgcgcgctgtcacgttacggcggaactaatccagcgacgcctgcgctttgacgcatttggtgccgtggaagggaaaaagggggactgcagtatgcgtcacacccggaagcggcgagccggaagtggggttagccaggttatccccaggggtggagaagcggaggcccaggaggagggggaataaagaaggtggaggatcctggctaccactctgaatccgataccgcttctcttagacctcagcgacagaaaaagggaagggtgtctcatcccccttcctcctctcctccctgtcctgagccttagccatggccgaggcaggggctgggctgagcgagaccgtcactgagacaacggttaccgtgacaaccgagcccgagaaccggagccttaccatcaaacttcggaaacggaagccagagaaaaaggtagaatggacaagtgacactgtggacaatgaacacatgggccgccgctcatccaaatgctgctgtatttatgagaaacctcgggcctttggcgagagctccacggaaagtgatgaggaggaagaagagggctgtggtcatacacactgtgtacgtggccaccgcaaaggacggcgtcgtgcaaccctaggaccgacccccaccacccctccccagcctcctgacccttcccagccccctccagggccaatgcagcactaaatccctctctcctccagcattcctgtgtctgtctggccctaaatgtatccatgtggctacttctccagccccctccttccctctcttctgcctgatagagggaagaggaagaggaggacgaacagagatcctgaaattctgacttgctgctattccagaacccagcctcctgggtttccccagtcctcatttttcctcccaatacccacccttctctctcgagggatctaggcaccttggtcccagtgtcttccttttgttctcactgccaaactgcctgtcctgggatctagttatcttggccctgcactctcaacatgagtagcgaacacttaaattgggttttcaacagtcccagctttcactgccagggtcccagtcagattccaggaatttgcgccctaactttgcttgctaatcctggtttagagctatcccactaaaatatttaatcctaattcttagtccttgcctgtgagatatgaggtcttacaggagacctcagagctcccagcccttctcctcctgctaacccttctcacaccctcaagaggagttagaaaagaggtccttgtcattctcacctcttatggaaaatggaataagaaataatcatatcctttcttcccacccttctcctgttatttaggatttctgacaaagctggcttgagattggtcacttagagccgactgtctcctctgccttttgtttttcagcttcagagacagatccaatatagtcccagggacctgggtctctgggagaggaaggaagagggagggagcaaagagattggggtatgtcccctgtagtacactcttacctcttacttcctagactttgatttctccggcagcccagatgttcagttctcttggcccctctctaccccttactgggatccggttttcattttccggtccttttgccatacacagttacagagatcagtcaaatccataccaccactgagatctcatttattgccacagatgcacaaaataaataacccaaaatcacaaaa

SEQ ID NO: 170913 - DNA, 1640 bp, Homo sapiens
  Payload ID: 13633
  Gene Symbol: PPP1R11
  Gene Name: protein phosphatase 1, regulatory (inhibitor) subunit 11
  ENST ID: ENST00000376773
  CDS Start-End: 389-613
ctacaggcacagggcgaggggtagaaccacatcgcttgactcttaagtgtgtttccaactgctcccacttcccgttttctttagagaaacccagaccaaacaaggaaagggaaataggccacggtagggtcattactattgctccttaagcttcctcgccggtccacctacccagacaaggcaaacggaaatctgcagcaggactcagcttggtgcacacaactccgccctcgccacacccactctgcagcgtctggcccggcaatacccatctgggcgcccctcctgcttcctctaggctgagaaccggagccttaccatcaaacttcggaaacggaagccagagaaaaaggtagaatggacaagtgacactgtggacaatgaacacatgggccgccgctcatccaaatgctgctgtatttatgagaaacctcgggcctttggcgagagctccacggaaagtgatgaggaggaagaagagggctgtggtcatacacactgtgtacgtggccaccgcaaaggacggcgtcgtgcaaccctaggaccgacccccaccacccctccccagcctcctgacccttcccagccccctccagggccaatgcagcactaaatccctctctcctccagcattcctgtgtctgtctggccctaaatgtatccatgtggctacttctccagccccctccttccctctcttctgcctgatagagggaagaggaagaggaggacgaacagagatcctgaaattctgacttgctgctattccagaacccagcctcctgggtttccccagtcctcatttttcctcccaatacccacccttctctctcgagggatctaggcaccttggtcccagtgtcttccttttgttctcactgccaaactgcctgtcctgggatctagttatcttggccctgcactctcaacatgagtagcgaacacttaaattgggttttcaacagtcccagctttcactgccagggtcccagtcagattccaggaatttgcgccctaactttgcttgctaatcctggtttagagctatcccactaaaatatttaatcctaattcttagtccttgcctgtgagatatgaggtcttacaggagacctcagagctcccagcccttctcctcctgctaacccttctcacaccctcaagaggagttagaaaagaggtccttgtcattctcacctcttatggaaaatggaataagaaataatcatatcctttcttcccacccttctcctgttatttaggatttctgacaaagctggcttgagattggtcacttagagccgactgtctcctctgccttttgtttttcagcttcagagacagatccaatatagtcccagggacctgggtctctgggagaggaaggaagagggagggagcaaagagattggggtatgtcccctgtagtacactcttacctcttacttcctagactttgatttctccggcagcccagatgttcagttctcttggcccctctctaccccttactgggatccggttttcattttccggtccttttgccatacacagttacagagatcagtcaaatccataccaccactgagatctcatttattgccacagatgcacaaaataaataacccaaaatcacaaaa

SEQ ID NO: 170914 - DNA, 1731 bp, Homo sapiens
  Payload ID: 13633
  Gene Symbol: PPP1R11
  Gene Name: protein phosphatase 1, regulatory (inhibitor) subunit 11
  Uniprot ID: O60927
  ENST ID: ENST00000383612
  CDS Start-End: 324-704
ctttctttcagcgcctgcgcgctgtcacgttacggcggaactaatccagcgacgcctgcgctttgacgcatttggtgccgtggaagggaaaaagggggactgcagtatgcgtcacacccggaagcggcgagccggaagtggggttagccaggttatccccaggggtggagaagcggaggcccaggaggagggggaataaagaaggtggaggatcctggctaccactctgaatccgataccgcttctcttagacctcagcgacagaaaaagggaagggtgtctcatcccccttcctcctctcctccctgtcctgagccttagccatggccgaggcaggggctgggctgagcgagaccgtcactgagacaacggttaccgtgacaaccgagcccgagaaccggagccttaccatcaaacttcggaaacggaagccagagaaaaaggtagaatggacaagtgacactgtggacaatgaacacatgggccgccgctcatcaaaatgctgctgtatttatgagaaacctcgggcctttggcgagagctccacggaaagtgatgaggaggaagaagagggctgtggtcatacacactgtgtacgtggccaccgcaaaggacggcgtcgtgcaaccctaggaccgacccccaccacccctccccagcctcctgacccttcccagccccctccagggccaatgcagcactaaatccctctctcctccagcattcctgtgtctgtctggccctaaatgtatccatgtggctacttctccagccccctccttccctctcttctgcctgatagagggaagaggaagaggaggacgaacagagatcctgaaattctgacttgctgctattccagaacccagcctcctgggtttccccagtcctcatttttcctcccaatacccacccttctctctcgagggatctaggcaccttggtcccagtgtcttccttttgttctcactgccaaactgcctgtcctgggatctagttatcttggccctgcactctcaacatgagtagcgaacacttaaattgggttttcaacagtcccagctttcactgccagggtcccagtcagattccaggaatttgcgccctaactttgcttgctaatcctggtttagagctatcccactaaaatatttaatcctaattcttagtccttgcctgtgagatatgaggtcttacaggagacctcagagctcccagcccttctcctcctgctaacccttctcacaccctcaagaggagttagaaaagaggtccttgttattctcacctcttatggaaaatggaacaagaaataatcatatcctttcttcccacccttctcctgttatttaggatttctgacaaagctggcttgagattggtcacttagagccgactgtctcctctgccttttgtttttcagcttcagagacagatccaatatagtcccagggacctgggtctctgggagaggaaggaagagggagggagcaaagagattggggtatgtcccctgtagtacactctttcctcttacttcctagactttgatttctccggcagcccagatgttcagttctcttggcccctctctaccccttactgggatctggttttcattttccggtccttttgccatacacagttacagagatcagtcaaatccataccaccactgagatctcatttattgccacagatgcacaaaataaataacccaaaatcacaaaa

SEQ ID NO: 170915 - DNA, 1723 bp, Homo sapiens
  Payload ID: 13633
  Gene Symbol: PPP1R11
  Gene Name: protein phosphatase 1, regulatory (inhibitor) subunit 11
  ENST ID: ENST00000400654
  CDS Start-End: 472-696
ggaaaaaggaagggagatcaaagattaggtgctggggactgaaaaataattttcatgtattaatactaccaaggatgatttggggaggaagacggagaaaaagcaaggattatattttcctttgaagagttgctgggacctttcctaggttaggaattgtgtcttctcttatactggtggtataagaacaggaaataatacttattcctcaagggactatctgaggtaaaagacctgttctgttttatcttctgtcagctcctctggtgctatgcctatggtactggttgagctaaagaagaaaagagaggaggttccctgggagggagtgggaaaggttagtaagaggggactagataggtatgctcatccttaaccttctaggagaaccggagccttaccatcaaacttcggaaacggaagccagagaaaaaggtagaatggacaagtgacactgtggacaatgaacacatgggccgccgctcatcaaaatgctgctgtatttatgagaaacctcgggcctttggcgagagctccacggaaagtgatgaggaggaagaagagggctgtggtcatacacactgtgtacgtggccaccgcaaaggacggcgtcgtgcaaccctaggaccgacccccaccacccctccccagcctcctgacccttcccagccccctccagggccaatgcagcactaaatccctctctcctccagcattcctgtgtctgtctggccctaaatgtatccatgtggctacttctccagccccctccttccctctcttctgcctgatagagggaagaggaagaggaggacgaacagagatcctgaaattctgacttgctgctattccagaacccagcctcctgggtttccccagtcctcatttttcctcccaatacccacccttctctctcgagggatctaggcaccttggtcccagtgtcttccttttgttctcactgccaaactgcctgtcctgggatctagttatcttggccctgcactctcaacatgagtagcgaacacttaaattgggttttcaacagtcccagctttcactgccagggtcccagtcagattccaggaatttgcgccctaactttgcttgctaatcctggtttagagctatcccactaaaatatttaatcctaattcttagtccttgcctgtgagatatgaggtcttacaggagacctcagagctcccagcccttctcctcctgctaacccttctcacaccctcaagaggagttagaaaagaggtccttgttattctcacctcttatggaaaatggaacaagaaataatcatatcctttcttcccacccttctcctgttatttaggatttctgacaaagctggcttgagattggtcacttagagccgactgtctcctctgccttttgtttttcagcttcagagacagatccaatatagtcccagggacctgggtctctgggagaggaaggaagagggagggagcaaagagattggggtatgtcccctgtagtacactctttcctcttacttcctagactttgatttctccggcagcccagatgttcagttctcttggcccctctctaccccttactgggatctggttttcattttccggtccttttgccatacacagttacagagatcagtcaaatccataccaccactgagatctcatttattgccacagatgcacaaaataaataacccaaaatcacaaaa

SEQ ID NO: 170916 - DNA, 1464 bp, Homo sapiens
  Payload ID: 13633
  Gene Symbol: PPP1R11
  Gene Name: protein phosphatase 1, regulatory (inhibitor) subunit 11
  ENST ID: ENST00000400655
  CDS Start-End: 213-437
gggatatgggaggtgtggggttgaatatctagggctgggagaatcggaaggatgatttggggaggaagacggagaaaaagcaaggattatattttcctttgaagagttgctgggacctttcctaggagaaccggagccttaccatcaaacttcggaaacggaagccagagaaaaaggtagaatggacaagtgacactgtggacaatgaacacatgggccgccgctcatcaaaatgctgctgtatttatgagaaacctcgggcctttggcgagagctccacggaaagtgatgaggaggaagaagagggctgtggtcatacacactgtgtacgtggccaccgcaaaggacggcgtcgtgcaaccctaggaccgacccccaccacccctccccagcctcctgacccttcccagccccctccagggccaatgcagcactaaatccctctctcctccagcattcctgtgtctgtctggccctaaatgtatccatgtggctacttctccagccccctccttccctctcttctgcctgatagagggaagaggaagaggaggacgaacagagatcctgaaattctgacttgctgctattccagaacccagcctcctgggtttccccagtcctcatttttcctcccaatacccacccttctctctcgagggatctaggcaccttggtcccagtgtcttccttttgttctcactgccaaactgcctgtcctgggatctagttatcttggccctgcactctcaacatgagtagcgaacacttaaattgggttttcaacagtcccagctttcactgccagggtcccagtcagattccaggaatttgcgccctaactttgcttgctaatcctggtttagagctatcccactaaaatatttaatcctaattcttagtccttgcctgtgagatatgaggtcttacaggagacctcagagctcccagcccttctcctcctgctaacccttctcacaccctcaagaggagttagaaaagaggtccttgttattctcacctcttatggaaaatggaacaagaaataatcatatcctttcttcccacccttctcctgttatttaggatttctgacaaagctggcttgagattggtcacttagagccgactgtctcctctgccttttgtttttcagcttcagagacagatccaatatagtcccagggacctgggtctctgggagaggaaggaagagggagggagcaaagagattggggtatgtcccctgtagtacactctttcctcttacttcctagactttgatttctccggcagcccagatgttcagttctcttggcccctctctaccccttactgggatctggttttcattttccggtccttttgccatacacagttacagagatcagtcaaatccataccaccactgagatctcatttattgccacagatgcacaaaataaataacccaaaatcacaaaa

SEQ ID NO: 170917 - DNA, 1539 bp, Homo sapiens
  Payload ID: 13633
  Gene Symbol: PPP1R11
  Gene Name: protein phosphatase 1, regulatory (inhibitor) subunit 11
  ENST ID: ENST00000400656
  CDS Start-End: 288-512
cagggattagaagagttgttggaggagctaggcctagggatatgggaggtgtggggttgaatatctagggctgggagaatcggaaggtattggagctatttggagtggcagagatggtgcaggaggatgatttggggaggaagacggagaaaaagcaaggattatattttcctttgaagagttgctgggacctttcctaggagaaccggagccttaccatcaaacttcggaaacggaagccagagaaaaaggtagaatggacaagtgacactgtggacaatgaacacatgggccgccgctcatcaaaatgctgctgtatttatgagaaacctcgggcctttggcgagagctccacggaaagtgatgaggaggaagaagagggctgtggtcatacacactgtgtacgtggccaccgcaaaggacggcgtcgtgcaaccctaggaccgacccccaccacccctccccagcctcctgacccttcccagccccctccagggccaatgcagcactaaatccctctctcctccagcattcctgtgtctgtctggccctaaatgtatccatgtggctacttctccagccccctccttccctctcttctgcctgatagagggaagaggaagaggaggacgaacagagatcctgaaattctgacttgctgctattccagaacccagcctcctgggtttccccagtcctcatttttcctcccaatacccacccttctctctcgagggatctaggcaccttggtcccagtgtcttccttttgttctcactgccaaactgcctgtcctgggatctagttatcttggccctgcactctcaacatgagtagcgaacacttaaattgggttttcaacagtcccagctttcactgccagggtcccagtcagattccaggaatttgcgccctaactttgcttgctaatcctggtttagagctatcccactaaaatatttaatcctaattcttagtccttgcctgtgagatatgaggtcttacaggagacctcagagctcccagcccttctcctcctgctaacccttctcacaccctcaagaggagttagaaaagaggtccttgttattctcacctcttatggaaaatggaacaagaaataatcatatcctttcttcccacccttctcctgttatttaggatttctgacaaagctggcttgagattggtcacttagagccgactgtctcctctgccttttgtttttcagcttcagagacagatccaatatagtcccagggacctgggtctctgggagaggaaggaagagggagggagcaaagagattggggtatgtcccctgtagtacactctttcctcttacttcctagactttgatttctccggcagcccagatgttcagttctcttggcccctctctaccccttactgggatctggttttcattttccggtccttttgccatacacagttacagagatcagtcaaatccataccaccactgagatctcatttattgccacagatgcacaaaataaataacccaaaatcacaaaa

SEQ ID NO: 170918 - DNA, 1689 bp, Homo sapiens
  Payload ID: 13633
  Gene Symbol: PPP1R11
  Gene Name: protein phosphatase 1, regulatory (inhibitor) subunit 11
  ENST ID: ENST00000400657
  CDS Start-End: 438-662
ccggaagcggcgagccggaagtggggttagccaggttatccccaggggtggagaagcggaggcccaggaggagggggaataaagaaggtggaggatcctggctaccactctgaatccgataccgcttctcttagacctcagcgacagaaaaagggaagggtgtctcatcccccttcctcctctcctccctgtcctgagccttagccatggccgaggcaggggctgggctgagcgagaccgtcactgagacaacggttaccgtgacaaccgagcccgatgatttggggaggaagacggagaaaaagcaaggattatattttcctttgaagagttgctgggacctttcctaggagaaccggagccttaccatcaaacttcggaaacggaagccagagaaaaaggtagaatggacaagtgacactgtggacaatgaacacatgggccgccgctcatcaaaatgctgctgtatttatgagaaacctcgggcctttggcgagagctccacggaaagtgatgaggaggaagaagagggctgtggtcatacacactgtgtacgtggccaccgcaaaggacggcgtcgtgcaaccctaggaccgacccccaccacccctccccagcctcctgacccttcccagccccctccagggccaatgcagcactaaatccctctctcctccagcattcctgtgtctgtctggccctaaatgtatccatgtggctacttctccagccccctccttccctctcttctgcctgatagagggaagaggaagaggaggacgaacagagatcctgaaattctgacttgctgctattccagaacccagcctcctgggtttccccagtcctcatttttcctcccaatacccacccttctctctcgagggatctaggcaccttggtcccagtgtcttccttttgttctcactgccaaactgcctgtcctgggatctagttatcttggccctgcactctcaacatgagtagcgaacacttaaattgggttttcaacagtcccagctttcactgccagggtcccagtcagattccaggaatttgcgccctaactttgcttgctaatcctggtttagagctatcccactaaaatatttaatcctaattcttagtccttgcctgtgagatatgaggtcttacaggagacctcagagctcccagcccttctcctcctgctaacccttctcacaccctcaagaggagttagaaaagaggtccttgttattctcacctcttatggaaaatggaacaagaaataatcatatcctttcttcccacccttctcctgttatttaggatttctgacaaagctggcttgagattggtcacttagagccgactgtctcctctgccttttgtttttcagcttcagagacagatccaatatagtcccagggacctgggtctctgggagaggaaggaagagggagggagcaaagagattggggtatgtcccctgtagtacactctttcctcttacttcctagactttgatttctccggcagcccagatgttcagttctcttggcccctctctaccccttactgggatctggttttcattttccggtccttttgccatacacagttacagagatcagtcaaatccataccaccactgagatctcatttattgccacagatgcacaaaataaataacccaaaatcacaaaa

SEQ ID NO: 170919 - DNA, 1640 bp, Homo sapiens
  Payload ID: 13633
  Gene Symbol: PPP1R11
  Gene Name: protein phosphatase 1, regulatory (inhibitor) subunit 11
  ENST ID: ENST00000400658
  CDS Start-End: 389-613
ctacaggcacagggcgaggggtagaaccacatcgcttgactcttaagtgtgtttccaactgctcccacttcccgttttctttagagaaacccagaccaaacaaggaaagggaaataggccacggtagggtcattactattgctccttaagcttcctcgccggtccacctacccagacaaggcaaacggaaatctgcagcaggactcagcttggtgcacacaactccgccctcgccacacccactctgcagcgtctggcccggcaatacccatctgggcgcccctcctgcttcctctaggctgagaaccggagccttaccatcaaacttcggaaacggaagccagagaaaaaggtagaatggacaagtgacactgtggacaatgaacacatgggccgccgctcatcaaaatgctgctgtatttatgagaaacctcgggcctttggcgagagctccacggaaagtgatgaggaggaagaagagggctgtggtcatacacactgtgtacgtggccaccgcaaaggacggcgtcgtgcaaccctaggaccgacccccaccacccctccccagcctcctgacccttcccagccccctccagggccaatgcagcactaaatccctctctcctccagcattcctgtgtctgtctggccctaaatgtatccatgtggctacttctccagccccctccttccctctcttctgcctgatagagggaagaggaagaggaggacgaacagagatcctgaaattctgacttgctgctattccagaacccagcctcctgggtttccccagtcctcatttttcctcccaatacccacccttctctctcgagggatctaggcaccttggtcccagtgtcttccttttgttctcactgccaaactgcctgtcctgggatctagttatcttggccctgcactctcaacatgagtagcgaacacttaaattgggttttcaacagtcccagctttcactgccagggtcccagtcagattccaggaatttgcgccctaactttgcttgctaatcctggtttagagctatcccactaaaatatttaatcctaattcttagtccttgcctgtgagatatgaggtcttacaggagacctcagagctcccagcccttctcctcctgctaacccttctcacaccctcaagaggagttagaaaagaggtccttgttattctcacctcttatggaaaatggaacaagaaataatcatatcctttcttcccacccttctcctgttatttaggatttctgacaaagctggcttgagattggtcacttagagccgactgtctcctctgccttttgtttttcagcttcagagacagatccaatatagtcccagggacctgggtctctgggagaggaaggaagagggagggagcaaagagattggggtatgtcccctgtagtacactctttcctcttacttcctagactttgatttctccggcagcccagatgttcagttctcttggcccctctctaccccttactgggatctggttttcattttccggtccttttgccatacacagttacagagatcagtcaaatccataccaccactgagatctcatttattgccacagatgcacaaaataaataacccaaaatcacaaaa

SEQ ID NO: 170920 - DNA, 1723 bp, Homo sapiens
  Payload ID: 13633
  Gene Symbol: PPP1R11
  Gene Name: protein phosphatase 1, regulatory (inhibitor) subunit 11
  ENST ID: ENST00000455887
  CDS Start-End: 472-696
ggaaaaaggaagggagatcaaagattaggtgctggggactgaaaaataattttcatgtattaatactaccaaggatgatttggggaggaagacggagaaacagcaaggattatattttcctttgaagagttgctgggacctttcctaggttaggaattgtgtcttctcttatactggtggtataagaacaggaaataatacttattcctcaagggactatctgaggtaaaagacctgttctgttttatcttctgtcagctcctctggtgctatgcctatggtactgattgagctaaagaagaaaagagaggaggttccctgggagggagtgggaaaggttagtaagaggggactagataggtatgctcatccttaaccttctaggagaaccggagccttaccatcaaacttcggaaacggaagccagagaaaaaggtagaatggacaagtgacactgtggacaatgaacacatgggccgccgctcatccaaatgctgctgtatttatgagaaacctcgggcctttggcgagagctccacggaaagtgatgaggaggaagaagagggctgtggtcatacacactgtgtacgtggccaccgcaaaggacggcgtcgtgcaaccctaggaccgacccccaccacccctccccagcctcctgacccttcccagccccctccagggccaatgcagcactaaatccctctctcctccagcattcctgtgtctgtctggccctaaatgtatccatgtggctacttctccagccccctccttccctctcttctgcctgatagagggaagaggaagaggaggacgaacagagatcctgaaattctgacttgctgctattccagaacccagcctcctgggtttccccagtcctcatttttcctcccaatacccacccttctctctcgagggatctaggcaccttggtcccagtgtcttccttttgttctcactgctaaactgcctgtcctgggatctagttatcttggccctgcactctcaacatgagtagcgaacacttaaattgggttttcaacagtcccagctttcactgccagggtcccagtcagattccaggaatttgcgccctaactttgcttgctaatcctggtttagagctatcccactaaaatatttaatcctaattcttagtccttgcctgtgagatatgaggtcttacaggagacctcagagctcccagcccttctcctcctgctaaaccttctcacaccctcaagaggagttagaaaagaggtccttgtcattctcacctcttatggaaaatggaataagaaataatcatatcctttcttcccacccttctcctgttatttaggatttctgacaaagctggcttgagattggtcacttagagccgactgtctcctctgccttttgtttttcagcttcagagacagatccaatatagtcccagggacctgggtctctgggagaggaaggaagagggagggagcaaagagattggggtatgtcccctgtagtacactcttacctcttacttcctagactttgatttctccggcagcccagatgttcagttctcttggcccctctctaccccttactgggatctggttttcattttccggtccttttgccatacacagttacagagatcagtcaaatccataccaccactgagatctcatttattgccacagatgcacaaaataaataacccaaaatcacaaaa

SEQ ID NO: 170921 - DNA, 1536 bp, Homo sapiens
  Payload ID: 13633
  Gene Symbol: PPP1R11
  Gene Name: protein phosphatase 1, regulatory (inhibitor) subunit 11
  ENST ID: ENST00000444994
  CDS Start-End: 285-509
ggattagaagagttgttggaggagctaggcctagggatatgggaggtgtggggttgaatatctagggctgggagaatcggaaggtattggagctatttggagtggcagagatggtgcaggaggatgatttggggaggaagacggagaaacagcaaggattatattttcctttgaagagttgctgggacctttcctaggagaaccggagccttaccatcaaacttcggaaacggaagccagagaaaaaggtagaatggacaagtgacactgtggacaatgaacacatgggccgccgctcatccaaatgctgctgtatttatgagaaacctcgggcctttggcgagagctccacggaaagtgatgaggaggaagaagagggctgtggtcatacacactgtgtacgtggccaccgcaaaggacggcgtcgtgcaaccctaggaccgacccccaccacccctccccagcctcctgacccttcccagccccctccagggccaatgcagcactaaatccctctctcctccagcattcctgtgtctgtctggccctaaatgtatccatgtggctacttctccagccccctccttccctctcttctgcctgatagagggaagaggaagaggaggacgaacagagatcctgaaattctgacttgctgctattccagaacccagcctcctgggtttccccagtcctcatttttcctcccaatacccacccttctctctcgagggatctaggcaccttggtcccagtgtcttccttttgttctcactgccaaactgcctgtcctgggatctagttatcttggccctgcactctcaacatgagtagcgaacacttaaattgggttttcaacagtcccagctttcactgccagggtcccagtcagattccaggaatttgcgccctaactttgcttgctaatcctggtttagagctatcccactaaaatatttaatcctaattcttagtccttgcctgtgagatatgaggtcttacaggagacctcagagctcccagcccttctcctcctgctaacccttctcacaccctcaagaggagttagaaaagaggtccttgtcattctcacctcttatggaaaatggaataagaaataatcatatcctttcttcccacccttctcctgttatttaggatttctgacaaagctggcttgagattggtcacttagagccgactgtctcctctgccttttgtttttcagcttcagagacagatccaatatagtcccagggacctgggtctctgggagaggaaggaagagggagggagcaaagagattggggtatgtcccctgtagtacactcttacctcttacttcctagactttgatttctccggcagcccagatgttcagttctcttggcccctctctaccccttactgggatctggttttcattttccggtccttttgccatacacagttacagagatcagtcaaatccataccaccactgagatctcatttattgccacagatgcacaaaataaataacccaaaatcacaaaa

SEQ ID NO: 170922 - DNA, 1689 bp, Homo sapiens
  Payload ID: 13633
  Gene Symbol: PPP1R11
  Gene Name: protein phosphatase 1, regulatory (inhibitor) subunit 11
  ENST ID: ENST00000429382
  CDS Start-End: 438-662
ccggaagcggcgagccggaagtggggttagccaggttatccccaggggtggagaagcggaggcccaggaggagggggaataaagaaggtggaggatcctggctaccactctgaatccgataccgcttctcttagacctcagcgacagaaaaagggaagggtgtctcatcccccttcctcctctcctccctgtcctgagccttagccatggccgaggcaggggctgggctgagcgagaccgtcactgagacaacggttaccgtgacaaccgagcccgatgatttggggaggaagacggagaaacagcaaggattatattttcctttgaagagttgctgggacctttcctaggagaaccggagccttaccatcaaacttcggaaacggaagccagagaaaaaggtagaatggacaagtgacactgtggacaatgaacacatgggccgccgctcatccaaatgctgctgtatttatgagaaacctcgggcctttggcgagagctccacggaaagtgatgaggaggaagaagagggctgtggtcatacacactgtgtacgtggccaccgcaaaggacggcgtcgtgcaaccctaggaccgacccccaccacccctccccagcctcctgacccttcccagccccctccagggccaatgcagcactaaatccctctctcctccagcattcctgtgtctgtctggccctaaatgtatccatgtggctacttctccagccccctccttccctctcttctgcctgatagagggaagaggaagaggaggacgaacagagatcctgaaattctgacttgctgctattccagaacccagcctcctgggtttccccagtcctcatttttcctcccaatacccacccttctctctcgagggatctaggcaccttggtcccagtgtcttccttttgttctcactgccaaactgcctgtcctgggatctagttatcttggccctgcactctcaacatgagtagcgaacacttaaattgggttttcaacagtcccagctttcactgccagggtcccagtcagattccaggaatttgcgccctaactttgcttgctaatcctggtttagagctatcccactaaaatatttaatcctaattcttagtccttgcctgtgagatatgaggtcttacaggagacctcagagctcccagcccttctcctcctgctaacccttctcacaccctcaagaggagttagaaaagaggtccttgtcattctcacctcttatggaaaatggaataagaaataatcatatcctttcttcccacccttctcctgttatttaggatttctgacaaagctggcttgagattggtcacttagagccgactgtctcctctgccttttgtttttcagcttcagagacagatccaatatagtcccagggacctgggtctctgggagaggaaggaagagggagggagcaaagagattggggtatgtcccctgtagtacactcttacctcttacttcctagactttgatttctccggcagcccagatgttcagttctcttggcccctctctaccccttactgggatctggttttcattttccggtccttttgccatacacagttacagagatcagtcaaatccataccaccactgagatctcatttattgccacagatgcacaaaataaataacccaaaatcacaaaa

SEQ ID NO: 170923 - DNA, 1640 bp, Homo sapiens
  Payload ID: 13633
  Gene Symbol: PPP1R11
  Gene Name: protein phosphatase 1, regulatory (inhibitor) subunit 11
  ENST ID: ENST00000430828
  CDS Start-End: 389-613
ctacaggcacagggcgaggggtagaaccacatcgcttgactcttaagtgtgtttccaactgctcccacttcccgttttctttagagaaacccagaccaaacaaggaaagggaaataggccacggtagggtcattactattgctccttaagcttcctcgccggtccacctacccagacaaggcaaacggaaatctgcagcaggactcagcttggtgcacacaactccgccctcgccacacccactctgcagcgtctggcccggcaatacccatctgggcgcccctcctgcttcctctaggctgagaaccggagccttaccatcaaacttcggaaacggaagccagagaaaaaggtagaatggacaagtgacactgtggacaatgaacacatgggccgccgctcatccaaatgctgctgtatttatgagaaacctcgggcctttggcgagagctccacggaaagtgatgaggaggaagaagagggctgtggtcatacacactgtgtacgtggccaccgcaaaggacggcgtcgtgcaaccctaggaccgacccccaccacccctccccagcctcctgacccttcccagccccctccagggccaatgcagcactaaatccctctctcctccagcattcctgtgtctgtctggccctaaatgtatccatgtggctacttctccagccccctccttccctctcttctgcctgatagagggaagaggaagaggaggacgaacagagatcctgaaattctgacttgctgctattccagaacccagcctcctgggtttccccagtcctcatttttcctcccaatacccacccttctctctcgagggatctaggcaccttggtcccagtgtcttccttttgttctcactgccaaactgcctgtcctgggatctagttatcttggccctgcactctcaacatgagtagcgaacacttaaattgggttttcaacagtcccagctttcactgccagggtcccagtcagattccaggaatttgcgccctaactttgcttgctaatcctggtttagagctatcccactaaaatatttaatcctaattcttagtccttgcctgtgagatatgaggtcttacaggagacctcagagctcccagcccttctcctcctgctaacccttctcacaccctcaagaggagttagaaaagaggtccttgtcattctcacctcttatggaaaatggaataagaaataatcatatcctttcttcccacccttctcctgttatttaggatttctgacaaagctggcttgagattggtcacttagagccgactgtctcctctgccttttgtttttcagcttcagagacagatccaatatagtcccagggacctgggtctctgggagaggaaggaagagggagggagcaaagagattggggtatgtcccctgtagtacactcttacctcttacttcctagactttgatttctccggcagcccagatgttcagttctcttggcccctctctaccccttactgggatctggttttcattttccggtccttttgccatacacagttacagagatcagtcaaatccataccaccactgagatctcatttattgccacagatgcacaaaataaataacccaaaatcacaaaa

SEQ ID NO: 170924 - DNA, 1640 bp, Homo sapiens; identical to SEQ ID NO: 170923
  Payload ID: 13633
  Gene Symbol: PPP1R11
  Gene Name: protein phosphatase 1, regulatory (inhibitor) subunit 11
  ENST ID: ENST00000441553
  CDS Start-End: 389-613

SEQ ID NO: 170925 - DNA, 1723 bp, Homo sapiens
  Payload ID: 13633
  Gene Symbol: PPP1R11
  Gene Name: protein phosphatase 1, regulatory (inhibitor) subunit 11
  ENST ID: ENST00000452227
  CDS Start-End: 472-696
ggaaaaaggaagggagatcaaagattaggtgctggggactgaaaaataattttcatgtattaatactaccaaggatgatttggggaggaagacggagaaacagcaaggattatattttcctttgaagagttgctgggacctttcctaggttaggaattgtgtcttctcttatactggtggtataagaacaggaaataatacttattcctcaagggactatctgaggtaaaagacctgttctgttttatcttctgtcagctcctctggtgctatgcctatggtactgattgagctaaagaagaaaagagaggaggttccctgggagggagtgggaaaggttagtaagaggggactagataggtatgctcatccttaaccttctaggagaaccggagccttaccatcaaacttcggaaacggaagccagagaaaaaggtagaatggacaagtgacactgtggacaatgaacacatgggccgccgctcatccaaatgctgctgtatttatgagaaacctcgggcctttggcgagagctccacggaaagtgatgaggaggaagaagagggctgtggtcatacacactgtgtacgtggccaccgcaaaggacggcgtcgtgcaaccctaggaccgacccccaccacccctccccagcctcctgacccttcccagccccctccagggccaatgcagcactaaatccctctctcctccagcattcctgtgtctgtctggccctaaatgtatccatgtggctacttctccagccccctccttccctctcttctgcctgatagagggaagaggaagaggaggacgaacagagatcctgaaattctgacttgctgctattccagaacccagcctcctgggtttccccagtcctcatttttcctcccaatacccacccttctctctcgagggatctaggcaccttggtcccagtgtcttccttttgttctcactgccaaactgcctgtcctgggatctagttatcttggccctgcactctcaacatgagtagcgaacacttaaattgggttttcaacagtcccagctttcactgccagggtcccagtcagattccaggaatttgcgccctaactttgcttgctaatcctggtttagagctatcccactaaaatatttaatcctaattcttagtccttgcctgtgagatatgaggtcttacaggagacctcagagctcccagcccttctcctcctgctaacccttctcacaccctcaagaggagttagaaaagaggtccttgtcattctcacctcttatggaaaatggaataagaaataatcatatcctttcttcccacccttctcctgttatttaggatttctgacaaagctggcttgagattggtcacttagagccgactgtctcctctgccttttgtttttcagcttcagagacagatccaatatagtcccagggacctgggtctctgggagaggaaggaagagggagggagcaaagagattggggtatgtcccctgtagtacactcttacctcttacttcctagactttgatttctccggcagcccagatgttcagttctcttggcccctctctaccccttactgggatctggttttcattttccggtccttttgccatacacagttacagagatcagtcaaatccataccaccactgagatctcatttattgccacagatgcacaaaataaataacccaaaatcacaaaa

SEQ ID NO: 170926 - DNA, 1731 bp, Homo sapiens
  Payload ID: 13633
  Gene Symbol: PPP1R11
  Gene Name: protein phosphatase 1, regulatory (inhibitor) subunit 11
  Uniprot ID: O60927
  ENST ID: ENST00000437937
  CDS Start-End: 324-704
ctttctttcagcgcctgcgcgctgtcacgttacggcggaactaatccagcgacgcctgcgctttgacgcatttggtgccgtggaagggaaaaagggggactgcagtatgcgtcacacccggaagcggcgagccggaagtggggttagccaggttatccccaggggtggagaagcggaggcccaggaggagggggaataaagaaggtggaggatcctggctaccactctgaatccgataccgcttctcttagacctcagcgacagaaaaagggaagggtgtctcatcccccttcctcctctcctccctgtcctgagccttagccatggccgaggcaggggctgggctgagcgagaccgtcactgagacaacggttaccgtgacaaccgagcccgagaaccggagccttaccatcaaacttcggaaacggaagccagagaaaaaggtagaatggacaagtgacactgtggacaatgaacacatgggccgccgctcatccaaatgctgctgtatttatgagaaacctcgggcctttggcgagagctccacggaaagtgatgaggaggaagaagagggctgtggtcatacacactgtgtacgtggccaccgcaaaggacggcgtcgtgcaaccctaggaccgacccccaccacccctccccagcctcctgacccttcccagccccctccagggccaatgcagcactaaatccctctctcctccagcattcctgtgtctgtctggccctaaatgtatccatgtggctacttctccagccccctccttccctctcttctgcctgatagagggaagaggaagaggaggacgaacagagatcctgaaattctgacttgctgctattccagaacccagcctcctgggtttccccagtcctcatttttcctcccaatacccacccttctctctcgagggatctaggcaccttggtcccagtgtcttccttttgttctcactgccaaactgcctgtcctgggatctagttatcttggccctgcactctcaacatgagtagcgaacacttaaattgggttttcaacagtcccagctttcactgccagggtcccagtcagattccaggaatttgcgccctaactttgcttgctaatcctggtttagagctatcccactaaaatatttaatcctaattcttagtccttgcctgtgagatatgaggtcttacaggagacctcagagctcccagcccttctcctcctgctaacccttctcacaccctcaagaggagttagaaaagaggtccttgtcattctcacctcttatggaaaatggaataagaaataatcatatcctttcttcccacccttctcctgttatttaggatttctgacaaagctggcttgagattggtcacttagagccgactgtctcctctgccttttgtttttcagcttcagagacagatccaatatagtcccagggacctgggtctctgggagaggaaggaagagggagggagcaaagagattggggtatgtcccctgtagtacactcttacctcttacttcctagactttgatttctccggcagcccagatgttcagttctcttggcccctctctaccccttactgggatctggttttcattttccggtccttttgccatacacagttacagagatcagtcaaatccataccaccactgagatctcatttattgccacagatgcacaaaataaataacccaaaatcacaaaa

SEQ ID NO: 170927 - DNA, 1464 bp, Homo sapiens
  Payload ID: 13633
  Gene Symbol: PPP1R11
  Gene Name: protein phosphatase 1, regulatory (inhibitor) subunit 11
  ENST ID: ENST00000444101
  CDS Start-End: 213-437
gggatatgggaggtgtggggttgaatatctagggctgggagaatcggaaggatgatttggggaggaagacggagaaacagcaaggattatattttcctttgaagagttgctgggacctttcctaggagaaccggagccttaccatcaaacttcggaaacggaagccagagaaaaaggtagaatggacaagtgacactgtggacaatgaacacatgggccgccgctcatccaaatgctgctgtatttatgagaaacctcgggcctttggcgagagctccacggaaagtgatgaggaggaagaagagggctgtggtcatacacactgtgtacgtggccaccgcaaaggacggcgtcgtgcaaccctaggaccgacccccaccacccctccccagcctcctgacccttcccagccccctccagggccaatgcagcactaaatccctctctcctccagcattcctgtgtctgtctggccctaaatgtatccatgtggctacttctccagccccctccttccctctcttctgcctgatagagggaagaggaagaggaggacgaacagagatcctgaaattctgacttgctgctattccagaacccagcctcctgggtttccccagtcctcatttttcctcccaatacccacccttctctctcgagggatctaggcaccttggtcccagtgtcttccttttgttctcactgccaaactgcctgtcctgggatctagttatcttggccctgcactctcaacatgagtagcgaacacttaaattgggttttcaacagtcccagctttcactgccagggtcccagtcagattccaggaatttgcgccctaactttgcttgctaatcctggtttagagctatcccactaaaatatttaatcctaattcttagtccttgcctgtgagatatgaggtcttacaggagacctcagagctcccagcccttctcctcctgctaacccttctcacaccctcaagaggagttagaaaagaggtccttgtcattctcacctcttatggaaaatggaataagaaataatcatatcctttcttcccacccttctcctgttatttaggatttctgacaaagctggcttgagattggtcacttagagccgactgtctcctctgccttttgtttttcagcttcagagacagatccaatatagtcccagggacctgggtctctgggagaggaaggaagagggagggagcaaagagattggggtatgtcccctgtagtacactcttacctcttacttcctagactttgatttctccggcagcccagatgttcagttctcttggcccctctctaccccttactgggatctggttttcattttccggtccttttgccatacacagttacagagatcagtcaaatccataccaccactgagatctcatttattgccacagatgcacaaaataaataacccaaaatcacaaaa

SEQ ID NO: 170928 - DNA, 1640 bp, Homo sapiens; identical to SEQ ID NO: 170923
  Payload ID: 13633
  Gene Symbol: PPP1R11
  Gene Name: protein phosphatase 1, regulatory (inhibitor) subunit 11
  ENST ID: ENST00000455350
  CDS Start-End: 389-613

SEQ ID NO: 170929 - DNA, 1689 bp, Homo sapiens
  Payload ID: 13633
  Gene Symbol: PPP1R11
  Gene Name: protein phosphatase 1, regulatory (inhibitor) subunit 11
  ENST ID: ENST00000449087
  CDS Start-End: 438-662
ccggaagcggcgagccggaagtggggttagccaggttatccccaggggtggagaagcggaggcccaggaggagggggaataaagaaggtggaggatcctggctaccactctgaatccgataccgcttctcttagacctcagcgacagaaaaagggaagggtgtctcatcccccttcctcctctcctccctgtcctgagccttagccatggccgaggcaggggctgggctgagcgagaccgtcactgagacaacggttaccgtgacaaccgagcccgatgatttggggaggaagacggagaaacagcaaggattatattttcctttgaagagttgctgggacctttcctaggagaaccggagccttaccatcaaacttcggaaacggaagccagagaaaaaggtagaatggacaagtgacactgtggacaatgaacacatgggccgccgctcatccaaatgctgctgtatttatgagaaacctcgggcctttggcgagagctccacggaaagtgatgaggaggaagaagagggctgtggtcatacacactgtgtacgtggccaccgcaaaggacggcgtcgtgcaaccctaggaccgacccccaccacccctccccagcctcctgacccttcccagccccctccagggccaatgcagcactaaatccctctctcctccagcattcctgtgtctgtctggccctaaatgtatccatgtggctacttctccagccccctccttccctctcttctgcctgatagagggaagaggaagaggaggacgaacagagatcctgaaattctgacttgctgctattccagaacccagcctcctgggtttccccagtcctcatttttcctcccaatacccacccttctctctcgagggatctaggcaccttggtcccagtgtcttccttttgttctcactgctaaactgcctgtcctgggatctagttatcttggccctgcactctcaacatgagtagcgaacacttaaattgggttttcaacagtcccagctttcactgccagggtcccagtcagattccaggaatttgcgccctaactttgcttgctaatcctggtttagagctatcccactaaaatatttaatcctaattcttagtccttgcctgtgagatatgaggtcttacaggagacctcagagctcccagcccttctcctcctgctaaaccttctcacaccctcaagaggagttagaaaagaggtccttgtcattctcacctcttatggaaaatggaataagaaataatcatatcctttcttcccacccttctcctgttatttaggatttctgacaaagctggcttgagattggtcacttagagccgactgtctcctctgccttttgtttttcagcttcagagacagatccaatatagtcccagggacctgggtctctgggagaggaaggaagagggagggagcaaagagattggggtatgtcccctgtagtacactcttacctcttacttcctagactttgatttctccggcagcccagatgttcagttctcttggcccctctctaccccttactgggatctggttttcattttccggtccttttgccatacacagttacagagatcagtcaaatccataccaccactgagatctcatttattgccacagatgcacaaaataaataacccaaaatcacaaaa

SEQ ID NO: 170930 - DNA, 1723 bp, Homo sapiens; identical to SEQ ID NO: 170925
  Payload ID: 13633
  Gene Symbol: PPP1R11
  Gene Name: protein phosphatase 1, regulatory (inhibitor) subunit 11
  ENST ID: ENST00000450177
  CDS Start-End: 472-696

SEQ ID NO: 170931 - DNA, 1640 bp, Homo sapiens; identical to SEQ ID NO: 170923
  Payload ID: 13633
  Gene Symbol: PPP1R11
  Gene Name: protein phosphatase 1, regulatory (inhibitor) subunit 11
  ENST ID: ENST00000433942
  CDS Start-End: 389-613

SEQ ID NO: 170932 - DNA, 1723 bp, Homo sapiens; identical to SEQ ID NO: 170925
  Payload ID: 13633
  Gene Symbol: PPP1R11
  Gene Name: protein phosphatase 1, regulatory (inhibitor) subunit 11
  ENST ID: ENST00000430959
  CDS Start-End: 472-696

SEQ ID NO: 170933 - DNA, 1464 bp, Homo sapiens; identical to SEQ ID NO: 170927
  Payload ID: 13633
  Gene Symbol: PPP1R11
  Gene Name: protein phosphatase 1, regulatory (inhibitor) subunit 11
  ENST ID: ENST00000434591
  CDS Start-End: 213-437

SEQ ID NO: 170934 - DNA, 1536 bp, Homo sapiens; identical to SEQ ID NO: 170921
  Payload ID: 13633
  Gene Symbol: PPP1R11
  Gene Name: protein phosphatase 1, regulatory (inhibitor) subunit 11
  ENST ID: ENST00000436833
  CDS Start-End: 285-509

SEQ ID NO: 170935 - DNA, 1689 bp, Homo sapiens; identical to SEQ ID NO: 170922
  Payload ID: 13633
  Gene Symbol: PPP1R11
  Gene Name: protein phosphatase 1, regulatory (inhibitor) subunit 11
  ENST ID: ENST00000446310
  CDS Start-End: 438-662

SEQ ID NO: 170936 - DNA, 1464 bp, Homo sapiens; identical to SEQ ID NO: 170927
  Payload ID: 13633
  Gene Symbol: PPP1R11
  Gene Name: protein phosphatase 1, regulatory (inhibitor) subunit 11
  ENST ID: ENST00000412077
  CDS Start-End: 213-437

SEQ ID NO: 170937 - DNA, 1731 bp, Homo sapiens; identical to SEQ ID NO: 170926
  Payload ID: 13633
  Gene Symbol: PPP1R11
  Gene Name: protein phosphatase 1, regulatory (inhibitor) subunit 11
  Uniprot ID: O60927
  ENST ID: ENST00000448378
  CDS Start-End: 324-704

SEQ ID NO: 170938 - DNA, 1464 bp, Homo sapiens
  Payload ID: 13633
  Gene Symbol: PPP1R11
  Gene Name: protein phosphatase 1, regulatory (inhibitor) subunit 11
  ENST ID: ENST00000458506
  CDS Start-End: 213-437
gggatatgggaggtgtggggttgaatatctagggctgggagaatcggaaggatgatttggggaggaagacggagaaacagcaaggattatattttcctttgaagagttgctgggacctttcctaggagaaccggagccttaccatcaaacttcggaaacggaagccagagaaaaaggtagaatggacaagtgacactgtggacaatgaacacatgggccgccgctcatccaaatgctgctgtatttatgagaaacctcgggcctttggcgagagctccacggaaagtgatgaggaggaagaagagggctgtggtcatacacactgtgtacgtggccaccgcaaaggacggcgtcgtgcaaccctaggaccgacccccaccacccctccccagcctcctgacccttcccagccccctccagggccaatgcagcactaaatccctctctcctccagcattcctgtgtctgtctggccctaaatgtatccatgtggctacttctccagccccctccttccctctcttctgcctgatagagggaagaggaagaggaggacgaacagagatcctgaaattctgacttgctgctattccagaacccagcctcctgggtttccccagtcctcatttttcctcccaatacccacccttctctctcgagggatctaggcaccttggtcccagtgtcttccttttgttctcactgctaaactgcctgtcctgggatctagttatcttggccctgcactctcaacatgagtagcgaacacttaaattgggttttcaacagtcccagctttcactgccagggtcccagtcagattccaggaatttgcgccctaactttgcttgctaatcctggtttagagctatcccactaaaatatttaatcctaattcttagtccttgcctgtgagatatgaggtcttacaggagacctcagagctcccagcccttctcctcctgctaaaccttctcacaccctcaagaggagttagaaaagaggtccttgtcattctcacctcttatggaaaatggaataagaaataatcatatcctttcttcccacccttctcctgttatttaggatttctgacaaagctggcttgagattggtcacttagagccgactgtctcctctgccttttgtttttcagcttcagagacagatccaatatagtcccagggacctgggtctctgggagaggaaggaagagggagggagcaaagagattggggtatgtcccctgtagtacactcttacctcttacttcctagactttgatttctccggcagcccagatgttcagttctcttggcccctctctaccccttactgggatctggttttcattttccggtccttttgccatacacagttacagagatcagtcaaatccataccaccactgagatctcatttattgccacagatgcacaaaataaataacccaaaatcacaaaa

SEQ ID NO: 170939 - DNA, 1640 bp, Homo sapiens
  Payload ID: 13633
  Gene Symbol: PPP1R11
  Gene Name: protein phosphatase 1, regulatory (inhibitor) subunit 11
  ENST ID: ENST00000437171
  CDS Start-End: 389-613
ctacaggcacagggcgaggggtagaaccacatcgcttgactcttaagtgtgtttccaactgctcccacttcccgttttctttagagaaacccagaccaaacaaggaaagggaaataggccacggtagggtcattactattgctccttaagcttcctcgccggtccacctacccagacaaggcaaacggaaatctgcagcaggactcagcttggtgcacacaactccgccctcgccacacccactctgcagcgtctggcccggcaatacccatctgggcgcccctcctgcttcctctaggctgagaaccggagccttaccatcaaacttcggaaacggaagccagagaaaaaggtagaatggacaagtgacactgtggacaatgaacacatgggccgccgctcatccaaatgctgctgtatttatgagaaacctcgggcctttggcgagagctccacggaaagtgatgaggaggaagaagagggctgtggtcatacacactgtgtacgtggccaccgcaaaggacggcgtcgtgcaaccctaggaccgacccccaccacccctccccagcctcctgacccttcccagccccctccagggccaatgcagcactaaatccctctctcctccagcattcctgtgtctgtctggccctaaatgtatccatgtggctacttctccagccccctccttccctctcttctgcctgatagagggaagaggaagaggaggacgaacagagatcctgaaattctgacttgctgctattccagaacccagcctcctgggtttccccagtcctcatttttcctcccaatacccacccttctctctcgagggatctaggcaccttggtcccagtgtcttccttttgttctcactgctaaactgcctgtcctgggatctagttatcttggccctgcactctcaacatgagtagcgaacacttaaattgggttttcaacagtcccagctttcactgccagggtcccagtcagattccaggaatttgcgccctaactttgcttgctaatcctggtttagagctatcccactaaaatatttaatcctaattcttagtccttgcctgtgagatatgaggtcttacaggagacctcagagctcccagcccttctcctcctgctaaaccttctcacaccctcaagaggagttagaaaagaggtccttgtcattctcacctcttatggaaaatggaataagaaataatcatatcctttcttcccacccttctcctgttatttaggatttctgacaaagctggcttgagattggtcacttagagccgactgtctcctctgccttttgtttttcagcttcagagacagatccaatatagtcccagggacctgggtctctgggagaggaaggaagagggagggagcaaagagattggggtatgtcccctgtagtacactcttacctcttacttcctagactttgatttctccggcagcccagatgttcagttctcttggcccctctctaccccttactgggatctggttttcattttccggtccttttgccatacacagttacagagatcagtcaaatccataccaccactgagatctcatttattgccacagatgcacaaaataaataacccaaaatcacaaaa

SEQ ID NO: 170940 - DNA, 1536 bp, Homo sapiens; identical to SEQ ID NO: 170921
  Payload ID: 13633
  Gene Symbol: PPP1R11
  Gene Name: protein phosphatase 1, regulatory (inhibitor) subunit 11
  ENST ID: ENST00000414618
  CDS Start-End: 285-509

SEQ ID NO: 170941 - DNA, 1723 bp, Homo sapiens; identical to SEQ ID NO: 170925
  Payload ID: 13633
  Gene Symbol: PPP1R11
  Gene Name: protein phosphatase 1, regulatory (inhibitor) subunit 11
  ENST ID: ENST00000422273
  CDS Start-End: 472-696

SEQ ID NO: 170942 - DNA, 1464 bp, Homo sapiens; identical to SEQ ID NO: 170927
  Payload ID: 13633
  Gene Symbol: PPP1R11
  Gene Name: protein phosphatase 1, regulatory (inhibitor) subunit 11
  ENST ID: ENST00000428563
  CDS Start-End: 213-437

SEQ ID NO: 170943 - DNA, 1607 bp, Homo sapiens
  Payload ID: 13633
  Gene Symbol: PPP1R11
  Gene Name: protein phosphatase 1, regulatory (inhibitor) subunit 11
  Uniprot ID: O60927
  ENST ID: ENST00000431977
  CDS Start-End: 200-580
cggcgagccggaagtggggttagccaggttatccccaggggtggagaagcggaggcccaggaggagggggaataaagaaggtggaggatcctggctaccactctgaatccgataccgcttctcttagacctcagcgacagaaaaagggaagggtgtctcatcccccttcctcctctcctccctgtcctgagccttagccatggccgaggcaggggctgggctgagcgagaccgtcactgagacaacggttaccgtgacaaccgagcccgagaaccggagccttaccatcaaacttcggaaacggaagccagagaaaaaggtagaatggacaagtgacactgtggacaatgaacacatgggccgccgctcatccaaatgctgctgtatttatgagaaacctcgggcctttggcgagagctccacggaaagtgatgaggaggaagaagagggctgtggtcatacacactgtgtacgtggccaccgcaaaggacggcgtcgtgcaaccctaggaccgacccccaccacccctccccagcctcctgacccttcccagccccctccagggccaatgcagcactaaatccctctctcctccagcattcctgtgtctgtctggccctaaatgtatccatgtggctacttctccagccccctccttccctctcttctgcctgatagagggaagaggaagaggaggacgaacagagatcctgaaattctgacttgctgctattccagaacccagcctcctgggtttccccagtcctcatttttcctcccaatacccacccttctctctcgagggatctaggcaccttggtcccagtgtcttccttttgttctcactgctaaactgcctgtcctgggatctagttatcttggccctgcactctcaacatgagtagcgaacacttaaattgggttttcaacagtcccagctttcactgccagggtcccagtcagattccaggaatttgcgccctaactttgcttgctaatcctggtttagagctatcccactaaaatatttaatcctaattcttagtccttgcctgtgagatatgaggtcttacaggagacctcagagctcccagcccttctcctcctgctaaaccttctcacaccctcaagaggagttagaaaagaggtccttgtcattctcacctcttatggaaaatggaataagaaataatcatatcctttcttcccacccttctcctgttatttaggatttctgacaaagctggcttgagattggtcacttagagccgactgtctcctctgccttttgtttttcagcttcagagacagatccaatatagtcccagggacctgggtctctgggagaggaaggaagagggagggagcaaagagattggggtatgtcccctgtagtacactcttacctcttacttcctagactttgatttctccggcagcccagatgttcagttctcttggcccctctctaccccttactgggatctggttttcattttccggtccttttgccatacacagttacagagatcagtcaaatccataccaccactgagatctcatttattgccacagatgcacaaaataaataacccaaaatcacaaaa

SEQ ID NO: 170944 - DNA, 1689 bp, Homo sapiens
  Payload ID: 13633
  Gene Symbol: PPP1R11
  Gene Name: protein phosphatase 1, regulatory (inhibitor) subunit 11
  ENST ID: ENST00000414032
  CDS Start-End: 438-662
ccggaagcggcgagccggaagtggggttagccaggttatccccaggggtggagaagcggaggcccaggaggagggggaataaagaaggtggaggatcctggctaccaatctgaatccgataccgcttctcttagacctcagcgacagaaaaagggaagggtgtctcatcccccttcctcctctcctccctgtcctgagccttagccatggccgaggcaggggctgggctgagcgagaccgtcactgagacaacggttaccgtgacaaccgagcccgatgatttggggaggaagacggagaaacagcaaggattatattttcctttgaagagttgctgggacctttcctaggagaaccggagccttaccatcaaacttcggaaacggaagccagagaaaaaggtagaatggacaagtgacactgtggacaatgaacacatgggccgccgctcatccaaatgctgctgtatttatgagaaacctcgggcctttggcgagagctccacggaaagtgatgaggaggaagaagagggctgtggtcatacacactgtgtacgtggccaccgcaaaggacggcgtcgtgcaaccctaggaccgacccccaccacccctccccagcctcctgacccttcccagccccctccagggccaatgcagcactaaatccctctctcctccagcattcctgtgtctgtctggccctaaatgtatccatgtggctacttctccagccccctccttccctctcttctgcctgatagagggaagaggaagaggaggacgaacagagatcctgaaattctgacttgctgctattccagaacccagcctcctgggtttccccagtcctcatttttcctcccaatacccacccttctctctcgagggatctaggcaccttggtcccagtgtcttccttttgttctcactgccaaactgcctgtcctgggatctagttatcttggccctgcactctcaacatgagtagcgaacacttaaattgggttttcaacagtcccagctttcactgccagggtcccagtcagattccaggaatttgcgccctaactttgcttgctaatcctggtttagagctatcccactaaaatatttaatcctaattcttagtccttgcctgtgagatatgaggtcttacaggagacctcagagctcccagcccttctcctcctgctaacccttctcacaccctcaagaggagttagaaaagaggtccttgtcattctcacctcttatggaaaatggaataagaaataatcatatcctttcttcccacccttctcctgttatttaggatttctgacaaagctggcttgagattggtcacttagagccgactgtctcctctgccttttgtttttcagcttcagagacagatccaatatagtcccagggacctgggtctctgggagaggaaggaagagggagggagcaaagagattggggtatgtcccctgtagtacactcttacctcttacttcctagactttgatttctccggcagcccagatgttcagttctcttggcccctctctaccccttactgggatctggttttcattttccggtccttttgccatacacagttacagagatcagtcaaatccataccaccactgagatctcatttattgccacagatgcacaaaataaataacccaaaatcacaaaa

SEQ ID NO: 170945 - DNA, 1723 bp, Homo sapiens; identical to SEQ ID NO: 170925
  Payload ID: 13633
  Gene Symbol: PPP1R11
  Gene Name: protein phosphatase 1, regulatory (inhibitor) subunit 11
  ENST ID: ENST00000449435
  CDS Start-End: 472-696

SEQ ID NO: 170946 - DNA, 1536 bp, Homo sapiens
  Payload ID: 13633
  Gene Symbol: PPP1R11
  Gene Name: protein phosphatase 1, regulatory (inhibitor) subunit 11
  ENST ID: ENST00000433662
  CDS Start-End: 285-509
ggattagaagagttgttggagaagctaggcctagggatatgggaggtgtggggttgaatatctagggctgggagaatcggaaggtattggagctatttggagtggcagagatggtgcaggaggatgatttggggaggaagacggagaaacagcaaggattatattttcctttgaagagttgctgggacctttcctaggagaaccggagccttaccatcaaacttcggaaacggaagccagagaaaaaggtagaatggacaagtgacactgtggacaatgaacacatgggccgccgctcatccaaatgctgctgtatttatgagaaacctcgggcctttggcgagagctccacggaaagtgatgaggaggaagaagagggctgtggtcatacacactgtgtacgtggccaccgcaaaggacggcgtcgtgcaaccctaggaccgacccccaccacccctccccagcctcctgacccttcccagccccctccagggccaatgcagcactaaatccctctctcctccagcattcctgtgtctgtctggccctaaatgtatccatgtggctacttctccagccccctccttccctctcttctgcctgatagagggaagaggaagaggaggacgaacagagatcctgaaattctgacttgctgctattccagaacccagcctcctgggtttccccagtcctcatttttcctcccaatacccacccttctctctcgagggatctaggcaccttggtcccagtgtcttccttttgttctcactgctaaactgcctgtcctgggatctagttatcttggccctgcactctcaacatgagtagcgaacacttaaattgggttttcaacagtcccagctttcactgccagggtcccagtcagattccaggaatttgcgccctaactttgcttgctaatcctggtttagagctatcccactaaaatatttaatcctaattcttagtccttgcctgtgagatatgaggtcttacaggagacctcagagctcccagcccttctcctcctgctaaaccttctcacaccctcaagaggagttagaaaagaggtccttgtcattctcacctcttatggaaaatggaataagaaataatcatatcctttcttcccacccttctcctgttatttaggatttctgacaaagctggcttgagattggtcacttagagccgactgtctcctctgccttttgtttttcagcttcagagacagatccaatatagtcccagggacctgggtctctgggagaggaaggaagagggagggagcaaagagattggggtatgtcccctgtagtacactcttacctcttacttcctagactttgatttctccggcagcccagatgttcagttctcttggcccctctctaccccttactgggatctggttttcattttccggtccttttgccatacacagttacagagatcagtcaaatccataccaccactgagatctcatttattgccacagatgcacaaaataaataacccaaaatcacaaaa

SEQ ID NO: 170947 - DNA, 1614 bp, Homo sapiens
  Payload ID: 13633
  Gene Symbol: PPP1R11
  Gene Name: protein phosphatase 1, regulatory (inhibitor) subunit 11
  Uniprot ID: O60927
  ENST ID: ENST00000431424
  CDS Start-End: 207-587
ccggaagcggcgagccggaagtggggttagccaggttatccccaggggtggagaagcggaggcccaggaggagggggaataaagaaggtggaggatcctggctaccaatctgaatccgataccgcttctcttagacctcagcgacagaaaaagggaagggtgtctcatcccccttcctcctctcctccctgtcctgagccttagccatggccgaggcaggggctgggctgagcgagaccgtcactgagacaacggttaccgtgacaaccgagcccgagaaccggagccttaccatcaaacttcggaaacggaagccagagaaaaaggtagaatggacaagtgacactgtggacaatgaacacatgggccgccgctcatccaaatgctgctgtatttatgagaaacctcgggcctttggcgagagctccacggaaagtgatgaggaggaagaagagggctgtggtcatacacactgtgtacgtggccaccgcaaaggacggcgtcgtgcaaccctaggaccgacccccaccacccctccccagcctcctgacccttcccagccccctccagggccaatgcagcactaaatccctctctcctccagcattcctgtgtctgtctggccctaaatgtatccatgtggctacttctccagccccctccttccctctcttctgcctgatagagggaagaggaagaggaggacgaacagagatcctgaaattctgacttgctgctattccagaacccagcctcctgggtttccccagtcctcatttttcctcccaatacccacccttctctctcgagggatctaggcaccttggtcccagtgtcttccttttgttctcactgccaaactgcctgtcctgggatctagttatcttggccctgcactctcaacatgagtagcgaacacttaaattgggttttcaacagtcccagctttcactgccagggtcccagtcagattccaggaatttgcgccctaactttgcttgctaatcctggtttagagctatcccactaaaatatttaatcctaattcttagtccttgcctgtgagatatgaggtcttacaggagacctcagagctcccagcccttctcctcctgctaacccttctcacaccctcaagaggagttagaaaagaggtccttgtcattctcacctcttatggaaaatggaataagaaataatcatatcctttcttcccacccttctcctgttatttaggatttctgacaaagctggcttgagattggtcacttagagccgactgtctcctctgccttttgtttttcagcttcagagacagatccaatatagtcccagggacctgggtctctgggagaggaaggaagagggagggagcaaagagattggggtatgtcccctgtagtacactcttacctcttacttcctagactttgatttctccggcagcccagatgttcagttctcttggcccctctctaccccttactgggatctggttttcattttccggtccttttgccatacacagttacagagatcagtcaaatccataccaccactgagatctcatttattgccacagatgcacaaaataaataacccaaaatcacaaaa

SEQ ID NO: 170948 - DNA, 1640 bp, Homo sapiens; identical to SEQ ID NO: 170923
  Payload ID: 13633
  Gene Symbol: PPP1R11
  Gene Name: protein phosphatase 1, regulatory (inhibitor) subunit 11
  ENST ID: ENST00000448550
  CDS Start-End: 389-613

SEQ ID NO: 170949 - DNA, 1536 bp, Homo sapiens; identical to SEQ ID NO: 170921
  Payload ID: 13633
  Gene Symbol: PPP1R11
  Gene Name: protein phosphatase 1, regulatory (inhibitor) subunit 11
  ENST ID: ENST00000418211
  CDS Start-End: 285-509

SEQ ID NO: 170950 - DNA, 1731 bp, Homo sapiens; identical to SEQ ID NO: 170926
  Payload ID: 13633
  Gene Symbol: PPP1R11
  Gene Name: protein phosphatase 1, regulatory (inhibitor) subunit 11
  Uniprot ID: O60927
  ENST ID: ENST00000452679
  CDS Start-End: 324-704

SEQ ID NO: 170951 - DNA, 1689 bp, Homo sapiens; identical to SEQ ID NO: 170922
  Payload ID: 13633
  Gene Symbol: PPP1R11
  Gene Name: protein phosphatase 1, regulatory (inhibitor) subunit 11
  ENST ID: ENST00000417223
  CDS Start-End: 438-662

SEQ ID NO: 170952 - DNA, 1689 bp, Homo sapiens; identical to SEQ ID NO: 170922
  Payload ID: 13633
  Gene Symbol: PPP1R11
  Gene Name: protein phosphatase 1, regulatory (inhibitor) subunit 11
  ENST ID: ENST00000448210
  CDS Start-End: 438-662

SEQ ID NO: 170953 - DNA, 1731 bp, Homo sapiens; identical to SEQ ID NO: 170926
  Payload ID: 13633
  Gene Symbol: PPP1R11
  Gene Name: protein phosphatase 1, regulatory (inhibitor) subunit 11
  Uniprot ID: O60927
  ENST ID: ENST00000436591
  CDS Start-End: 324-704

SEQ ID NO: 170954 - DNA, 1464 bp, Homo sapiens; identical to SEQ ID NO: 170927
  Payload ID: 13633
  Gene Symbol: PPP1R11
  Gene Name: protein phosphatase 1, regulatory (inhibitor) subunit 11
  ENST ID: ENST00000451993
  CDS Start-End: 213-437

SEQ ID NO: 170955 - DNA, 1536 bp, Homo sapiens; identical to SEQ ID NO: 170921
  Payload ID: 13633
  Gene Symbol: PPP1R11
  Gene Name: protein phosphatase 1, regulatory (inhibitor) subunit 11
  ENST ID: ENST00000439463
  CDS Start-End: 285-509

SEQ ID NO: 170956 - DNA, 777 bp, Homo sapiens
  Payload ID: 13634
  Gene Symbol: PPP1R14A
  Gene Name: protein phosphatase 1, regulatory (inhibitor) subunit 14A
  Uniprot ID: Q96A00
  ENST ID: ENST00000301242
  CDS Start-End: 253-696
gcagggacccgcccgggactctgggtccccgcccatacctcaacttcgcacgactgcgtgcctcaagccgacgcagcggcctactctcgcactgcagacggggaaactgaggcctgaggcggccggggtggggcagacctcccggcgagcccgagcccccgcccccggctagccccgccctggcccgtaagaagcacccggggcgcgaggcgaaggcgcacagcgcggggccaggctgggtccagcagcgcgatggcagctcagcggctgggcaagcgcgtgctgagcaagctgcagtctccatcgcgggcccgcgggccagggggcagtcccggggggctgcagaagcggcacgcgcgcgtcaccgtcaagtatgaccggcgggagctgcagcggcggctggacgtggagaagtggatcgacgggcgcctggaggagctgtaccgcggcatggaggcagacatgcccgatgagatcaacattgatgaattgttggagttagagagtgaagaggagagaagccggaaaatccagggactcctgaagtcatgtgggaaacctgtcgaggacttcatccaggagctgctggcaaagcttcaaggcctccacaggcagcccggcctccgccagccaagcccctcccacgacggcagcctcagccccctccaggaccgggcccggactgctcacccctgaccctcttgcactctccctgccccccggacgccgcccagcttgcttgtgtataagttgtatttaatggttctgtaacaataa

SEQ ID NO: 170957 - DNA, 637 bp, Homo sapiens
  Payload ID: 13634
  Gene Symbol: PPP1R14A
  Gene Name: protein phosphatase 1, regulatory (inhibitor) subunit 14A
  Uniprot ID: Q96A00
  ENST ID: ENST00000347262
  CDS Start-End: 194-556
gcctcaagccgacgcagcggcctactctcgcactgcagacggggaaactgaggcctgaggcggccggggtggggcagacctcccggcgagcccgagcccccgcccccggctagccccgccctggcccgtaagaagcacccggggcgcgaggcgaaggcgcacagcgcggggccaggctgggtccagcagcgcgatggcagctcagcggctgggcaagcgcgtgctgagcaagctgcagtctccatcgcgggcccgcgggccagggggcagtcccggggggctgcagaagcggcacgcgcgcgtcaccgtcaagtatgaccggcgggagctgcagcggcggctggacgtggagaagtggatcgacgggcgcctggaggagctgtaccgcggcatgggactcctgaagtcatgtgggaaacctgtcgaggacttcatccaggagctgctggcaaagcttcaaggcctccacaggcagcccggcctccgccagccaagcccctcccacgacggcagcctcagccccctccaggaccgggcccggactgctcacccctgaccctcttgcactctccctgccccccggacgccgcccagcttgcttgtgtataagttgtatttaatggttctgtaacaataa

SEQ ID NO: 170958 - DNA, 949 bp, Homo sapiens
  Payload ID: 13634
  Gene Symbol: PPP1R14A
  Gene Name: protein phosphatase 1, regulatory (inhibitor) subunit 14A
  ENST ID: ENST00000591585
  CDS Start-End: 194-559
gcctcaagccgacgcagcggcctactctcgcactgcagacggggaaactgaggcctgaggcggccggggtggggcagacctcccggcgagcccgagcccccgcccccggctagccccgccctggcccgtaagaagcacccggggcgcgaggcgaaggcgcacagcgcggggccaggctgggtccagcagcgcgatggcagctcagcggctgggcaagcgcgtgctgagcaagctgcagtctccatcgcgggcccgcgggccagggggcagtcccggggggctgcagaagcggcacgcgcgcgtcaccgtcaagtatgaccggcgggagctgcagcggcggctggacgtggagaagtggatcgacgggcgcctggaggagctgtaccgcggcatggaggcagacatgcccgatgagatcaacattgatgaattgttggagttagagagtgaagaggagagaagccggaaaatccagggactcctgaagtcatgtgggaaacctgtcgaggtgagttttctctccctcattctctccctgttctggccccaagtactctgatgggggagggggaagaagctggcagaagggtctctggggaacaccacccggccccaccacccccggccccaacctgccctccgcagctctttctggtctccaggggtgtcttttgtcctcctacttgtctctctccctctctcccccatctgctgagggggctccattctgtcctcccccatctgccctgtttttgcctctcctgtgcctgtcctttggccaccagccttcgggctcagtctccctctgtcctcccctgtcactgcctccgccaccccgggctcccttccccacctctgggggccctccatcctcccaggccctgaagctgagcggcccaacccctcccacttccttccctgctttaaaagggaaaactattcatgtttc

SEQ ID NO: 170959 - DNA, 607 bp, Homo sapiens
  Payload ID: 13634
  Gene Symbol: PPP1R14A
  Gene Name: protein phosphatase 1, regulatory (inhibitor) subunit 14A
  ENST ID: ENST00000587515
  CDS Start-End: 293-526
ctagagccaaggcgagagacccgtgccagccccgaggctcccggggcccatgggcccaggcatcgggctggtacagggccccggggctctctcagcccatctgtcacccctcccccccaacacccagatgtcccgtcttggcagtgctgtcccggactgccacattaatgctccagaacccgccagctgggccctggggccggtggggctcctgcagagccctggacaaaggcgagggagggagggaaggggatcctaagcacccctccctccctggccctaggaggcagacatgcccgatgagatcaacattgatgaattgttggagttagagagtgaagaggagagaagccggaaaatccagggactcctgaagtcatgtgggaaacctgtcgaggacttcatccaggagctgctggcaaagcttcaaggcctccacaggcagcccggcctccgccagccaagcccctcccacgacggcagcctcagccccctccaggaccgggcccggactgctcacccctgaccctcttgcactctccctgccccccggacgccgcccagcttgcttgtgtataagttgtatttaatggttctgtaacaataa

SEQ ID NO: 170960 - DNA, 433 bp, Homo sapiens
  Payload ID: 13634
  Gene Symbol: PPP1R14A
  Gene Name: protein phosphatase 1, regulatory (inhibitor) subunit 14A
  ENST ID: ENST00000591291
  CDS Start-End: 34-405
acagcgcggggccaggctgggtccagcagcgcgatggcagctcagcggctgggcaagcgcgtgctgagcaagctgcagtctccatcgcgggcccgcgggccagggggcagtcccggggggctgcagaagcggcacgcgcgcgtcaccgtcaagtatgaccggcgggagctgcagcggcggctggacgtggagaagtggatcgacgggcgcctggaggagctgtaccgcggcatggaggcagacatgcccgatgagatcaacattgatgaattgttggagttagagagtgaagaggagagaagccggaaaatccagccccctccaggaccgggcccggactgctcacccctgaccctcttgcactctccctgccccccggacgccgcccagcttgcttgtgtataagttgtatttaatggttctgtaacaataa

SEQ ID NO: 170961 - DNA, 982 bp, Homo sapiens
  Payload ID: 13635
  Gene Symbol: PPP1R14B
  Gene Name: protein phosphatase 1, regulatory (inhibitor) subunit 14B
  Uniprot ID: Q96C90
  ENST ID: ENST00000309318
  CDS Start-End: 269-712
gacagagaaagcgcttcggcggctgcagctcgggcggcggccgcgggggacaaagggcgggcggatcggcggggagggggcggggcgcggccaggccaagcccgggggctccgcatgctgcagctgcccccgggcgcccccgccgccgccctcgccgcggagccgcgcggagcggagccggcgagctaacccgagccagccggcgggcgtcccggaggcggtggcgcagggaggggcccgacgctcgcacgtggccccggcggccgccatggcggacagcggcaccgcggggggcgcggcgttggcggccccggcccccgggccgggcagtggcggcccaggaccacgcgtctactttcagagcccccccggggccgcaggagagggcccgggcggggcggacgatgagggcccagtgaggcgccaagggaaggtcaccgtcaagtatgaccgcaaggagctacggaagcgcctcaacctagaggagtggatcctggagcagctcacgcgcctctacgactgccaggaagaggagatcccagaactggagattgacgtggatgagctcctggacatggagagtgacgatgcccgggctgccagggtcaaggagctgctggttgactgttacaaacccacagaggccttcatttctggcctgctggacaagatccggggcatgcagaagctgagcacaccccagaagaagtgacggtccccgacccaggagaacggtggctcccacaggacaatcgctgccccccaacctcgtagcaacagcaataccgggggaccctgcggccaggcctggtgccatgagcagggctcctcgtgcccctggcccaggggtctcttcccctgccccctcagttttccacttttggggttttttattgttattaaactgatgggactttttgtgtttttatattgactctgcggcgcgggccctttaataaagctaggatacgcctttggtgca

SEQ ID NO: 170962 - DNA, 920 bp, Homo sapiens
  Payload ID: 13635
  Gene Symbol: PPP1R14B
  Gene Name: protein phosphatase 1, regulatory (inhibitor) subunit 14B
  ENST ID: ENST00000542235
  CDS Start-End: 497-715
gggcttcctggggagggtgtggcagggtggtgggcatcccctccctcaccaaagcatgggctctttgtttcctctttgccaggcctgggtccttcccagtgacccctcagccttcacttcctcctcactcccggggagctgtgacaggtgtttgggggaggggaggggggtatgataagctgggacagctgcacccaccggtgctctggtgagatggggggcccggatgttggggagacacatctgctgggttcccagcccaaggtccccaaccctggctgtctggccttgtctgtcaccccccgtgcccactggcagggacaggaagctcccccccccaccccgctttgggcagtttgccttggcacgggcctgatctgttttcctccccagagcagctgctgttctgtctgctgggcagagggctgggttcctccgaggtaggcaggggcctcaacccagagcccctctcacaccctctctccaactcaggcttatgtctctccctcctcccccacccccaccccaggaagaggagatcccagaactggagattgacgtggatgagctcctggacatggagagtgacgatgcccgggctgccagggtcaaggagctgctggttgactgttacaaacccacagaggccttcatttctggcctgctggacaagatccggggcatgcagaagctgagcacaccccagaagaagtgacggtccccgacccaggagaacggtggctcccacaggacaatcgctgccccccaacctcgtagcaacagcaataccgggggaccctgcggccaggcctggtgccatgagcagggctcctcgtgcccctggcccaggggtctcttcccctgccccctcagttttccacttttggggttttttattgttattaaactgatgggacttt

SEQ ID NO: 170963 - DNA, 600 bp, Homo sapiens
  Payload ID: 13635
  Gene Symbol: PPP1R14B
  Gene Name: protein phosphatase 1, regulatory (inhibitor) subunit 14B
  ENST ID: ENST00000392210
  CDS Start-End: 189-326
ccccaggtcaagcctagtgtcctccagacgcctcaaggggtagcctgagccttgggcaagaggcaagggggctatcctgggctggcagcggcaggaggtctcaccgcctggtgcccgctgggttagactgtggttacaaggaagaggagatcccagaactggagattgacgtggatgagctcctggacatggagagtgacgatgcccgggctgccagggtcaaggagctgctggttgactgttacaaacccacagaggccttcatttctggcctgctggacaagatccggggcatgcagaagctgagcacaccccagaagaagtgacggtccccgacccaggagaacggtggctcccacaggacaatcgctgccccccaacctcgtagcaacagcaataccgggggaccctgcggccaggcctggtgccatgagcagggctcctcgtgcccctggcccaggggtctcttcccctgccccctcagttttccacttttggggttttttattgttattaaactgatgggactttttgtgtttttatattgactctgcggcgcgggccctttaataaagctaggatacgcctttggtgcagcta

SEQ ID NO: 170964 - DNA, 2152 bp, Homo sapiens
  Payload ID: 13636
  Gene Symbol: PPP1R14C
  Gene Name: protein phosphatase 1, regulatory (inhibitor) subunit 14C
  Uniprot ID: Q8TAE6
  ENST ID: ENST00000361131
  CDS Start-End: 118-615
agagcaggtgccggggagcccttcgcatgcggctgccgggccggaggtggtagcggcgccgggcgcgctccgcccgcccctcctccgggccgcactgaggctcgggcgcgcggggacatgtcggtggcgacgggcagcagcgagacggccggcggggccagcggcggcggcgcacgggttttcttccaaagcccccggggtggcgccggtggcagccccggctccagcagcggctcaggctcctcccgggaggactcggcgcccgtggccacggcggccgctgcagggcaggttcagcagcaacagcagcggcgacaccagcagggaaaagtgacagtgaaatacgatcgtaaggagcttcggaagcggctggtgctggaggaatggatcgtggagcagctgggtcagctctacggctgcgaggaagaagaaatgccagaggtagaaattgacattgatgatcttcttgatgcagacagtgatgaagagagagcttcaaaattacaggaagctcttgtagactgctacaaaccaacagaggaatttatcaaagagctgctttctcggataagaggcatgaggaaactgagccctccgcagaagaagagtgtatgattctggaacagggtgaaactctcccagagacgaagaaagagtcctgggatttgtacttcatgaagacttttgtgaaagaataggtgtccttatgaacaacgtttttgtttttttttttttcttttttggtgtgaaggtgggggggtctattagacatttattcaagagcgttctttttttggttttaaaggtttttgttaatgtaatattttaatagcaaagatatcatgactctagccacagcctaaccaaggattatcaaaggaggtggacactcaaggaagggccacgccaggctgcgtttcctgcaaggactcagatgttcagtaccttatgatacagggaagatagttttcttacaagtagtttggtaatattttttttcttaagttgtacatttgactcagctgtcaaatttctcacacttgtatatatctacacacaactaagttaaaatgttgatgtgagttttatttcacatggatggaataaacttgtggttgtcctttaactggaggtcccagcacatgtgttttcaagaggccactaggcattcttcactgagtgctgctgacttcaacgttcactttatgcaccaaagtgaaagaattcagtgtatccgttattttaatgcactacaccacagaaatgttaagttggtcaagggcttaatttatggaatttctattatttcattggttgggatgctttgccaggtcatgtgcttattgtctcattttgtagtcttttaaagttgtatgaacccttaatttgaagaactaacttgatttctagagaaatatccacactatctcagtggtattttgcattggaaaaaggaagcactgtgtagcagtgaattgtctgctttccaccgagtactgtgtttattctctctccaggaaagcagatcaaaagaaagttagcagatcgagtgtcttcttccttagaaataggttctggtagcttctgtgcctgggtagtatcagaccagtgggagtaaaccgagtgttaagtgtcaaggtgagaaagcctcacattctctcaagacagttgctctaggagctgagttgctggtttggaagtgtggagattgcatttctggcttctctcaatggcttgtgttgaggactctgggtgctcctggccctaattgtgcaccctgatccccgtgcttggagctaggcctggtggcgtgctctagccctctcagttaccagctctttggagaaggatcaaaattcagatggaatgtgggatgggtaataggtgagagtagaaacccttccctccaggaggcccccgctgactcccacagaaacccacctaccataagatgtcttcaggtggccttgtccaaggatgggggtcaggcattttatatcaagggtgctctgaacatattttattttttaaaaaaactatgtttgtgaattttgcgtatactggcaagcttttgaaaatgtatttaattttgtattgtttaccaatgatttatttacaagatatttactcaaataaatggagctgcttacaa

SEQ ID NO: 170965 - DNA, 757 bp, Homo sapiens
  Payload ID: 13637
  Gene Symbol: PPP1R14D
  Gene Name: protein phosphatase 1, regulatory (inhibitor) subunit 14D
  Uniprot ID: Q9NXH3
  ENST ID: ENST00000299174
  CDS Start-End: 69-506
cacttccctctgtggctctgctcagaactggcggtttttcccagctccttgcccagaccaatacttccatgctgtcttcaagccctgcttcctgcacatctcccagcccagatggggagaacccatgtaagaaggtccactgggcttctgggaggagaaggacatcatccacagactcagagtccaagtcccacccggactcctccaagatacccaggtcccggagacccagccgcctgacagtgaagtatgaccggggccagctccagcgctggctggagatggagcaatgggtggatgctcaagttcaggagctcttccaggatcaagcaaccccttctgagcctgagattgacctggaagctctcatggatctatccacagaggagcagaagactcagctggaggccattcttgggaactgcccccgccccacagaggcttttatctctgagctgctcagtcaactcaagaaactccggagactcagccggcctcagaaataagcctgagagaccatctttagcagcctcagcactgccaggcctgccctgaaactccagatcctggctaagagggaaatagctccttgggacacaaacaagaaatgtggacaaggagggacatttgcatactcctactgtctgtgtggtcacagctagtttctgtcagctgggctctctgggagaaagctggctgttgtccaatgccttccttggcagccaagtggataaaacctttaggagccccagctcaa

SEQ ID NO: 170966 - DNA, 747 bp, Homo sapiens
  Payload ID: 13637
  Gene Symbol: PPP1R14D
  Gene Name: protein phosphatase 1, regulatory (inhibitor) subunit 14D
  ENST ID: ENST00000427255
  CDS Start-End: 69-671
cacttccctctgtggctctgctcagaactggcggtttttcccagctccttgcccagaccaatacttccatgctgtcttcaagccctgcttcctgcacatctcccagcccagatggggagaacccatgtaagaaggtccactgggcttctgggaggagaaggacatcatccacagactcagagtccaagtcccacccggactcctccaagatacccaggtcccggagacccagccgcctgacagtgaagtatgaccggggccagctccagcgctggctggagatggagcaatgggtggatgctcaagttcaggagctcttccagagtcttgctctgtcacccaggctggagtgcagtggtgtgatccattctctgcaacttctgcctcccgggttcaatcgattctcctgcctcagctcctggagtagctgggattacgggatcaagcaaccccttctgagcctgagattgacctggaagctctcatggatctatccacagaggagcagaagactcagctggaggccattcttgggaactgcccccgccccacagaggcttttatctctgagctgctcagtcaactcaagaaactccggagactcagccggcctcagaaataagcctgagagaccatctttagcagcctcagcactgccaggcctgccctgaaactccagatcctggctaagagggaaatagctccttgggacacaaacaagaaatgtggacaaggagggacatttgc

SEQ ID NO: 170967 - DNA, 1826 bp, Homo sapiens
  Payload ID: 13638
  Gene Symbol: PPP1R1A
  Gene Name: protein phosphatase 1, regulatory (inhibitor) subunit 1A
  Uniprot ID: Q13522
  ENST ID: ENST00000257905
  CDS Start-End: 172-687
agagtccccggagccgcgagctgggagcgctgtgccgggagccgggagccgagcgcgccgggctggggccggggccggagcggagcggagagggagcgcgcccgccccagccccgagtcccgccgccttccctcccgccgcagcgcgggcccaccggccgccgccccagccatggagcaagacaacagcccccgaaagatccagttcacggtcccgctgctggagccgcaccttgaccccgaggcggcggagcagattcggaggcgccgccccacccctgccaccctcgtgctgaccagtgaccagtcatccccagagatagatgaagaccggatccccaacccacatctcaagtccactttggcaatgtctccacggcaacggaagaagatgacaaggatcacacccacaatgaaagagctccagatgatggttgaacatcacctggggcaacagcagcaaggagaggaacctgagggggccgctgagagcacaggaacccaggagtcccgcccacctgggatcccagacacagaagtggagtcaaggctgggcacctctgggacagcaaaaaaaactgcagaatgcatccctaaaactcacgagagaggcagtaaggaacccagcacaaaagaaccctcaacccatataccaccactggattccaagggagccaactcggtctgagagaggaggaggtatcttgggatcaagactgcagtttgggaatgcatggacaccggatttgtttcttattccttcacttttggggaaaatctcttgtttttaaaaagtgataaatttggtgttaggtccttggcactttccttcttttccaactgggagaatcctttctccctgccttcttgccctgccctctctgtagcccccaccctcctgccaagctgcctctgggaaggaagaaacaggagctaggcagaagccttgagcagggaagagttcttcccttagccctgactttacttgctgtgggaagagagatgagggtcagataggtgggaggactaacttccagggtgccaagaaggaagaaaagccccaggttctcttttcttattgaggaacgatccgaccacctcacaggcctgccctgcagctggaagactcggcgctctaaggcctgtgccgtgtccagctgtgactgtgcggtgggctccatctgctggacaaaaggggaactgcaccatggcacttggcccatgggaaagagggtatggtggtgtgccgatacctcctcgcctgccctccaagccccagctgccttccttttggattcccaagcttcaggatgtgttccctcttccagctgtgggaccgctgtcccttatttcaacccgttagcaacaatggatagagaacacagtggctattaatgaagaggcccatgctggagactggaagggttcccttgtcctagacattgaggggcccagataagaccaaaaccaagcataagagaagaaactgtctcagatctcacggccaggcctctctcctgctgctgtttttgattttcccaggtagtgggagagaggaaaggagggaaggcaagattctttccccctccctgctgaagcatgtggtacagaggcaagagcagagcctgagaagcgtcaggtcccacttctgccatgcagctactatgagccctcggggcctcctcctgggcctcagcttgcccagatacatacctaaatatatatatatatatatatgagggagaacgcctcacccagattttatcatgctggaaagagtgtatgtatgtgaagatgcttggtcaacttgtacccagtgaacacaca

SEQ ID NO: 170968 - DNA, 571 bp, Homo sapiens
  Payload ID: 13638
  Gene Symbol: PPP1R1A
  Gene Name: protein phosphatase 1, regulatory (inhibitor) subunit 1A
  ENST ID: ENST00000547826
  CDS Start-End: 28-222
gcgggcccaccggccgccgccccagccatggagcaagacaacagcccccgaaagatccagttcacggtcccgctgctggagccgcaccttgaccccgaggcggcggagcagattcggaggcgccgccccacccctgccaccctcgtgctgaccagtgaccagtcatccccagagatagatgaagaccggatccccaacccacatctcaagagctccagatgatggttgaacatcacctggggcaacagcagcaaggagaggaacctgagggggccgctgagagcacaggaacccaggagtcccgcccacctgggatcccagacacagaagtggagtcaaggctgggcacctctgggacagcaaaaaaaactgcagaatgcatccctaaaactcacgagagaggcagtaaggaacccagcacaaaagaaccctcaacccatataccaccactggattccaagggagccaactcgtttgggaatgcatggacaccggatttgtttcttattccttcacttttggggaaaatctcttgtttttaaaaagtgataaatttggtgttaggtccttg

SEQ ID NO: 170969 - DNA, 547 bp, Homo sapiens
  Payload ID: 13638
  Gene Symbol: PPP1R1A
  Gene Name: protein phosphatase 1, regulatory (inhibitor) subunit 1A
  ENST ID: ENST00000553113
  CDS Start-End: 1-272
ggaggcgccgccccacccctgccaccctcgtgctgaccagtgaccagtcatccccagagatagatgaagaccggatccccaacccacatctcaagtccactttggcaatgtctccacggcaacggaagaagatgacaaggatcacacccacaatgaaagaaactgcagaatgcatccctaaaactcacgagagaggcagtaaggaacccagcacaaaagaaccctcaacccatataccaccactggattccaagggagccaactcggtctgagagaggaggaggtatcttgggatcaagactgcagtttgggaatgcatggacaccggatttgtttcttattccttcacttttggggaaaatctcttgtttttaaaaagtgataaatttggtgttaggtccttggcactttccttcttttccaactgggagaatcctttctccctgccttcttgccctgccctctctgtagcccccaccctcctgccaagctgcctctgggaaggaagaaacaggagctaggcagaagccttgagcagggaagagtt

SEQ ID NO: 170970 - DNA, 2491 bp, Homo sapiens
  Payload ID: 13638
  Gene Symbol: PPP1R1A
  Gene Name: protein phosphatase 1, regulatory (inhibitor) subunit 1A
  ENST ID: ENST00000547431
  CDS Start-End: 29-490
cgcgggcccaccggccgccgccccagccatggagcaagacaacagcccccgaaagatccagttcacggtcccgctgctggagccgcaccttgaccccgaggcggcggagcagattcggaggcgccgccccacccctgccaccctcgtgctgaccagtgaccagtcatccccagagatagatgaagaccggatccccaacccacatctcaagaaactgcagaatgcatccctaaaactcacgagagaggcagtaaggaacccagcacaaaagaaccctcaacccatataccaccactggattccaagggagccaactcggtctgagagaggaggagggactgggggacagaagagcgtgggaggatttccctgctccacccacactttggctccattctatgtcttcactcgctccattttactgctcaaaaggggagagagaatgtcgcatccactggagcccagagacgacccaacaaagatgccatgatagacaccagctctcctacaccctccaccacaacaggctcacctgggccagccccagggctaatccagattcccattctggttgtgttcatcttcggcaggggatgggggggcctcttcttcacagggggacagctcgtcaatggacatctggttggtgatgcctgtagaggagcataaaggaggctgagcttaggccaagaagtattcttccccagaacccaaggagtatgtggagacatgtaagggattctcatccatcaacctgccttcaagctgaactacattcaacccatccccacttgggaagagcctctccagccttgctaaaactcagaaccctcaacaccaccctaccaccccctcacacaggaagagatttcccagccagggccaccaaattagccaaatctacaggggcaccatttacagggaccacagtgtgcacagggacccttgggttgtggaatatctgactgtctctatcatctctacggcccccattcttagaacattccaggccactcagccagtctttcctgtgatctaactggtctgatcagctccactcccaaatcaaggagtccggcaaagggtttccccaggggcttaagaaaaatggacctcctagtgctccatgatccacccacacaagttctcacccctgccctctgccatggtacccaccacttgctgcccgttccttccatttctgcttattctcctgaatgcgcttgacccaggtggaacgaaagctgaccacatcagggttggggtctcccacttccacatccagagagggctggcgccactgaaagctagaagcagaacccccaaaagccgcaagaggtaagccccagcccactccagaaccaccttagccctgggagtgcaggacatggaagaccaggagaaggttcagggaacttcatcttcctcttttcctctactagatattccccaagtccctgtccctctccccctcatttcacccctccctctccacatcttccctcctggtagaaggaaaattaaaacaagattagccagaaggcagaaagacagctaatggaagaaacaaaaatatggtgaaggggagcataggtacaggtcacacccttctgatcccatccttctgtccctgacggcagagggactcccaagcttgaagcagtctgcctccccaccaccccaccatggctgtgagtcggtcctctctgtgagtccaaatccctccctaccactgccttcctgaaccaagatatctggctaccccagccaccctcacctgggctggtttttagacttggagtcctcatccgccaggggctgaacactcttctctgccacgtcagtcagcacagagaatgtgggctccacaatgaagtcgatgaaccctgcagtggaggagcaatgccgtagagatgtcttactattatctggagggctaggcagagcatgcagctggcatggccaggacccctggctgcttatgaaagaggatggagaggtaacctggggctgaaaacttcccaatgcagggcaggctttgggatgatgtcttggtgccccagagagctccttcctgccattgcagccccctggcctcctaacccaggaccccatgctctagcacagtaggctttcctctacaggaagaatggtttggggggattgaggacttggagcaatcctgacccaggcagcatcttttccccctcccagtcctccccttcctgcaggagaggacactcacctatctgagactgtgccactagagtggaagtgcggtcacagagtggagaaaagggcaggcccaactctgcctccttgtcaccctagaggagggaacagggtaggaaagctggagaggatacctcagacctaccagatctggggtacaggtggcaagtggtgggggtggggggttgttgtgtgaaatttctgcactgttgacctggaaattagtaatatgcaaatgaaatatatgcaaatgaaatgc

SEQ ID NO: 170971 - DNA, 1845 bp, Homo sapiens
  Payload ID: 13639
  Gene Symbol: PPP1R1B
  Gene Name: protein phosphatase 1, regulatory (inhibitor) subunit 1B
  Uniprot ID: Q9UD71
  ENST ID: ENST00000254079
  CDS Start-End: 470-1084
aaagctgggaccggagggtgagcccggcagaggcagagacacacgcggagaggaggagaggctgagggagggaggtggagaaggacgggagaggcagagagaggagacacgcagagacactcaggaggggagagacaccgagacgcagagacactcaggaggggagagacaccgagacgcagagacacccaggccggggagcgcgagggagcgaggcacagacctggctcagcgagcgcggggggcgagccccgagtcccgagagcctgggggcgcgcccagcccgggcgccgaccctcctcccgctcccgcgccctcccctcggcgggcacggtatttttatccgtgcgcgaacagccctcctcctcctctcgccgcacagcccgccgcctgcgcgggggagcccagcacagaccgccgccgggaccccgagtcgcgcaccccagccccaccgcccaccccgcgcgccatggaccccaaggaccgcaagaagatccagttctcggtgcccgcgccccctagccagctcgacccccgccaggtggagatgatccggcgcaggagaccaacgcctgccatgctgttccggctctcagagcactcctcaccagaggaggaagcctccccccaccagagagcctcaggagaggggcaccatctcaagtcgaagagacccaacccctgtgcctacacaccaccttcgctgaaagctgtgcagcgcattgctgagtctcacctgcagtctatcagcaatttgaatgagaaccaggcctcagaggaggaggatgagctgggggagcttcgggagctgggttatccaagagaggaagatgaggaggaagaggaggatgatgaagaagaggaagaagaagaggacagccaggctgaagtcctgaaggtcatcaggcagtctgctgggcaaaagacaacctgtggccagggtctggaagggccctgggagcgcccaccccctctggatgagtccgagagagatggaggctctgaggaccaagtggaagacccagcactaagtgagcctggggaggaacctcagcgcccttccccctctgagcctggcacataggcacccagcctgcatctcccaggaggaagtggaggggacatcgctgttccccagaaacccactctatcctcaccctgttttgtgctcttcccctcgcctgctagggctgcggcttctgacttctagaagactaaggctggtctgtgtttgcttgtttgcccacctttggctgatacccagagaacctgggcacttgctgcctgatgcccacccctgccagtcattcctccattcacccagcgggaggtgggatgtgagacagcccacattggaaaatccagaaaaccgggaacagggatttgcccttcacaattctactccccagatcctctcccctggacacaggagacccacagggcaggaccctaagatctggggaaaggaggtcctgagaaccttgaggtacccttagatccttttctacccactttcctatggaggattccaagtcaccacttctctcaccggcttctaccagggtccaggactaaggcgtttttctccatagcctcaacattttgggaatcttcccttaatcacccttgctcctcctgggtgcctggaagatggactggcagagacctctttgttgcgttttgtgctttgatgccaggaatgccgcctagtttatgtccccggtggggcacacagcggggggcgccaggttttccttgtcccccagctgctctgcccctttccccttcttccctgactccaggcctgaacccctcccgtgctgtaataaatctttgtaaataact

SEQ ID NO: 170972 - DNA, 1419 bp, Homo sapiens
  Payload ID: 13639
  Gene Symbol: PPP1R1B
  Gene Name: protein phosphatase 1, regulatory (inhibitor) subunit 1B
  Uniprot ID: Q9UD71
  ENST ID: ENST00000394265
  CDS Start-End: 153-659
ttttcatttctcacaaggactgggtgaagagttctgcagccttacagagactggaaaagaagcccaaaccaaggcccccagagaggtcccccaggcccctttgggtccctgagcctcagctggagatccggcgcaggagaccaacgcctgccatgctgttccggctctcagagcactcctcaccagaggaggaagcctccccccaccagagagcctcaggagaggggcaccatctcaagtcgaagagacccaacccctgtgcctacacaccaccttcgctgaaagctgtgcagcgcattgctgagtctcacctgcagtctatcagcaatttgaatgagaaccaggcctcagaggaggaggatgagctgggggagcttcgggagctgggttatccaagagaggaagatgaggaggaagaggaggatgatgaagaagaggaagaagaagaggacagccaggctgaagtcctgaaggtcatcaggcagtctgctgggcaaaagacaacctgtggccagggtctggaagggccctgggagcgcccaccccctctggatgagtccgagagagatggaggctctgaggaccaagtggaagacccagcactaagtgagcctggggaggaacctcagcgcccttccccctctgagcctggcacataggcacccagcctgcatctcccaggaggaagtggaggggacatcgctgttccccagaaacccactctatcctcaccctgttttgtgctcttcccctcgcctgctagggctgcggcttctgacttctagaagactaaggctggtctgtgtttgcttgtttgcccacctttggctgatacccagagaacctgggcacttgctgcctgatgcccacccctgccagtcattcctccattcacccagcgggaggtgggatgtgagacagcccacattggaaaatccagaaaaccgggaacagggatttgcccttcacaattctactccccagatcctctcccctggacacaggagacccacagggcaggaccctaagatctggggaaaggaggtcctgagaaccttgaggtacccttagatccttttctacccactttcctatggaggattccaagtcaccacttctctcaccggcttctaccagggtccaggactaaggcgtttttctccatagcctcaacattttgggaatcttcccttaatcacccttgctcctcctgggtgcctggaagatggactggcagagacctctttgttgcgttttgtgctttgatgccaggaatgccgcctagtttatgtccccggtggggcacacagcggggggcgccaggttttccttgtcccccagctgctctgcccctttccccttcttccctgactccaggcctgaacccctcccgtgctgtaataaatctttgtaaataac

SEQ ID NO: 170973 - DNA, 1504 bp, Homo sapiens
  Payload ID: 13639
  Gene Symbol: PPP1R1B
  Gene Name: protein phosphatase 1, regulatory (inhibitor) subunit 1B
  Uniprot ID: Q9UD71
  ENST ID: ENST00000394267
  CDS Start-End: 237-743
ttttcatttctcacaaggactgggtgaagagttctgcagccttacagagactggaaaagaagcccaaaccaaggcccccagagaggtcccccaggcccctttgggtccctgagcctcagctggaggtggggggtgcctgcagtgcgctggctcagtctccttctgaaaagctggatccagcttgtttgaagcccttgagctgatcttagatccggcgcaggagaccaacgcctgccatgctgttccggctctcagagcactcctcaccagaggaggaagcctccccccaccagagagcctcaggagaggggcaccatctcaagtcgaagagacccaacccctgtgcctacacaccaccttcgctgaaagctgtgcagcgcattgctgagtctcacctgcagtctatcagcaatttgaatgagaaccaggcctcagaggaggaggatgagctgggggagcttcgggagctgggttatccaagagaggaagatgaggaggaagaggaggatgatgaagaagaggaagaagaagaggacagccaggctgaagtcctgaaggtcatcaggcagtctgctgggcaaaagacaacctgtggccagggtctggaagggccctgggagcgcccaccccctctggatgagtccgagagagatggaggctctgaggaccaagtggaagacccagcactaagtgagcctggggaggaacctcagcgcccttccccctctgagcctggcacataggcacccagcctgcatctcccaggaggaagtggaggggacatcgctgttccccagaaacccactctatcctcaccctgttttgtgctcttcccctcgcctgctagggctgcggcttctgacttctagaagactaaggctggtctgtgtttgcttgtttgcccacctttggctgatacccagagaacctgggcacttgctgcctgatgcccacccctgccagtcattcctccattcacccagcgggaggtgggatgtgagacagcccacattggaaaatccagaaaaccgggaacagggatttgcccttcacaattctactccccagatcctctcccctggacacaggagacccacagggcaggaccctaagatctggggaaaggaggtcctgagaaccttgaggtacccttagatccttttctacccactttcctatggaggattccaagtcaccacttctctcaccggcttctaccagggtccaggactaaggcgtttttctccatagcctcaacattttgggaatcttcccttaatcacccttgctcctcctgggtgcctggaagatggactggcagagacctctttgttgcgttttgtgctttgatgccaggaatgccgcctagtttatgtccccggtggggcacacagcggggggcgccaggttttccttgtcccccagctgctctgcccctttccccttcttccctgactccaggcctgaacccctcccgtgctgtaataaatctttgtaaataact

SEQ ID NO: 170974 - DNA, 1038 bp, Homo sapiens
  Payload ID: 13639
  Gene Symbol: PPP1R1B
  Gene Name: protein phosphatase 1, regulatory (inhibitor) subunit 1B
  Uniprot ID: Q9UD71
  ENST ID: ENST00000580825
  CDS Start-End: 289-903
ttcaagttctggggagaccgcagggggccccccagctggctccccaggccttggctctaactcccaccctcctcccagccccaggagaacacgattctccatgctcattggccagtttcccctaaaccctccctccgagcacccgggcgccagtcccaggcggaggggacgggctggggaccccaaagctgggaccggaggcccgccgcctgcgcgggggagcccagcacagaccgccgccgggaccccgagtcgcgcaccccagccccaccgcccaccccgcgcgccatggaccccaaggaccgcaagaagatccagttctcggtgcccgcgccccctagccagctcgacccccgccaggtggagatgatccggcgcaggagaccaacgcctgccatgctgttccggctctcagagcactcctcaccagaggaggaagcctccccccaccagagagcctcaggagaggggcaccatctcaagtcgaagagacccaacccctgtgcctacacaccaccttcgctgaaagctgtgcagcgcattgctgagtctcacctgcagtctatcagcaatttgaatgagaaccaggcctcagaggaggaggatgagctgggggagcttcgggagctgggttatccaagagaggaagatgaggaggaagaggaggatgatgaagaagaggaagaagaagaggacagccaggctgaagtcctgaaggtcatcaggcagtctgctgggcaaaagacaacctgtggccagggtctggaagggccctgggagcgcccaccccctctggatgagtccgagagagatggaggctctgaggaccaagtggaagacccagcactaagtgagcctggggaggaacctcagcgcccttccccctctgagcctggcacataggcacccagcctgcatctcccaggaggaagtggaggggacatcgctgttccccagaaacccactctatcctcaccctgttttgtgctcttcccctcgcctgctagggctgcggcttctgacttctagaagactaag

SEQ ID NO: 170975 - DNA, 875 bp, Homo sapiens
  Payload ID: 13639
  Gene Symbol: PPP1R1B
  Gene Name: protein phosphatase 1, regulatory (inhibitor) subunit 1B
  ENST ID: ENST00000582680
  CDS Start-End: 442-875
agaggcagagacacacgcggagaggaggagaggctgagggagggaggtggagaaggacgggagaggcagagagaggagacacgcagagacactcaggaggggagagacaccgagacgcagagacactcaggaggggagagacaccgagacgcagagacacccaggccggggagcgcgagggagcgaggcacagacctggctcagcgagcgcggggggcgagccccgagtcccgagagcctgggggcgcgcccagcccgggcgccgaccctcctcccgctcccgcgccctcccctcggcgggcacggtatttttatccgtgcgcgaacagccctcctcctcctctcgccgcacagcccgccgcctgcgcgggggagcccagcacagaccgccgccgggaccccgagtcgcgcaccccagccccaccgcccaccccgcgcgccatggaccccaaggaccgcaagaagatccagttctcggtgcccgcgccccctagccagctcgacccccgccagatccggcgcaggagaccaacgcctgccatgctgttccggctctcagagcactcctcaccagaggaggaagcctccccccaccagagagcctcaggagaggggcaccatctcaagtcgaagagacccaacccctgtgcctacacaccaccttcgctgaaagctgtgcagcgcattgctgagtctcacctgcagtctatcagcaatttgaatgagaaccaggcctcagaggaggaggatgagctgggggagcttcgggagctgggttatccaagagaggaagatgaggaggaagaggaggatgatgaagaagaggaagaagaagaggacagccaggctgaagtcctgaaggtcatcaggcagtc

SEQ ID NO: 170976 - DNA, 1466 bp, Homo sapiens
  Payload ID: 13639
  Gene Symbol: PPP1R1B
  Gene Name: protein phosphatase 1, regulatory (inhibitor) subunit 1B
  ENST ID: ENST00000579000
  CDS Start-End: 194-709
gcccagcccgggcgccgaccctcctcccgctcccgcgccctcccctcggcgggcacggtatttttatccgtgcgcgaacagccctcctcctcctctcgccgcacagcccgccgcctgcgcgggggagcccagcacagaccgccgccgggaccccgagtcgcgcaccccagccccaccgcccaccccgcgcgccatggaccccaaggaccgcaagaagatccagttctcggtgcccgcgccccctagccagctcgacccccgccaggtggagatgatccggcgcaggagaccaacgcctgccatgctgttccggctctcagagcactcctcaccagctgtgcagcgcattgctgagtctcacctgcagtctatcagcaatttgaatgagaaccaggcctcagaggaggaggatgagctgggggagcttcgggagctgggttatccaagagaggaagatgaggaggaagaggaggatgatgaagaagaggaagaagaagaggacagccaggctgaagtcctgaaggtcatcaggcagtctgctgggcaaaagacaacctgtggccagggtctggaagggccctgggagcgcccaccccctctggatgagtccgagagagatggaggctctgaggaccaagtggaagacccagcactaagtgagcctggggaggaacctcagcgcccttccccctctgagcctggcacataggcacccagcctgcatctcccaggaggaagtggaggggacatcgctgttccccagaaacccactctatcctcaccctgttttgtgctcttcccctcgcctgctagggctgcggcttctgacttctagaagactaaggctggtctgtgtttgcttgtttgcccacctttggctgatacccagagaacctgggcacttgctgcctgatgcccacccctgccagtcattcctccattcacccagcgggaggtgggatgtgagacagcccacattggaaaatccagaaaaccgggaacagggatttgcccttcacaattctactccccagatcctctcccctggacacaggagacccacagggcaggaccctaagatctggggaaaggaggtcctgagaaccttgaggtacccttagatccttttctacccactttcctatggaggattccaagtcaccacttctctcaccggcttctaccagggtccaggactaaggcgtttttctccatagcctcaacattttgggaatcttcccttaatcacccttgctcctcctgggtgcctggaagatggactggcagagacctctttgttgcgttttgtgctttgatgccaggaatgccgcctagtttatgtccccggtggggcacacagcggggggcgccaggttttccttgtcccccagctgctctgcccctttccccttcttccctgactccaggcctgaacccctcccgtgctgtaataaatctttgtaaat

SEQ ID NO: 170977 - DNA, 1636 bp, Homo sapiens
  Payload ID: 13640
  Gene Symbol: PPP1R1C
  Gene Name: protein phosphatase 1, regulatory (inhibitor) subunit 1C
  Uniprot ID: Q8WVI7
  ENST ID: ENST00000280295
  CDS Start-End: 235-585
agaggatccaagggattggtgggggaacaggcaagccaggcatcaccgtggatgttgaagaagggggttactcaaacctcggcatcttcacttgctcgatctggaattacagctatttattacgaagcactctgtgtggcttagtggagtgtgtctgaggaaacacatcccggacaccacttagggttagtctttctgagctcttcacatctctgactaattatcatcattaccatggagcccaacagtcccaaaaagatacagtttgccgtgcctgtattccagagtcagattgcacctgaagcagcagagcagctgggcttttgtcgttcacagatcaggaaaagaagacctacaccagcatcacttgtgattctcaatgagcataaccccccagaaatagatgacaagagggggcccaacacacaaggggaattacagaatgcatcccctaagcaaaggaagcagagtgtgtacacaccacccaccataaaaggggttaagcatctgaaaggccagaatgaatcagcattccctgaagaagaagaaggcaccaatgaaagagaggagcagcgggaccattaattactggtgcaaaatgagttgataacaaccagaagttgacttgttagtgctgtgcttctactcgagcttggaaaaatcccaacacaaaacaaacaccacctccgattccatcatgatgccacgttgctttctactggattacctcctgaagcactttagatattttatacataagtattgacatgtttttcagaagctgtttcttcacttattgcttttttctaataatttttattacaccatttgccaagtccttccctttggttttagtttattcctctctacaactaaaaaagggatcttgagtttaggtacattttaagtgattcatttttagtttttctaattctggaatctgagccttctcttacaacagggagtctttcaaaaacatttttttgtttctttttcaaattccactgtgtttatttattgccttgtttctttttcaaattccattggtcttgatttaatttagttccacagattttactgatagtctactacctgccaactactgaattatgcagcagacttataaaaataaaaaggctattttattgttattgccatcctgctagtaaagatttattcaattatttataattaattaagtggcttcacctatatttctgttaataatcacattaattatgtatgacaggtaggatttatgttatagataagaaaactagagtccaaagaaaataagtgtccccaaatgaaccaataatccaacaaacgcttccactaactagcttctgacctgtttgagttgtgatagattttagaataaaaaagcctatcctccttaggagccatagacttttattctttcttatactgtcttatatattgacttagagctaaacttcctccaattcagacataaagcataggcagatacttttgctaatgaggctaagctgggaagaaaaccctgagttctactttaattcttgggcattgacttcaaactaagatgacttataagaaataaaagaagtaaatttgaaactttaataaaaaaagtacatggttcatttaaaaa

SEQ ID NO: 170978 - DNA, 3004 bp, Homo sapiens
  Payload ID: 13640
  Gene Symbol: PPP1R1C
  Gene Name: protein phosphatase 1, regulatory (inhibitor) subunit 1C
  Uniprot ID: Q8WVI7
  ENST ID: ENST00000409137
  CDS Start-End: 244-573
attgtgctgagaggatccaagggattggtgggggaacaggcaagccaggcatcaccgtggatgttgaagaagggggttactcaaacctcggcatcttcacttgctcgatctggaattacagctatttattacgaagcactctgtgtggcttagtggagtgtgtctgaggaaacacatcccggacaccacttagggttagtctttctgagctcttcacatctctgactaattatcatcattaccatggagcccaacagtcccaaaaagatacagtttgccgtgcctgtattccagagtcagattgcacctgaagcagcagagcagatcaggaaaagaagacctacaccagcatcacttgtgattctcaatgagcataaccccccagaaatagatgacaagagggggcccaacacacaaggggaattacagaatgcatcccctaagcaaaggaagcagagtgtgtacacaccacccaccataaaaggggttaagcatctgaaaggccagaatgaatcagcattccctgaagaagaagaaggcaccaatgaaagagaggagcagcgggaccattaattactggtgcaaaatgagttgataacaaccagaagttgacttgttagtgctgtgcttctactcgagcttggaaaaatcccaacacaaaacaaacaccacctccgattccatcatgatgccacgttgctttctactggattacctcctgaagcactttagatattttatacataagtattgacatgtttttcagaagctgtttcttcacttattgcttttttctaataatttttattacaccatttgccaagtccttccctttggttttagtttattcctctctacaactaaaaaagggatcttgagtttaggtacattttaagtgattcatttttagtttttctaattctggaatctgagccttctcttacaacagggagtctttcaaaaacatttttttgtttctttttcaaattccactgtgtttatttattgccttgtttctttttcaaattccattggtcttgatttaatttagttccacagattttactgatagtctactacctgccaactactgaattatgcagcagacttataaaaataaaaaggctattttattgttattgccatcctgctagtaaagatttattcaattatttataattaattaagtggcttcacctatatttctgttaataatcacattaattatgtatgacaggtaggatttatgttatagataagaaaactagagtccaaagaaaataagtgtccccaaatgaaccaataatccaacaaacgcttccactaactagcttctgacctgtttgagttgtgatagattttagaataaaaaagcctatcctccttaggagccatagacttttattctttcttatactgtcttatatattgacttagagctaaacttcctccaattcagacataaagcataggcagatacttttgctaatgaggctaagctgggaagaaaaccctgagttctactttaattcttgggcattgacttcaaactaagatgacttataagaaataaaagaagtaaatttgaaactttaataaaaaaagtacatggttcatttaaaaatgtttcctatgtctaaatctatattttaaaaataacctttatcatgtaaaatgagagaattgctgagtttatgacaatcttaggtataaccttttcttaaagaacaaggcatcaatctttaatttgtttccctttcttgatttctcataagttgcaaaataaaaataaaaataatttcacaaattgttcattattattatcctccctacttgccccaggatttaagtactaacttttacttcctactcttagactttgtattgccaaagaaataaaatatgaaaaagcataatcacccagacctacctgcggaattgtggattatgctgtagatattagatcattgaaaggaacaatatactacttaatgaggagccaaagacaacattctacctgctgctcccttcaagctgaggaatgagtttaattgacttcaaagtcccattattctcaaaagtagcaaaggtacaacatggctttgcatgaatcaaaggaagggaacaacaagaacttaaaaaaatagtttgcagatggttgaacatctctttaataattagagaagaatatcttttctttctttattgtttacagataccaacatttttcaaagccttgcagtagatgagtgagtctcctgttacatttctcctgcagcatatattctgtggatgtgttttcctaagcagactaattatatgttgctctcttcttttaccctaatgaaacatagatttttctgttttgaatttgtcacttgtttgttacatttgtcaagtgttttaaatattacattggtcctttatttgcttttgagaacacccaatagtttaaaaattaaaatgacatgaaggtcaattctaagacaggaatgatactactaaatcctggacttgcctatgataacaagctcgagctacacacttttattgtcagaataaatggaatatataggaaggagttaattggaactggttagtacctaaataagatttttcaaagtaagttttttgtcgtattggcagaacagtgttaaaaaatagacattgtcatcataaacacccacaactatatctgtagaagataatttaatgcaatattctggggaaaatacagttgccaaaattaatctccttgttttctttcattgtgcaatgtggagttaaattttttttctattgagcagtgtgtgtgtgtgtttgtgtctataatttatatatgtgcttgtatacatttctatatacacatgtatgtgtatgcaaaatatgtatatatacacatatatataaaatgtacactaaatatgtatatatgtatattcataaaatgttttgctgtatggaaataaaaaagaaggtttctaaaggaaagatagagaagaaa

SEQ ID NO: 170979 - DNA, 1157 bp, Homo sapiens
  Payload ID: 13640
  Gene Symbol: PPP1R1C
  Gene Name: protein phosphatase 1, regulatory (inhibitor) subunit 1C
  Uniprot ID: Q8WVI7
  ENST ID: ENST00000409702
  CDS Start-End: 90-419
ggagtgtgtctgaggaaacacatcccggacaccacttagggttagtctttctgagctcttcacatctctgactaattatcatcattaccatggagcccaacagtcccaaaaagatacagtttgccgtgcctgtattccagagtcagattgcacctgaagcagcagagcagatcaggaaaagaagacctacaccagcatcacttgtgattctcaatgagcataaccccccagaaatagatgacaagagggggcccaacacacaaggggaattacagaatgcatcccctaagcaaaggaagcagagtgtgtacacaccacccaccataaaaggggttaagcatctgaaaggccagaatgaatcagcattccctgaagaagaagaaggcaccaatgaaagagaggagcagcgggaccattaattactggtctgcagcaagaaggcttcttggaaataactgaactattaacttttctgagtataccatggaattccactgcttgacttccagaagcatcctccatctctgcaccccacactcatacagtagctatgcacatcctggaagtctccttgactgaactttagaactaagtgcaaaatgagttgataacaaccagaagttgacttgttagtgctgtgcttctactcgagcttggaaaaatcccaacacaaaacaaacaccacctccgattccatcatgatgccacgttgctttctactggattacctcctgaagcactttagatattttatacataagtattgacatgtttttcagaagctgtttcttcacttattgcttttttctaataatttttattacaccatttgccaagtccttccctttggttttagtttattcctctctacaactaaaaaagggatcttgagtttaggtacattttaagtgattcatttttagtttttctaattctggaatctgagccttctcttacaacagggagtctttcaaaaacatttttttgtttctttttcaaattccactgtgtttatttattgccttgtttctttttcaaattccattggtcttgatttaatttagttccacagattttactgatagtctactacctgccaactactgaattatgcagcagacttataaaaataaaaaggctattttattgttattgcc

SEQ ID NO: 170980 - DNA, 839 bp, Homo sapiens
  Payload ID: 13641
  Gene Symbol: PPP1R2
  Gene Name: protein phosphatase 1, regulatory (inhibitor) subunit 2
  ENST ID: ENST00000438848
  CDS Start-End: 329-839
agatatcgcgagagggcgggtccgcttggcttcggcgtcgcgtcgctcctgcgctggagctctaggccggcgtctctccgcgagccgcgggtcaagtgccagtggctaagggtgcgcgagtagccgccacccgttcggcgttggctctggcgtcggggtcgttgtgtcgtgacaaccgctgcggtagccgtttccgaggcagcagttgcggccgctttagccctgagcgggatctgcggctgcctgcgagtctctgctgtgccgacccttctcttcgcggaccccacgccaagcagcgaccctgagccgacagccggagcgcccggcaatggcggcctcgacggcctcgcaccggcccatcaaggggatcttgaagaacaagacctctacgacttcctctatggtggcgtcggccgaacagccccgcgggaatgtcgacgaggagctgagcaaaaaatcccagaagtgggatgaaatgaacatcttggcgacgtatcatccagcagacaaagactatggtttaatgaaaatagatgaaccaagcactccttaccatagattagctgcagctgaaggcttggagccaaagtatcggattcaggaacaagaaagcagtggagaggaggatagtgacctctcacctgaagaacgagaaaaaaagcgacaatttgaaatgaaaaggaagcttcactacaatgaaggactcaatatcaaactagccagacaattaatttcaaaagacctacatgatgatgatgaagatgaagaaatgttagagactgcagatggagaaagcatgaatacggaagaatcaaatcaaggatctactccaagtgacc

SEQ ID NO: 170981 - DNA, 706 bp, Homo sapiens
  Payload ID: 13641
  Gene Symbol: PPP1R2
  Gene Name: protein phosphatase 1, regulatory (inhibitor) subunit 2
  ENST ID: ENST00000413183
  CDS Start-End: 134-376
gaggcagcagttgcggccgctttagccctgagcgggatctgcggctgcctgcgagtctctgctgtgccgacccttctcttcgcggaccccacgccaagcagcgaccctgagccgacagccggagcgcccggcaatggcggcctcgacggcctcgcaccggcccatcaaggggatcttgaagaacaagacctctacgacttcctctatggtggcgtcggccgaacagccccgcgggaatgtcgacgaggagctgagcaaaaaatcccagaagtgggatgaaatgaacatcttggcgacgtatcatccagcagacaaagactatggtttaatgaaaatagatgaaccaagcactccttaccataggtatatactttaaaaatcttaaaaaaaaaaaaagatacaagatctggctatgttgcccagtgcagtggctattaacaggcacagttatagcacactacagcctggaactcccgactcaagtgatcctccctcctccgcctcccagtatgatgggggatgatgaagatgcctgtagtgacaccgaggccactgaagccatggcgccagacatcttagccaggaaattagctgcagctgaaggcttggagccaaagtatcggattcaggaacaagaaagcagtggagaggaggatagtgacctctcacctgaagaacgagaaaaaaagcgacaatttgaaatgaa

SEQ ID NO: 170982 - DNA, 872 bp, Homo sapiens
  Payload ID: 13641
  Gene Symbol: PPP1R2
  Gene Name: protein phosphatase 1, regulatory (inhibitor) subunit 2
  ENST ID: ENST00000418939
  CDS Start-End: 1-165
acgtatcatccagcagacaaagactatggtttaatgaaaatagatgaaccaagcactccttaccatagtatgatgggggatgatgaagatgcctgtagtgacaccgaggccactgaagccatggcgccagacatcttagccaggaaaaaaaaagcgacaatttgaaatgaaaaggaagcttcactacaatgaaggactcaatatcaaactagccagacaattaatttcaaaagacctacatgatgatgatgaagatgaagaaatgttagagactgcagatggagaaagcatgaatacggaagaatcaaatcaaggatctactccaagtgaccaacagcaaaacaaattacgaagttcatagacgagatttgttcaacactgcaattgtttgttagatgtaaaccctgtgactatagtacgttgcttcttgttcttcacaattcatgacttaagtaccaaaatgcataccagttattatatattgccaagaattaaatgataaacttagagactgattagactgaaaatgcctaatcgatatatatattcttgtgcctagtactttaccacaaatacagtgtaatatcatcagtccaaaactgcattacttttgtaaaaacactggttaatttgtataagatattatagagctttttatgctttagaagttaaacaatatctttgggggggaactaatttattttcatcacttgaaatgtggtagctcttacaaagtttattgatttgatttttttaaaaatcaaaagccaattgaacaacaggatatatagactgataaatatttaggctgaatagtattttaacacttgtcttcaacttgatttgtctgtttaattgaaaagaattataag

SEQ ID NO: 170983 - DNA, 3450 bp, Homo sapiens
  Payload ID: 13641
  Gene Symbol: PPP1R2
  Gene Name: protein phosphatase 1, regulatory (inhibitor) subunit 2
  Uniprot ID: P41236
  ENST ID: ENST00000618156
  CDS Start-End: 362-979
gttctcgccccgccctctccccgcctcctccctagatatcgcgagagggcgggtccgcttggcttcggcgtcgcgtcgctcctgcgctggagctctaggccggcgtctctccgcgagccgcgggtcaagtgccagtggctaagggtgcgcgagtagccgccacccgttcggcgttggctctggcgtcggggtcgttgtgtcgtgacaaccgctgcggtagccgtttccgaggcagcagttgcggccgctttagccctgagcgggatctgcggctgcctgcgagtctctgctgtgccgacccttctcttcgcggaccccacgccaagcagcgaccctgagccgacagccggagcgcccggcaatggcggcctcgacggcctcgcaccggcccatcaaggggatcttgaagaacaagacctctacgacttcctctatggtggcgtcggccgaacagccccgcgggaatgtcgacgaggagctgagcaaaaaatcccagaagtgggatgaaatgaacatcttggcgacgtatcatccagcagacaaagactatggtttaatgaaaatagatgaaccaagcactccttaccatagtatgatgggggatgatgaagatgcctgtagtgacaccgaggccactgaagccatggcgccagacatcttagccaggaaattagctgcagctgaaggcttggagccaaagtatcggattcaggaacaagaaagcagtggagaggaggatagtgacctctcacctgaagaacgagaaaaaaagcgacaatttgaaatgaaaaggaagcttcactacaatgaaggactcaatatcaaactagccagacaattaatttcaaaagacctacatgatgatgatgaagatgaagaaatgttagagactgcagatggagaaagcatgaatacggaagaatcaaatcaaggatctactccaagtgaccaacagcaaaacaaattacgaagttcatagacgagatttgttcaacactgcaattgtttgttagatgtaaaccctgtgactatagtacgttgcttcttgttcttcacaattcatgacttaagtaccaaaatgcataccagttattatatattgccaagaattaaatgataaacttagagactgattagactgaaaatgcctaatcgatatatatattcttgtgcctagtactttaccacaaatacagtgtaatatcatcagtccaaaactgcattacttttgtaaaaacactggttaatttgtataagatattatagagctttttatgctttagaagttaaacaatatctttgggggggaactaatttattttcatcacttgaaatgtggtagctcttacaaagtttattgatttgatttttttaaaaatcaaaagccaattgaacaacaggatatatagactgataaatatttaggctgaatagtattttaacacttgtcttcaacttgatttgtctgtttaattgaaaagaattataagagttactgttgcattttctgacctactatttttaaaattcctgttgagtttctttgtgtttacaaggaaaggactgaactttttctcatcaaaactagcttttttccccacaaataaattatcaggttaaactttcaccaatgtctgctctgttttttgtttttggggggtttttgtttgtttttgttttttaatgtttttggtacactgggcagacttcagagcagttttttaaaaaaataaatattctaatgtagctatctcgccattccctttaaatacctgtcttaacctcctgcttttctttcctactcctttccacacatacgcacacaatcttctaccttttaaaggatcattaagactgtcaccacattaggagctctttctctcactcttctgtcatttgctgctatgttgaaattcttattttgaccatcaatgcctatgaattcttctaatacgtgaagaaaatagtttgagtagcagcagtgctataggtgggaaatacagtttagctgctgaatttctatacctctctgatttacagattgctaattaaatggctattattagtttggattaattagacttaagaaaacaactaactgagggttttttttgtttgttttttgagggttttctttgcatgagaattgtatgtaaccagtgatatgattattcctgaatgtacagacagaagtaagcctggacattgttaaatagtccctgctttaagggactacgataatgtgtactatgacaaacgtgctttattcttctaacgcagtaagaattaggtggaattttttccttcaaccaagtgcaggaaagccctgtgtgtcttggtttagttatggtttcatttctagccatacaattgatgaattgtgtacaacttttgttagtaccaaaataatctgttatatgaacagacttctaaaataacgtctgtatattttatatatagatacatatatgaaagaaggcttttattgaacagcttatcttccacttgcaggtttatggaaacagcagtatttgaaaataaataaaaagtgggagaattccttgctgttagaagaatgtggccattattttgattttttgaatgagatatataatcaaagtactgctgaactgtgagtgcagtattctaaacatttcagctaggaataccactgatttagaaacaaaactgtttgtctctggtttctgaatttaaaatgttgggattacctgtttaaatctgtcttgggggatgtagagattaagtctgtacatgtgcgtgcacatatattcatgcaccctctgattttggttttcttgtttctgagttcttagaaagtacccacatactctttttttttttttgtagaagtagctgtcatagagtgaagaaaaggataagactttaaacagttgattctttttgtgttttctacaaactattttttgaaatttaaatcacaaactcattttctggtttttagaaagtagatgatgatttcagaggagtaaggcatgccaagcagcatgctcagtggggttttaggctgtcacatgcagctgagaaaaggtatgttcaagtcataagtaggtaattgatagggtatgaactagtcaaaatatgaaccattatgattcaagttagattttcctctggagagacagatctgaatgttcagttctagccaaggtagattttactttcaactttttaatcagtatcactttctgtgcttaactatttggtgttaccttgtctgttttcatttgtctaaaattctgcagagatgactaaaatttgacataatggtgtaaatggattgttaaggtaactttcagttgaagattaaagcaagatgccattttccccatgactttggttttgtttacatttttccctttcagttagtatacactacacgtactgtaataaaatacaataatatgacaa

SEQ ID NO: 170984 - DNA, 245 bp, Homo sapiens
  Payload ID: 13641
  Gene Symbol: PPP1R2
  Gene Name: protein phosphatase 1, regulatory (inhibitor) subunit 2
  ENST ID: ENST00000625807
  CDS Start-End: 3-245
caatggcggcctcgacggcctcgcaccggcccatcaaggggatcttgaagaacaagacctctacgacttcctctatggtggcgtcggccgaacagccccgcgggaatgtcgacgaggagctgagcaaaaaatcccagaagtgggatgaaatgaacatcttggcgacgtatcatccagcagacaaagactatggtttaatgaaaatagatgaaccaagcactccttaccataggtatatactttaa

SEQ ID NO: 170985 - DNA, 4525 bp, Homo sapiens
  Payload ID: 13642
  Gene Symbol: PPP1R10
  Gene Name: protein phosphatase 1, regulatory subunit 10
  Uniprot ID: Q96QC0
  ENST ID: ENST00000376511
  CDS Start-End: 554-3376
cattctggggttcgtttagaggtttgaattttctcggagaaagacaggccggccacgaggaaaacagaaacaagccgcagcaacatctaagcccttgaaaggatcctgagagaggggggaaagggaaaacagcagccaccagcccaaccacttgtgtcttctgccccttcccacctatcttgcccaccccaccagcccacgctgcttgggacttgaaatctgtggccgaaggaccgtcactacataacttcaaaaataatcaaccaccctcccttcccaaaccacccaaattcactcatccagcgtttacttttttgaatccactcagaacttttttctgcgacccccctccctaaatggagttgggtgggggggaaatgaatactgagttggcctttattttttaaaagactttttgatccaatgaggccccctaaataattgagttttgggtcctggttggttgttttattttttttcctccaaaattttaccccctcccccctgagcccgaggtgctgacgtcgcaaaaaaattggataaaaccaccatcatgggttcgggtcccatagaccccaaagaacttctcaagggcctggacagcttccttaaccgagatggggaagtcaaaagtgtggatgggatttccaagatcttcagtttgatgaaggaagcacgaaagatggtgagtcgatgcacttacttgaacattctcctgcagacccgttcaccagaaatattggtcaaatttattgacgttggcggctacaaacttcttaacaattggctgacgtattcaaagacaaccaacaacattcccctcctccagcaaattctactgaccctgcagcatctaccgctcactgtagaccatctcaagcagaacaacacagctaaactggtgaagcagctgagcaagtcaagtgaggatgaagagctccggaaattggcctcagtccttgtcagcgactggatggctgtcatccgctctcagagcagtacccagcctgctgagaaagataagaagaaacgtaaagatgaaggaaaaagtcgaactacccttcctgagcgacctttgacagaggtgaaggctgagacccgggctgaggaggccccagagaagaagagggagaagcccaagtctcttcgcaccacagcacccagtcatgccaagttccgttccactggactagagctggagacaccatccttggtgcctgtgaagaagaatgccagcacagtggtggtttctgacaagtacaaccttaaacccatccccctcaaacgtcagagcaacgtagctgctccaggagatgccactccccctgcagagaagaaatacaagccactcaacacaacacctaatgccaccaaagagatcaaagtgaagatcatcccgccacagcctatggagggcctgggctttctggatgctcttaattcagcccctgttccaggcatcaaaattaagaagaaaaaaaaagtactgtcacctacggctgccaagccaagcccctttgaagggaaaacgagcacagaaccaagcacagccaaaccttcttccccagaaccagcaccaccttctgaggcaatggacgcagaccgtccaggcaccccggttccccctgttgaagtcccggagctcatggatacagcctctttggagccaggagctctggatgccaagccagtggagagtcctggagatcctaaccaactgacccggaaaggcaggaagaggaaaagtgtgacatggcctgaggaaggcaaactgagagaatatttctattttgaattggatgaaactgaacgagtaaatgtgaataagatcaaggactttggtgaggcggctaagcgagagatactgtcagaccgacatgcatttgagacagcgcggcgtctgagccatgataacatggaggagaaggtgccctgggtgtgcccccggcccctggttctgccctcacctcttgtcacccctggaagcaatagtcaggagcgatatatccaggctgagcgggagaagggaatccttcaggagctcttcctgaacaaggagagtcctcatgagcctgatcctgagccctacgagcccataccccctaaactcatccccctagatgaggagtgttccatggatgagactccgtatgttgagactctggaacctggggggtcaggtggctcacctgatggggcaggaggctccaagttgcctccagttctggccaatcttatgggaagcatgggtgctggaaagggcccccaaggccctggaggaggaggcattaatgtccaagagatcctcacctccatcatgggtagcccaaacagtcatccttcagaggaactactgaaacaaccagactattcggacaagatcaagcagatgctggtgccacatggactcctaggccctggcccaatagccaatggtttcccaccagggggtcctgggggccccaagggcatgcagcactttccccctggacctgggggacctatgccaggtccccatggaggccctggtgggccagtgggtccacgtcttctgggtcctccaccccctccccggggaggtgatcccttctgggatggcccgggcgaccctatgcggggtggcccaatgcgggggggtccaggaccaggtcctggaccataccatagaggccgaggtggccgaggaggaaacgaacctcctcctcctcctcctccattccgaggcgccagaggaggtcgctctggaggaggacccccaaatggacgagggggccctggtgggggcatggttggaggtggtgggcatcgtcctcacgaaggccctggtgggggcatgggcaacagcagtggacatcgtccccacgaaggccctggcggtggcatgggaagtgggcatcgcccccatgaaggccctggtggtagcatgggtgggggtggaggacatcgtccccacgaaggccctggcggtggcatcagtggtggcagtggccatcgtccccatgaaggccctggcggaggaatgggtgccggtggtggacatcgcccccacgaaggccctggcggaagcatgggtggaagtggtggacatcgtccccatgaaggccctggacacggggggccccatggccaccggcctcatgatgtccctggtcaccgaggccatgaccatcgagggccgccacctcatgagcaccgtggccatgatggtcctggccacgggggagggggccaccgagggcacgatggaggccacagccatggaggagacatgtcaaaccgccctgtctgccgacatttcatgatgaagggcaactgccgctatgagaacaactgtgccttctaccacccgggtgtcaatgggccccccctgccctagggaccatttgcctgccctgttcacacaacccctgtggactgcagcctcgctctttccaccctgttatggcttctgtgaggcccattttcccttttccccagctgatgaggagccggccccctcagttcccacttgcttgggttcctgggggttttctgatcactggtgcgcattgatgtacatattttcctccagtctggggaggagagagactggaaacgttcctggactgctgaagaggagacccagttggcttcactttttgagaagattcgccctgtaccccaaacccctttccagtattacccttaatgcttgagaacctaaagctggttatcctggcgaacacccctacccttctattgcgggtccccacatgcacacagaactctgacacaggatcagctgcacttaagaaatcatcccagctaagttcattattcctcatggggtggggagatgctgaaaggggtattgtatatcccactgcactgagagggctcaatcagctggatttgagttctggaacacacatcatccccacccctcccccagcgtgggctcaccattcttagtcctttctcaagtgggaccttcaactttctgtgaacacccagtctgcgtcctgggtctgctaggttcgatgatggcgaactcgtatctgcatccggtgcaagttttagctggcagaggtgagaccggtggtgctggtctgcctttgccaactatagccagtctggagacttgataaaatacttcagtgagaccagcttctcatcaacttgggcccggcgtgctgggcctgaaagtcacactacatgcactgcctttgggagtcagctcactccctgctcccacctggaaccttgccagcgtgaaggaggcttccaggtacttcaccctgtcaaccacctctgaatccccaccaggcgccttcctgggtggattcaacaagatgattttgccctttcccagttctctccttcactttggcatcagttgttttctatgaaaacagtggattggttgggttttgtgcagggtcttgggttagagccaaaatggatttgaggatgagtatttttttttttggttttgtatattttgtacattaataataaacagtggaaagagaagcagcttatttaa

SEQ ID NO: 170986 - DNA, 4525 bp, Homo sapiens; identical to SEQ ID NO: 170985
  Payload ID: 13642
  Gene Symbol: PPP1R10
  Gene Name: protein phosphatase 1, regulatory subunit 10
  Uniprot ID: Q96QC0
  ENST ID: ENST00000383586
  CDS Start-End: 554-3376

SEQ ID NO: 170987 - DNA, 4525 bp, Homo sapiens; identical to SEQ ID NO: 170985
  Payload ID: 13642
  Gene Symbol: PPP1R10
  Gene Name: protein phosphatase 1, regulatory subunit 10
  Uniprot ID: Q96QC0
  ENST ID: ENST00000426299
  CDS Start-End: 554-3376

SEQ ID NO: 170988 - DNA, 4525 bp, Homo sapiens; identical to SEQ ID NO: 170985
  Payload ID: 13642
  Gene Symbol: PPP1R10
  Gene Name: protein phosphatase 1, regulatory subunit 10
  Uniprot ID: Q96QC0
  ENST ID: ENST00000424446
  CDS Start-End: 554-3376

SEQ ID NO: 170989 - DNA, 4525 bp, Homo sapiens; identical to SEQ ID NO: 170985
  Payload ID: 13642
  Gene Symbol: PPP1R10
  Gene Name: protein phosphatase 1, regulatory subunit 10
  Uniprot ID: Q96QC0
  ENST ID: ENST00000429597
  CDS Start-End: 554-3376

SEQ ID NO: 170990 - DNA, 4525 bp, Homo sapiens; identical to SEQ ID NO: 170985
  Payload ID: 13642
  Gene Symbol: PPP1R10
  Gene Name: protein phosphatase 1, regulatory subunit 10
  Uniprot ID: Q96QC0
  ENST ID: ENST00000420949
  CDS Start-End: 554-3376

SEQ ID NO: 170991 - DNA, 4525 bp, Homo sapiens; identical to SEQ ID NO: 170985
  Payload ID: 13642
  Gene Symbol: PPP1R10
  Gene Name: protein phosphatase 1, regulatory subunit 10
  Uniprot ID: Q96QC0
  ENST ID: ENST00000449113
  CDS Start-End: 554-3376

SEQ ID NO: 170992 - DNA, 5582 bp, Homo sapiens
  Payload ID: 13643
  Gene Symbol: PPP1R12A
  Gene Name: protein phosphatase 1, regulatory subunit 12A
  Uniprot ID: O14974
  ENST ID: ENST00000261207
  CDS Start-End: 124-3216
agatctgccctgtagagccttgcggttccactgctggcctccggattcccgggagcccccagcccgacaggacaaccttccttccccgcttcctcctttccagacccggcggcaggagaggggatgaagatggcggacgcgaagcagaagcggaacgagcagctgaaacgctggatcggctccgagacggacctcgagcctccggtggtgaagcgccagaagaccaaggtgaagttcgacgatggcgccgtcttcctggctgcttgctccagcggcgacacggacgaggtcctcaagctgctgcaccgcggcgccgacatcaattacgccaatgtggacggactcactgccctgcaccaggcttgcattgatgacaatgttgatatggtgaagtttctggtagaaaatggagcaaatattaatcaacctgataatgaaggctggataccactacatgcagcagcttcctgtggatatcttgatattgcagagtttttgattggtcaaggagcacatgtaggggctgtcaacagtgaaggagatacacctttagatattgcggaggaggaggcaatggaagagctacttcaaaatgaagttaatcggcaaggggttgatatagaagcagctcgaaaggaagaagaacggatcatgcttagagatgccaggcagtggctaaatagtggtcatataaatgatgtccggcatgcaaaatctggaggtacagcacttcacgttgcagctgctaaaggctatacggaagttttaaaacttttaatacaggcaggctatgatgttaatattaaagactatgatggctggacacctcttcatgctgcagctcattggggtaaagaagaagcatgtcgaattttagtggacaatctgtgtgatatggagatggtcaacaaagtgggccaaacagcctttgatgtagcagatgaagacattttaggatatttagaagagttgcaaaagaaacaaaatctgctccatagtgaaaaacgggacaagaaatctccactaattgaatcaacagcaaatatggacaataatcagtcacagaagacctttaaaaacaaagagacgttgattattgaaccagagaaaaatgcatcccgtattgaatctctggaacaagaaaaggttgatgaagaagaagaaggaaagaaggatgagtctagctgctctagtgaagaagatgaggaagatgactcggaatcagaagctgaaacagataagacaaaacccctggcttctgtaactaatgccaacacttctagtacacaagcagctcctgtagctgttacaacacctactgtgtcatcaggtcaagcaacacctacatcacctattaaaaagtttccaaccacagctacaaaaatttctcccaaagaagaagagagaaaagatgagtctcctgcaacttggaggttaggacttagaaagacgggcagctatggtgcacttgctgaaatcacagcatctaaagagggtcagaaagaaaaagatactgcaggtgttacacgttcagcttcaagtcccagactttcctcctctttggataataaagaaaaggagaaagatagtaaaggaactaggcttgcatatgttgcacctacaataccaagacgactagccagtacatctgacattgaagagaaagaaaacagagattcttcaagtttgcgaacaagtagttcatatacaaggagaaaatgggaagatgatcttaaaaaaaatagctcagttaatgaaggatcaacgtatcataaaagttgctcctttggtagaagacaagatgatttgattagttctagtgttccaagcaccacatcaacaccaacagttacctctgcagctgggcttcagaaaagcctgctttccagcacaagcactactacaaagattacaacgggttcttcctcagcaggcacacaaagcagtacctcaaatcgtttgtgggctgaggatagtactgagaaagaaaaggacagtgttcctacggcagtgaccattcctgttgctccaactgttgtaaatgctgcagcttctaccacaaccctgactacaactactgctggcactgtctcctccacaacagaggtcagggagagacgcagatcatacctcactcctgttagggatgaagagtctgaatcccaaagaaaagcaagatctagacaagcaagacaatctagaagatcaacacagggagtgacattaactgatcttcaagaagctgagaaaacaataggaagaagtcgttctacccgaaccagagaacaagaaaatgaagaaaaagaaaaagaggaaaaagagaaacaagataaagagaaacaagaagaaaagaaggagtcagaaacatctagagaagatgaatataaacaaaagtactccagaacgtatgatgagacttaccagcgttataggccagtatcaacttcaagttcaaccactccatcctcttcactttctactatgagcagttcactgtatgcttcaagtcaactaaacaggccaaatagtcttgtaggcataacttctgcttactccagaggaataacaaaagaaaatgaaagagagggagaaaaaagagaagaggagaaagaaggagaagataaatcacaacctaaatcaatcagagaacgacgacgaccaagagagaaaagaagatctacaggagtttcattttggacacaagatagtgatgaaaatgaacaagaacaacaatcagacacagaagagggatccaataagaaagaaactcagacggattccatttctagatatgaaaccagttctacatcagctggtgatcgatatgattccttgctgggtcgctctggatcatacagttacttagaagaaagaaaaccttacagcagcaggctagaaaaggatgactcaactgactttaaaaagctttatgaacaaattctagctgaaaatgaaaagctgaaggcacagctacatgatacaaatatggaactaacagatcttaaattacagttggaaaaggccacccagagacaagaaagatttgctgatagatcactgttggaaatggaaaaaagggaacgaagagctctagaaagaagaatatctgaaatggaagaagagctcaaaatgttaccagacctaaaagcagacaaccagaggctaaaggatgaaaatggggccttgatcagagttataagcaaactttccaaataaaaaaaaaaaaagcagcaagtaatggaattgcacatattagtaacccagtggaccataattggcagtcactggaagtctgggaagaatccttggagactgtcattttcggatatcctgccaaatgccctcttatctagaatttttgtttcattttgtttaattttctggggtgtttttgttgttgttggtttgttttttgttttttttttttaatcaagaccattgtttcatgttaatgcagctgctgagaagatttttttttaatgactgagaaaacttgtttacagctccagcatataaggaaagtgttcaaggccagatatgcctcagatatttaaccagtaagccttagttgtacataaatacttttgtgtcaacaaaaactttcagctctcacagaagacagttactcaacattttttgatgtgccacagtttcgagtttttcgatatttaaattttttggcttttcatctaagtttgggtttgtattttttccttctaaactcttcatgtggcagagtcttctatgttttcacagctttttcattacagaaaagaacacttgctcttctgtgattattgtcatgtattaggctaatgctgtgttgtctcccacctggaactgaattgcttggtggaacatatgctttcactgtttgtgcaatatgcatttatttcttatatgaatgctttaaagtcatttgaggttagatcttttaattcctattttctgcttcattggtcactttttttttattgtagtataagatgttagattctgtaatcttcacattcattttagcaggtactgagtgatgctgtatatacaaataagtgtattgttttgatttttagaccaccacatggcatgcttgactatttcttatttcaaatgtctgctaatgcagagtaggctactccatgatagtgttaaaaaacaaaatttgctaacaatgtgatataaagactttaaaagttacacattatgtggagccctatctttacaaaagtttcctactgtaaagtgcttttattttcagttttcacttgatagtactcaaccataattaaagttgcataagataattgctttacatttcacatacctatatttatctgagtgctgtctaaaactgttgtgctagccaaagtaatgctatgaaatcatttgcagaattaacccgtgagttaatgttaaatgcactgttattgccatgtgaagaggcatcgactttgataccaccatcatgttcagaccattttatacatttcagtggcctttttttttttttaaggaaaaaaaagcgcaaaaccaagtacatagtgacgatggcttttatttggacaaatagcttttatattttcattaaaccatgcaaaaaatactacatctttctggcacataactgtctccttaaccactgaacagttcagccatttgaataaattgtacattgtaaagcttatagtagctgattgtattattgattgtattgtatactatattaaatgtgaatttgtaccccttcattttaaaaggtcattgtgttctactgcctattttagattactttggggttggggaagggtgttttggtaagcaggattttaagtcctctctctctcgattggttttatgaagatataaggttatgctcttactaccaagctcaggattcttgattttaaaggtacaaggatagttgtgggagttttatttttggttatatttgaactgtatgaatggtaggtctgaatattgagaatttccatggtcttatgtggaggtaaaatatacagataactgatcagtttgagtgactgcaacatgttctggttgcacaacagttaggcatgctatggtttatatttgtgaagtttggatgcctgtgaagaatgattaaatacatgtttctaatattttagtgttttgtatttaggttatttattctttgtatctaaaactgaacagctactgtgctatattgattttattggtagtattgagcagaccttgtttctgcatgaaactagttgcaaaacccactattttggaaataaaaatgtattttgacatatacaaataaaatgaataaaactattttaaatgtgtgaacttttaatgaagacattttaaattttgttctgagatatttaaattctgcatgggtattttttcactaattgctttacttggataccaatttgaataatttctgaaattgtaatattgtgataatttgcacagcattgtacatgcacatctgtaaatgcaatcttaattgccatatttatgcaatctgtgtaccaatttggacaaatgtttatatattttacataaagctgtctgtatgcagaatctga

SEQ ID NO: 170993 - DNA, 5721 bp, Homo sapiens
  Payload ID: 13643
  Gene Symbol: PPP1R12A
  Gene Name: protein phosphatase 1, regulatory subunit 12A
  Uniprot ID: O14974
  ENST ID: ENST00000450142
  CDS Start-End: 268-3360
gaagttacgttagattggccgccggtgacgggtggccgtgctgggggcgggagggcttctgtggtaggaagggaggtccgctcggccgggtgcgccgccccagtgctctgtgggatactggaagtctcgagcgtcggctccgggttcccagccctcctctggcccgcactcatagaaacattcacacaccccctgcctcccctctcttccctctccgcctcccccttccccccctcgcgataagaagacccggcggcaggagaggggatgaagatggcggacgcgaagcagaagcggaacgagcagctgaaacgctggatcggctccgagacggacctcgagcctccggtggtgaagcgccagaagaccaaggtgaagttcgacgatggcgccgtcttcctggctgcttgctccagcggcgacacggacgaggtcctcaagctgctgcaccgcggcgccgacatcaattacgccaatgtggacggactcactgccctgcaccaggcttgcattgatgacaatgttgatatggtgaagtttctggtagaaaatggagcaaatattaatcaacctgataatgaaggctggataccactacatgcagcagcttcctgtggatatcttgatattgcagagtttttgattggtcaaggagcacatgtaggggctgtcaacagtgaaggagatacacctttagatattgcggaggaggaggcaatggaagagctacttcaaaatgaagttaatcggcaaggggttgatatagaagcagctcgaaaggaagaagaacggatcatgcttagagatgccaggcagtggctaaatagtggtcatataaatgatgtccggcatgcaaaatctggaggtacagcacttcacgttgcagctgctaaaggctatacggaagttttaaaacttttaatacaggcaggctatgatgttaatattaaagactatgatggctggacacctcttcatgctgcagctcattggggtaaagaagaagcatgtcgaattttagtggacaatctgtgtgatatggagatggtcaacaaagtgggccaaacagcctttgatgtagcagatgaagacattttaggatatttagaagagttgcaaaagaaacaaaatctgctccatagtgaaaaacgggacaagaaatctccactaattgaatcaacagcaaatatggacaataatcagtcacagaagacctttaaaaacaaagagacgttgattattgaaccagagaaaaatgcatcccgtattgaatctctggaacaagaaaaggttgatgaagaagaagaaggaaagaaggatgagtctagctgctctagtgaagaagatgaggaagatgactcggaatcagaagctgaaacagataagacaaaacccctggcttctgtaactaatgccaacacttctagtacacaagcagctcctgtagctgttacaacacctactgtgtcatcaggtcaagcaacacctacatcacctattaaaaagtttccaaccacagctacaaaaatttctcccaaagaagaagagagaaaagatgagtctcctgcaacttggaggttaggacttagaaagacgggcagctatggtgcacttgctgaaatcacagcatctaaagagggtcagaaagaaaaagatactgcaggtgttacacgttcagcttcaagtcccagactttcctcctctttggataataaagaaaaggagaaagatagtaaaggaactaggcttgcatatgttgcacctacaataccaagacgactagccagtacatctgacattgaagagaaagaaaacagagattcttcaagtttgcgaacaagtagttcatatacaaggagaaaatgggaagatgatcttaaaaaaaatagctcagttaatgaaggatcaacgtatcataaaagttgctcctttggtagaagacaagatgatttgattagttctagtgttccaagcaccacatcaacaccaacagttacctctgcagctgggcttcagaaaagcctgctttccagcacaagcactactacaaagattacaacgggttcttcctcagcaggcacacaaagcagtacctcaaatcgtttgtgggctgaggatagtactgagaaagaaaaggacagtgttcctacggcagtgaccattcctgttgctccaactgttgtaaatgctgcagcttctaccacaaccctgactacaactactgctggcactgtctcctccacaacagaggtcagggagagacgcagatcatacctcactcctgttagggatgaagagtctgaatcccaaagaaaagcaagatctagacaagcaagacaatctagaagatcaacacagggagtgacattaactgatcttcaagaagctgagaaaacaataggaagaagtcgttctacccgaaccagagaacaagaaaatgaagaaaaagaaaaagaggaaaaagagaaacaagataaagagaaacaagaagaaaagaaggagtcagaaacatctagagaagatgaatataaacaaaagtactccagaacgtatgatgagacttaccagcgttataggccagtatcaacttcaagttcaaccactccatcctcttcactttctactatgagcagttcactgtatgcttcaagtcaactaaacaggccaaatagtcttgtaggcataacttctgcttactccagaggaataacaaaagaaaatgaaagagagggagaaaaaagagaagaggagaaagaaggagaagataaatcacaacctaaatcaatcagagaacgacgacgaccaagagagaaaagaagatctacaggagtttcattttggacacaagatagtgatgaaaatgaacaagaacaacaatcagacacagaagagggatccaataagaaagaaactcagacggattccatttctagatatgaaaccagttctacatcagctggtgatcgatatgattccttgctgggtcgctctggatcatacagttacttagaagaaagaaaaccttacagcagcaggctagaaaaggatgactcaactgactttaaaaagctttatgaacaaattctagctgaaaatgaaaagctgaaggcacagctacatgatacaaatatggaactaacagatcttaaattacagttggaaaaggccacccagagacaagaaagatttgctgatagatcactgttggaaatggaaaaaagggaacgaagagctctagaaagaagaatatctgaaatggaagaagagctcaaaatgttaccagacctaaaagcagacaaccagaggctaaaggatgaaaatggggccttgatcagagttataagcaaactttccaaataaaaaaaaaaaaagcagcaagtaatggaattgcacatattagtaacccagtggaccataattggcagtcactggaagtctgggaagaatccttggagactgtcattttcggatatcctgccaaatgccctcttatctagaatttttgtttcattttgtttaattttctggggtgtttttgttgttgttggtttgttttttgttttttttttttaatcaagaccattgtttcatgttaatgcagctgctgagaagatttttttttaatgactgagaaaacttgtttacagctccagcatataaggaaagtgttcaaggccagatatgcctcagatatttaaccagtaagccttagttgtacataaatacttttgtgtcaacaaaaactttcagctctcacagaagacagttactcaacattttttgatgtgccacagtttcgagtttttcgatatttaaattttttggcttttcatctaagtttgggtttgtattttttccttctaaactcttcatgtggcagagtcttctatgttttcacagctttttcattacagaaaagaacacttgctcttctgtgattattgtcatgtattaggctaatgctgtgttgtctcccacctggaactgaattgcttggtggaacatatgctttcactgtttgtgcaatatgcatttatttcttatatgaatgctttaaagtcatttgaggttagatcttttaattcctattttctgcttcattggtcactttttttttattgtagtataagatgttagattctgtaatcttcacattcattttagcaggtactgagtgatgctgtatatacaaataagtgtattgttttgatttttagaccaccacatggcatgcttgactatttcttatttcaaatgtctgctaatgcagagtaggctactccatgatagtgttaaaaaacaaaatttgctaacaatgtgatataaagactttaaaagttacacattatgtggagccctatctttacaaaagtttcctactgtaaagtgcttttattttcagttttcacttgatagtactcaaccataattaaagttgcataagataattgctttacatttcacatacctatatttatctgagtgctgtctaaaactgttgtgctagccaaagtaatgctatgaaatcatttgcagaattaacccgtgagttaatgttaaatgcactgttattgccatgtgaagaggcatcgactttgataccaccatcatgttcagaccattttatacatttcagtggcctttttttttttttaaggaaaaaaaagcgcaaaaccaagtacatagtgacgatggcttttatttggacaaatagcttttatattttcattaaaccatgcaaaaaatactacatctttctggcacataactgtctccttaaccactgaacagttcagccatttgaataaattgtacattgtaaagcttatagtagctgattgtattattgattgtattgtatactatattaaatgtgaatttgtaccccttcattttaaaaggtcattgtgttctactgcctattttagattactttggggttggggaagggtgttttggtaagcaggattttaagtcctctctctctcgattggttttatgaagatataaggttatgctcttactaccaagctcaggattcttgattttaaaggtacaaggatagttgtgggagttttatttttggttatatttgaactgtatgaatggtaggtctgaatattgagaatttccatggtcttatgtggaggtaaaatatacagataactgatcagtttgagtgactgcaacatgttctggttgcacaacagttaggcatgctatggtttatatttgtgaagtttggatgcctgtgaagaatgattaaatacatgtttctaatattttagtgttttgtatttaggttatttattctttgtatctaaaactgaacagctactgtgctatattgattttattggtagtattgagcagaccttgtttctgcatgaaactagttgcaaaacccactattttggaaataaaaatgtattttgacatatacaaataaaatgaataaaactattttaaatgtgtgaacttttaatgaagacattttaaattttgttctgagatatttaaattctgcatgggtattttttcactaattgctttacttggataccaatttgaataatttctgaaattgtaatattgtgataatttgcacagcattgtacatgcacatctgtaaatgcaatcttaattgccatatttatgcaatctgtgtaccaatttggacaaatgtttatatattttacataaagctgtctgtatgcagaa

SEQ ID NO: 170994 - DNA, 4639 bp, Homo sapiens
  Payload ID: 13643
  Gene Symbol: PPP1R12A
  Gene Name: protein phosphatase 1, regulatory subunit 12A
  Uniprot ID: O14974
  ENST ID: ENST00000437004
  CDS Start-End: 129-3116
gaggcagatctgccctgtagagccttgcggttccactgctggcctccggattcccgggagcccccagcccgacaggacaaccttccttccccgcttcctcctttccagacccggcggcaggagaggggatgaagatggcggacgcgaagcagaagcggaacgagcagctgaaacgctggatcggctccgagacggacctcgagcctccggtggtgaagcgccagaagaccaaggtgaagttcgacgatggcgccgtcttcctggctgcttgctccagcggcgacacggacgaggtcctcaagctgctgcaccgcggcgccgacatcaattacgccaatgtggacggactcactgccctgcaccaggcttgcattgatgacaatgttgatatggtgaagtttctggtagaaaatggagcaaatattaatcaacctgataatgaaggctggataccactacatgcagcagcttcctgtggatatcttgatattgcagagtttttgattggtcaaggagcacatgtaggggctgtcaacagtgaaggagatacacctttagatattgcggaggaggaggcaatggaagagctacttcaaaatgaagttaatcggcaaggggttgatatagaagcagctcgaaaggaagaagaacggatcatgcttagagatgccaggcagtggctaaatagtggtcatataaatgatgtccggcatgcaaaatctggaggtacagcacttcacgttgcagctgctaaaggctatacggaagttttaaaacttttaatacaggcaggctatgatgttaatattaaagactatgatggctggacacctcttcatgctgcagctcattggggtaaagaagaagcatgtcgaattttagtggacaatctgtgtgatatggagatggtcaacaaagtgggccaaacagcctttgatgtagcagatgaagacattttaggatatttagaagagttgcaaaagaaacaaaatctgctccatagtgaaaaacgggacaagaaatctccactaattgaatcaacagcaaatatggacaataatcagtcacagaagacctttaaaaacaaagagacgttgattattgaaccagagaaaaatgcatcccgtattgaatctctggaacaagaaaaggttgatgaagaagaagaaggaaagaaggatgagtctagctgctctagtgaagaagatgaggaagatgactcggaatcagaagctgaaacagataagacaaaacccctggcttctgtaactaatgccaacacttctagtacacaagcagctcctgtagctgttacaacacctactgtgtcatcaggtcaagcaacacctacatcacctattaaaaagtttccaaccacagctacaaaaatttctcccaaagaagaagagagaaaagatgagtctcctgcaacttggaggttaggacttagaaagacgggcagctatggtgcacttgctgaaatcacagcatctaaagagggtcagaaagaaaaagatactgcaggtgttacacgttcagcttcaagtcccagactttcctcctctttggataataaagaaaaggagaaagatagtaaaggaactaggcttgcatatgttgcacctacaataccaagacgactagccagtacatctgacattgaagagaaagaaaacagagattcttcaagtttgcgaacaagtagttcatatacaaggagaaaatgggaagatgatcttaaaaaaaatagctcagttaatgaaggatcaacgtatcataaaagttgctcctttggtagaagacaagatgatttgattagttctagtgttccaagcaccacatcaacaccaacagttacctctgcagctgggcttcagaaaagcctgctttccagcacaagcactactacaaagattacaacgggttcttcctcagcaggcacacaaagcagtacctcaaatcgtttgtgggctgaggatagtactgagaaagaaaaggacagtgttcctacggcagtgaccattcctgttgctccaactgttgtaaatgctgcagcttctaccacaaccctgactacaactactgctggcactgtctcctccacaacagaggtcagggagagacgcagatcatacctcactcctgttagggatgaagagtctgaatcccaaagaaaagcaagatctagacaagcaagacaatctagaagatcaacacagggagtgacattaactgatcttcaagaagctgagaaaacaataggaagaagtcgttctacccgaaccagagaacaagaaaatgaagaaaaagaaaaagaggaaaaagagaaacaagataaagagaaacaagaagaaaagaaggagtcagaaacatctagagaagatgaatataaacaaaagtactccagaacgtatgatgagacttaccagcgttataggccagtatcaacttcaagttcaaccactccatcctcttcactttctactatgagcagttcactgtatgcttcaagtcaactaaacaggccaaatagtcttgtaggcataacttctgcttactccagaggaataacaaaagaaaatgaaagagagggagaaaaaagagaagaggagaaagaaggagaagataaatcacaacctaaatcaatcagagaacgacgacgaccaagagagaaaagaagatctacaggagtttcattttggacacaagatagtgatgaaaatgaacaagaacaacaatcagacacagaagagggatccaataagaaagaaactcagacggattccatttctagatatgaaaccagttctacatcagctggtgatcgatatgattccttgctgggtcgctctggatcatacagttacttagaagaaagaaaaccttacagcagcaggctagaaaaggatgactcaactgactttaaaaagagacaagaaagatttgctgatagatcactgttggaaatggaaaaaagggaacgaagagctctagaaagaagaatatctgaaatggaagaagagctcaaaatgttaccagacctaaaagcagacaaccagaggctaaaggatgaaaatggggccttgatcagagttataagcaaactttccaaataaaaaaaaaaaaagcagcaagtaatggaattgcacatattagtaacccagtggaccataattggcagtcactggaagtctgggaagaatccttggagactgtcattttcggatatcctgccaaatgccctcttatctagaatttttgtttcattttgtttaattttctggggtgtttttgttgttgttggtttgttttttgttttttttttttaatcaagaccattgtttcatgttaatgcagctgctgagaagatttttttttaatgactgagaaaacttgtttacagctccagcatataaggaaagtgttcaaggccagatatgcctcagatatttaaccagtaagccttagttgtacataaatacttttgtgtcaacaaaaactttcagctctcacagaagacagttactcaacattttttgatgtgccacagtttcgagtttttcgatatttaaattttttggcttttcatctaagtttgggtttgtattttttccttctaaactcttcatgtggcagagtcttctatgttttcacagctttttcattacagaaaagaacacttgctcttctgtgattattgtcatgtattaggctaatgctgtgttgtctcccacctggaactgaattgcttggtggaacatatgctttcactgtttgtgcaatatgcatttatttcttatatgaatgctttaaagtcatttgaggttagatcttttaattcctattttctgcttcattggtcactttttttttattgtagtataagatgttagattctgtaatcttcacattcattttagcaggtactgagtgatgctgtatatacaaataagtgtattgttttgatttttagaccaccacatggcatgcttgactatttcttatttcaaatgtctgctaatgcagagtaggctactccatgatagtgttaaaaaacaaaatttgctaacaatgtgatataaagactttaaaagttacacattatgtggagccctatctttacaaaagtttcctactgtaaagtgcttttattttcagttttcacttgatagtactcaaccataattaaagttgcataagataattgctttacatttcacatacctatatttatctgagtgctgtctaaaactgttgtgctagccaaagtaatgctatgaaatcatttgcagaattaacccgtgagttaatgttaaatgcactgttattgccatgtgaagaggcatcgactttgataccaccatcatgttcagaccattttatacatttcagtggcctttttttttttttaaggaaaaaaaagcgcaaaaccaagtacatagtgacgatggcttttatttggacaaatagcttttatattttcattaaaccatgcaaaaaatactacatctttctggcacataactgtctccttaaccactgaacagttcagccatttgaataaattgtacattgtaaagcttatagtagctgattgtattattgattgtattgtatactatattaaatgtgaatttgt

SEQ ID NO: 170995 - DNA, 2275 bp, Homo sapiens
  Payload ID: 13643
  Gene Symbol: PPP1R12A
  Gene Name: protein phosphatase 1, regulatory subunit 12A
  ENST ID: ENST00000547330
  CDS Start-End: 200-2275
aagggaggtccgctcggccgggtgcgccgccccagtgctctgtgggatactggaagtctcgagcgtcggctccgggttcccagccctcctctggcccgcactcatagaaacattcacacaccccctgcctcccctctcttccctctccgcctcccccttccccccctcgcgataagaagacccggcggcaggagaggggatgaagatggcggacgcgaagcagaagcggaacgagcagctgaaacgctggatcggctccgagacggacctcgagcctccggtggtgaagcgccagaagaccaaggtgaagttcgacgatggcgccgtcttcctggctgcttgctccagcggcgacacggacgaggtcctcaagctgctgcaccgcggcgccgacatcaattacgccaatgtggacggactcactgccctgcaccaggcttgcattgatgacaatgttgatatggtgaagtttctggtagaaaatggagcaaatattaatcaacctgataatgaaggctggataccactacatgcagcagcttcctgtggatatcttgatattgcagagtttttgattggtcaaggagcacatgtaggggctgtcaacagtgaaggagatacacctttagatattgcggaggaggaggcaatggaagagctacttcaaaatgaagttaatcggcaaggggttgatatagaagcagctcgaaaggaagaagaacggatcatgcttagagatgccaggcagtggctaaatagtggtcatataaatgatgtccggcatgcaaaatctggaggtacagcacttcacgttgcagctgctaaaggctatacggaagttttaaaacttttaatacaggcaggctatgatgttaatattaaagactatgatggctggacacctcttcatgctgcagctcattggggtaaagaagaagcatgtcgaattttagtggacaatctgtgtgatatggagatggtcaacaaagtgggccaaacagcctttgatgtagcagatgaagacattttaggatatttagaagagttgcaaaagaaacaaaatctgctccatagtgaaaaacgggacaagaaatctccactaattgaatcaacagcaaatatggacaataatcagtcacagaagacctttaaaaacaaagagacgttgattattgaaccagagaaaaatgcatcccgtattgaatctctggaacaagaaaaggttgatgaagaagaagaaggaaagaaggatgagtctagctgctctagtgaagaagatgaggaagatgactcggaatcagaagctgaaacagataagacaaaacccctggcttctgtaactaatgccaacacttctagtacacaagcagctcctgtagctgttacaacacctactgtgtcatcaggtcaagcaacacctacatcacctattaaaaagtttccaaccacagctacaaaaatttctcccaaagaagaagagagaaaagatgagtctcctgcaacttggaggttaggacttagaaagacgggcagctatggtgcacttgctgaaatcacagcatctaaagagggtcagaaagaaaaagatactgcaggtgttacacgttcagcttcaagtcccagactttcctcctctttggataataaagaaaaggagaaagatagtaaaggaactaggcttgcatatgttgcacctacaataccaagacgactagccagtacatctgacattgaagagaaagaaaacagagattcttcaagtttgcgaacaagtagttcatatacaaggagaaaatgggaagatgatcttaaaaaaaatagctcagttaatgaaggatcaacgtatcataaaagttgctcctttggtagaagacaagatgatttgattagttctagtgttccaagcaccacatcaacaccaacagttacctctgcagctgggcttcagaaaagcctgctttccagcacaagcactactacaaagattacaacgggttcttcctcagcaggcacacaaagcagatcatacctcactcctgttagggatgaagagtctgaatcccaaagaaaagcaagatctagacaagcaagacaatctagaagatcaacacagggagtgacattaactgatcttcaagaagctgagaaaacaataggaagaagtcgttctacccgaaccagagaacaagaaaatgaagaaaaagaaaaagaggaaaaagagaaacaagataaagagaaacaagaagaaaagaaggagtcagaaacatctagagaa

SEQ ID NO: 170996 - DNA, 2925 bp, Homo sapiens
  Payload ID: 13643
  Gene Symbol: PPP1R12A
  Gene Name: protein phosphatase 1, regulatory subunit 12A
  Uniprot ID: O14974
  ENST ID: ENST00000550107
  CDS Start-End: 1-2925
atgaagatggcggacgcgaagcagaagcggaacgagcagctgaaacgctggatcggctccgagacggacctcgagcctccggtggtgaagcgccagaagaccaaggtgaagttcgacgatggcgccgtcttcctggctgcttgctccagcggcgacacggacgaggtcctcaagctgctgcaccgcggcgccgacatcaattacgccaatgtggacggactcactgccctgcaccaggcttgcattgatgacaatgttgatatggtgaagtttctggtagaaaatggagcaaatattaatcaacctgataatgaaggctggataccactacatgcagcagcttcctgtggatatcttgatattgcagagtttttgattggtcaaggagcacatgtaggggctgtcaacagtgaaggagatacacctttagatattgcggaggaggaggcaatggaagagctacttcaaaatgaagttaatcggcaaggggttgatatagaagcagctcgaaaggaagaagaacggatcatgcttagagatgccaggcagtggctaaatagtggtcatataaatgatgtccggcatgcaaaatctggaggtacagcacttcacgttgcagctgctaaaggctatacggaagttttaaaacttttaatacaggcaggctatgatgttaatattaaagactatgatggctggacacctcttcatgctgcagctcattggggtaaagaagaagcatgtcgaattttagtggacaatctgtgtgatatggagatggtcaacaaagtgggccaaacagcctttgatgtagcagatgaagacattttaggatatttagaagagttgcaaaagaaacaaaatctgctccatagtgaaaaacgggacaagaaatctccactaattgaatcaacagcaaatatggacaataatcagtcacagaagacctttaaaaacaaagagacgttgattattgaaccagagaaaaatgcatcccgtattgaatctctggaacaagaaaaggttgatgaagaagaagaaggaaagaaggatgagtctagctgctctagtgaagaagatgaggaagatgactcggaatcagaagctgaaacagataagacaaaacccctggcttctgtaactaatgccaacacttctagtacacaagcagctcctgtagctgttacaacacctactgtgtcatcaggtcaagcaacacctacatcacctattaaaaagtttccaaccacagctacaaaaatttctcccaaagaagaagagagaaaagatgagtctcctgcaacttggaggttaggacttagaaagacgggcagctatggtgcacttgctgaaatcacagcatctaaagagggtcagaaagaaaaagatactgcaggtgttacacgttcagcttcaagtcccagactttcctcctctttggataataaagaaaaggagaaagatagtaaaggaactaggcttgcatatgttgcacctacaataccaagacgactagccagtacatctgacattgaagagaaagaaaacagagattcttcaagtttgcgaacaagtagttcatatacaaggagaaaatgggaagatgatcttaaaaaaaatagctcagttaatgaaggatcaacgtatcataaaagtacctcaaatcgtttgtgggctgaggatagtactgagaaagaaaaggacagtgttcctacggcagtgaccattcctgttgctccaactgttgtaaatgctgcagcttctaccacaaccctgactacaactactgctggcactgtctcctccacaacagaggtcagggagagacgcagatcatacctcactcctgttagggatgaagagtctgaatcccaaagaaaagcaagatctagacaagcaagacaatctagaagatcaacacagggagtgacattaactgatcttcaagaagctgagaaaacaataggaagaagtcgttctacccgaaccagagaacaagaaaatgaagaaaaagaaaaagaggaaaaagagaaacaagataaagagaaacaagaagaaaagaaggagtcagaaacatctagagaagatgaatataaacaaaagtactccagaacgtatgatgagacttaccagcgttataggccagtatcaacttcaagttcaaccactccatcctcttcactttctactatgagcagttcactgtatgcttcaagtcaactaaacaggccaaatagtcttgtaggcataacttctgcttactccagaggaataacaaaagaaaatgaaagagagggagaaaaaagagaagaggagaaagaaggagaagataaatcacaacctaaatcaatcagagaacgacgacgaccaagagagaaaagaagatctacaggagtttcattttggacacaagatagtgatgaaaatgaacaagaacaacaatcagacacagaagagggatccaataagaaagaaactcagacggattccatttctagatatgaaaccagttctacatcagctggtgatcgatatgattccttgctgggtcgctctggatcatacagttacttagaagaaagaaaaccttacagcagcaggctagaaaaggatgactcaactgactttaaaaagctttatgaacaaattctagctgaaaatgaaaagctgaaggcacagctacatgatacaaatatggaactaacagatcttaaattacagttggaaaaggccacccagagacaagaaagatttgctgatagatcactgttggaaatggaaaaaagggaacgaagagctctagaaagaagaatatctgaaatggaagaagagctcaaaatgttaccagacctaaaagcagacaaccagaggctaaaggatgaaaatggggccttgatcagagttataagcaaactttccaaataa

SEQ ID NO: 170997 - DNA, 1101 bp, Homo sapiens
  Payload ID: 13643
  Gene Symbol: PPP1R12A
  Gene Name: protein phosphatase 1, regulatory subunit 12A
  ENST ID: ENST00000553081
  CDS Start-End: 1-1101
cacctactgtgtcatcaggtcaagcaacacctacatcacctattaaaaagtttccaaccacagctacaaaaatttctcccaaagaagaagagagaaaagatgagtctcctgcaacttggaggttaggacttagaaagacgggcagctatggtgcacttgctgaaatcacagcatctaaagagggtcagaaagaaaaagatactgcaggtgttacacgttcagcttcaagtcccagactttcctcctctttggataataaagaaaaggagaaagatagtaaaggaactaggcttgcatatgttgcacctacaataccaagacgactagccagtacatctgacattgaagagaaagaaaacagagattcttcaagtttgcgaacaagtagttcatatacaaggagaaaatgggaagatgatcttaaaaaaaatagctcagttaatgaaggatcaacgtatcataaaagttctagtgttccaagcaccacatcaacaccaacagttacctctgcagctgggcttcagaaaagcctgctttccagcacaagcactactacaaagattacaacgggttcttcctcagcaggcacacaaagcagtacctcaaatcgtttgtgggctgaggatagtactgagaaagaaaaggacagtgttcctacggcagtgaccattcctgttgctccaactgttgtaaatgctgcagcttctaccacaaccctgactacaactactgctggcactgtctcctccacaacagaggtcagggagagacgcagatcatacctcactcctgttagggatgaagagtctgaatcccaaagaaaagcaagatctagacaagcaagacaatctagaagatcaacacagggagtgacattaactgatcttcaagaagctgagaaaacaataggaagaagtcgttctacccgaaccagagaacaagaaaatgaagaaaaagaaaaagaggaaaaagagaaacaagataaagagaaacaagaagaaaagaaggagtcagaaacatctagagaagatgaatataaacaaaagtactccagaacgtatgatgagacttaccagcgttataggccagtatcaacttcaa

SEQ ID NO: 170998 - DNA, 631 bp, Homo sapiens
  Payload ID: 13643
  Gene Symbol: PPP1R12A
  Gene Name: protein phosphatase 1, regulatory subunit 12A
  ENST ID: ENST00000550510
  CDS Start-End: 1-631
ggactcactgccctgcaccaggcttgcattgatgacaatgttgatatggtgaagtttctggtagaaaatggagcaaatattaatcaacctgataatgaaggctggataccactacatgcagcagcttcctgtggatatcttgatattgcagagtttttgattggtcaaggagcacatgtaggggctgtcaacagtgaaggagatacacctttagatattgcggaggaggaggcaatggaagagctacttcaaaatgaagttaatcggcaaggggttgatatagaagcagctcgaaaggaagaagaacggatcatgcttagagatgccaggcagtggctaaatagtggtcatataaatgatgtccggcatgcaaaatctggaggtacagcacttcacgttgcagctgctaaaggctatacggaagttttaaaacttttaatacaggcaggctatgatgttaatattaaagactatgatggctggacacctcttcatgctgcagctcattggggtaaagaagaagcatgtcgaattttagtggacaatctgtgtgatatggagatggtcaacaaagtgctccatagtgaaaaacgggacaagaaatctccactaattgaatcaacagcaaata

SEQ ID NO: 170999 - DNA, 2977 bp, Homo sapiens
  Payload ID: 13643
  Gene Symbol: PPP1R12A
  Gene Name: protein phosphatase 1, regulatory subunit 12A
  Uniprot ID: O14974
  ENST ID: ENST00000546369
  CDS Start-End: 140-2971
atcatatgcttgtaagagaatgagagtattaaccttgtagacttctgtaaggggctaagagaaacactgagctaaataattgaggggatatactatgttcatggcttgaaagactgcttgcattgatgacaatgttgatatggtgaagtttctggtagaaaatggagcaaatattaatcaacctgataatgaaggctggataccactacatgcagcagcttcctgtggatatcttgatattgcagagtttttgattggtcaaggagcacatgtaggggctgtcaacagtgaaggagatacacctttagatattgcggaggaggaggcaatggaagagctacttcaaaatgaagttaatcggcaaggggttgatatagaagcagctcgaaaggaagaagaacggatcatgcttagagatgccaggcagtggctaaatagtggtcatataaatgatgtccggcatgcaaaatctggaggtacagcacttcacgttgcagctgctaaaggctatacggaagttttaaaacttttaatacaggcaggctatgatgttaatattaaagactatgatggctggacacctcttcatgctgcagctcattggggtaaagaagaagcatgtcgaattttagtggacaatctgtgtgatatggagatggtcaacaaagtgggccaaacagcctttgatgtagcagatgaagacattttaggatatttagaagagttgcaaaagaaacaaaatctgctccatagtgaaaaacgggacaagaaatctccactaattgaatcaacagcaaatatggacaataatcagtcacagaagacctttaaaaacaaagagacgttgattattgaaccagagaaaaatgcatcccgtattgaatctctggaacaagaaaaggttgatgaagaagaagaaggaaagaaggatgagtctagctgctctagtgaagaagatgaggaagatgactcggaatcagaagctgaaacagataagacaaaacccctggcttctgtaactaatgccaacacttctagtacacaagcagctcctgtagctgttacaacacctactgtgtcatcaggtcaagcaacacctacatcacctattaaaaagtttccaaccacagctacaaaaatttctcccaaagaagaagagagaaaagatgagtctcctgcaacttggaggttaggacttagaaagacgggcagctatggtgcacttgctgaaatcacagcatctaaagagggtcagaaagaaaaagatactgcaggtgttacacgttcagcttcaagtcccagactttcctcctctttggataataaagaaaaggagaaagatagtaaaggaactaggcttgcatatgttgcacctacaataccaagacgactagccagtacatctgacattgaagagaaagaaaacagagattcttcaagtttgcgaacaagtagttcatatacaaggagaaaatgggaagatgatcttaaaaaaaatagctcagttaatgaaggatcaacgtatcataaaagttgctcctttggtagaagacaagatgatttgattagttctagtgttccaagcaccacatcaacaccaacagttacctctgcagctgggcttcagaaaagcctgctttccagcacaagcactactacaaagattacaacgggttcttcctcagcaggcacacaaagcagtacctcaaatcgtttgtgggctgaggatagtactgagaaagaaaaggacagtgttcctacggcagtgaccattcctgttgctccaactgttgtaaatgctgcagcttctaccacaaccctgactacaactactgctggcactgtctcctccacaacagaggtcagggagagacgcagatcatacctcactcctgttagggatgaagagtctgaatcccaaagaaaagcaagatctagacaagcaagacaatctagaagatcaacacagggagtgacattaactgatcttcaagaagctgagaaaacaataggaagaagtcgttctacccgaaccagagaacaagaaaatgaagaaaaagaaaaagaggaaaaagagaaacaagataaagagaaacaagaagaaaagaaggagtcagaaacatctagagaagatgaatataaacaaaagtactccagaacgtatgatgagacttaccagcgttataggccagtatcaacttcaagttcaaccactccatcctcttcactttctactatgagcagttcactgtatgcttcaagtcaactaaacaggccaaatagtcttgtaggcataacttctgcttactccagaggaataacaaaagaaaatgaaagagagggagaaaaaagagaagaggagaaagaaggagaagataaatcacaacctaaatcaatcagagaacgacgacgaccaagagagaaaagaagatctacaggagtttcattttggacacaagatagtgatgaaaatgaacaagaacaacaatcagacacagaagagggatccaataagaaagaaactcagacggattccatttctagatatgaaaccagttctacatcagctggtgatcgatatgattccttgctgggtcgctctggatcatacagttacttagaagaaagaaaaccttacagcagcaggctagaaaaggatgactcaactgactttaaaaagctttatgaacaaattctagctgaaaatgaaaagctgaaggcacagctacatgatacaaatatggaactaacagatcttaaattacagttggaaaaggccacccagagacaagaaagatttgctgatagatcactgttggaaatggaaaaaagggaacgaagagctctagaaagaagaatatctgaaatggaagaagagctcaaaatgttaccagacctaaaagcagacaaccagaggctaaaggatgaaaatggggccttgatcagagttataagcaaactttccaaataaaaaaaa

SEQ ID NO: 171000 - DNA, 959 bp, Homo sapiens
  Payload ID: 13643
  Gene Symbol: PPP1R12A
  Gene Name: protein phosphatase 1, regulatory subunit 12A
  ENST ID: ENST00000550903
  CDS Start-End: 1-486
gagtcagaaacatctagagaagatgaatataaacaaaagtactccagaacgtatgatgagacttaccagcgttataggccagtatcaacttcaagttcaaccactccatcctcttcactttctactatgagcagttcactgtatgcttcaagtcaactaaacaggccaaatagtcttgtaggcataacttctgcttactccagaggaataacaaaagaaaatgaaagagagggagaaaaaagagaagaggagaaagaaggagaagataaatcacaacctaaatcaatcagagaacgacgacgaccaagagagaaaagaagatctacaggagtttcattttggacacaagatagtgatgaaaatgaacaagaacaacaatcagacacagaagagggatccaataagaaagaaactcagacggattccatttctagccctgtaagaccagtaataaatttctgtctactgatgattctattgaattgaaatgcagagccaatggcatctttcagaaaagatatgaaaccagttctacatcagctggtgatcgatatgattccttgctgggtcgctctggatcatacagttacttagaagaaagaaaaccttacagcagcaggctagaaaaggatgactcaactgactttaaaaagctttatgaacaaattctagctgaaaatgaaaagctgaaggcacagctacatgatacaaatatggaactaacagatcttaaattacagttggaaaaggccacccagagacaagaaagatttgctgatagatcactgttggaaatggaaaaaagggaacgaagagctctagaaagaagaatatctgaaatggaagaagagctcaaaatgttaccagacctaaaagcagacaaccagaggctaaaggatgaaaatggggccttgatcagagttataagcaaactttccaaataaaaaaaaaaaaagcag

SEQ ID NO: 171001 - DNA, 683 bp, Homo sapiens
  Payload ID: 13643
  Gene Symbol: PPP1R12A
  Gene Name: protein phosphatase 1, regulatory subunit 12A
  ENST ID: ENST00000550299
  CDS Start-End: 1-566
atgaaagagagggagaaaaaagagaagaggagaaagaaggagaagataaatcacaacctaaatcaatcagagaacgacgacgaccaagagagaaaagaagatctacaggagtttcattttggacacaagatagtgatgaaaatgaacaagaacaacaatcagacacagaagagggatccaataagaaagaaactcagacggattccatttctagatatgaaaccagttctacatcagctggtgatcgatatgattccttgctgggtcgctctggatcatacagttacttagaagaaagaaaaccttacagcagcaggctagaaaaggatgactcaactgactttaaaaagctttatgaacaaattctagctgaaaatgaaaagctgaaggcacagctacatgatacaaatatggaactaacagatcttaaattacagttggaaaaggccacccagagacaagaaagatttgctgatagatcactgttggaaatggaaaaaagggtgaccggcaagagtcagtatcttctgggcggaacgaagagctctagaaagaagaatatctgaaatggaagaagagctcaaaatgttaccagacctaaaagcagacaaccagaggctaaaggatgaaaatggggccttgatcagagttataagcaaactttccaaataaaaaaaaaaaaa

SEQ ID NO: 171002 - DNA, 582 bp, Homo sapiens
  Payload ID: 13643
  Gene Symbol: PPP1R12A
  Gene Name: protein phosphatase 1, regulatory subunit 12A
  ENST ID: ENST00000548318
  CDS Start-End: 292-582
cctgataatgaaggctggataccactacatgcagcagcttcctgtggatatcttgatattgcagagtgtcaacaggcagaggtgggaactgaacccgaagtctgcagagcataaaagtttctgcttttttcacccctccaacctttgaattgcttttggagactatttatggtagataagaattaatccaccataggattaatcagtccgtttttgattggtcaaggagcacatgtaggggctgtcaacagtgaaggagatacacctttagatattgcggaggaggaggcaatggaagagctacttcaaaatgaagttaatcggcaaggggttgatatagaagcagctcgaaaggaagaagaacggatcatgcttagagatgccaggcagtggctaaatagtggtcatataaatgatgtccggcatgcaaaatctggaggtacagcacttcacgttgcagctgctaaaggctatacggaagttttaaaacttttaatacaggcaggctatgatgttaatattaaagactatgatggctggacacctcttcatgctgcagctcattggggtaaagaagaagca

SEQ ID NO: 171003 - DNA, 1257 bp, Homo sapiens
  Payload ID: 13643
  Gene Symbol: PPP1R12A
  Gene Name: protein phosphatase 1, regulatory subunit 12A
  ENST ID: ENST00000546762
  CDS Start-End: 1-703
agaagatgaatataaacaaaagtactccagaacgtatgatgagacttaccagcgttataggccagtatcaacttcaagttcaaccactccatcctcttcactttctactatgagcagttcactgtatgcttcaagtcaactaaacaggccaaatagtcttgtaggcataacttctgcttactccagaggaataacaaaagaaaatgaaagagagggagaaaaaagagaagaggagaaagaaggagaagataaatcacaacctaaatcaatcagagaacgacgacgaccaagagagaaaagaagatctacaggagtttcattttggacacaagatagtgatgaaaatgaacaagaacaacaatcagacacagaagagggatccaataagaaagaaactcagacggattccatttctagatatgaaaccagttctacatcagctggtgatcgatatgattccttgctgggtcgctctggatcatacagttacttagaagaaagaaaaccttacagcagcaggctagaaaaggatgactcaactgactttaaaaagctttatgaacaaattctagctgaaaatgaaaagctgaaggcacagctacatgatacaaatatggaactaacagatcttaaattacagttggaaaaggccacccagagctctccagtacaggatacaacagagacaagaaagatttgctgatagatcactgttggaaatggaaaaaagggaacgaagagctctagaaagaagaatatctgaaatggaagaagagctcaaaatgttaccagacctaaaagcagacaaccagaggctaaaggatgaaaatggggccttgatcagagttataagcaaactttccaaataaaaaaaaaaaaagcagcaagtaatggaattgcacatattagtaacccagtggaccataattggcagtcactggaagtctgggaagaatccttggagactgtcattttcggatatcctgccaaatgccctcttatctagaatttttgtttcattttgtttaattttctggggtgtttttgttgttgttggtttgttttttgttttttttttttaatcaagaccattgtttcatgttaatgcagctgctgagaagatttttttttaatgactgagaaaacttgtttacagctccagcatataaggaaagtgttcaaggccagatatgcctcagatatttaaccagtaagccttagttgtacataaatacttttgtgtcaacaaaaactttc

SEQ ID NO: 171004 - DNA, 897 bp, Homo sapiens
  Payload ID: 13643
  Gene Symbol: PPP1R12A
  Gene Name: protein phosphatase 1, regulatory subunit 12A
  ENST ID: ENST00000547131
  CDS Start-End: 1-897
gcaaatatggacaataatcagtcacagaagacctttaaaaacaaagagacgttgattattgaaccagagaaaaatgcatcccgtattgaatctctggaacaagaaaaggttgatgaagaagaagaaggaaagaaggatgagtctagctgctctagtgaagaagatgaggaagatgactcggaatcagaagctgaaacagataagacaaaacccctggcttctgtaactaatgccaacacttctagtacacaagcagctcctgtagctgttacaacacctactgtgtcatcaggtcaagcaacacctacatcacctattaaaaagtttccaaccacagctacaaaaatttctcccaaagaagaagagagaaaagatgagtctcctgcaacttggaggttaggacttagaaagacgggcagctatggtgcacttgctgaaatcacagcatctaaagagggtcagaaagaaaaagatactgcaggtgttacacgttcagcttcaagtcccagactttcctcctctttggataataaagaaaaggagaaagatagtaaaggaactaggcttgcatatgttgcacctacaataccaagacgactagccagtacatctgacattgaagagaaagaaaacagagattcttcaagtttgcgaacaagtagttcatatacaaggagaaaatgggaagatgatcttaaaaaaaatagctcagttaatgaaggatcaacgtatcataaaagatcatacctcactcctgttagggatgaagagtctgaatcccaaagaaaagcaagatctagacaagcaagacaatctagaagatcaacacagggagtgacattaactgatcttcaagaagctgagaaaacaataggaagaagtcgttctacccgaacc

SEQ ID NO: 171005 - DNA, 560 bp, Homo sapiens
  Payload ID: 13643
  Gene Symbol: PPP1R12A
  Gene Name: protein phosphatase 1, regulatory subunit 12A
  ENST ID: ENST00000634739
  CDS Start-End: 1-303
cgatatgattccttgctgggtcgctctggatcatacagttacttagaagaaagaaaaccttacagcagcaggctagaaaaggatgactcaactgactttaaaaagctttatgaacaaattctagctgaaaatgaaaagctgaaggcacagctacatgatacaaatatggaactaacagatcttaaattacagttggaaaaggccacccagagacaagaaagatttgctgatagatcactgttggaaatggaaaaaagggtgaccggcaagagaacgaagagctctagaaagaagaatatctgaaatggaagaagagctcaaaatgttaccagacctaaaagcagacaaccagaggctaaaggatgaaaatggggccttgatcagagttataagcaaactttccaaataaaaaaaaaaaaagcagcaagtaatggaattgcacatattagtaacccagtggaccataattggcagtcactggaagtctgggaagaatccttggagactgtcattttcggatatcctgccaaatgccctcttatctagaatttttgtttcat

SEQ ID NO: 171006 - DNA, 1687 bp, Homo sapiens
  Payload ID: 13644
  Gene Symbol: PPP1R12B
  Gene Name: protein phosphatase 1, regulatory subunit 12B
  Uniprot ID: O60237
  ENST ID: ENST00000356764
  CDS Start-End: 125-1285
cggcgcgagggtctccgccctctgctccgggctgaagcgctctgagagaggcggcagcggcaactcgagccccaacagtaatttagtgttggtagttttggcagcagctgccgaggccggagcaatggcggaactggagcacctaggagggaagcgggcagagtcggcgcgaatgcggcgggcagagcagcttcggcgctggcggggctcgctgacagagcaggagcctgcggagcgacgaggcgcggggcggcagccgctgaccaggcgcgggagccccagggtccgcttcgaggacggtgctgtctttctggccgcctgctctagcggggacaccgacgaggtgagaaagcttctggcaagaggtgctgatatcaacacggtcaacgtggacggcttgacagccctgcaccaggcatgtattgatgaaaatttggacatggtgaagtttctggtggagaacagagccaatgtaaaccagcaagacaacgagggctggacaccccttcatgcagcagcttcctgtggctatctcaacatagcagagtatttcattaatcacggagccagtgtaggtattgtcaatagtgaaggtgaagttccctctgaccttgcagaagagccagccatgaaggatcttcttctggagcaagtaaagaagcaaggagttgatctagagcagtcaagaaaagaagaagagcagcagatgttgcaggatgcccgccagtggctcaacagtgggaaaatagaggatgtgaggcaggctcgctcaggggctacagcccttcatgtggctgctgccaagggctactctgaagtcctcagacttttaattcaggctggctatgaactcaatgttcaggattatgatggctggactcccctccatgctgctgcacactggggagtgaaggaggcttgctccatcctggcagaagcactttgtgacatggatattcgaaataaactgggccagacaccatttgatgtggctgatgagggtctcgtggagcatttggagttgctccagaagaagcagaatgtgcttcgaagtgaaaaggagacacggaataaactcattgagtcagatctgaacagcaagattcagagtgggttctttaagaacaaagagaagatgctctatgaggaggagacacctaagtcccaagaaatggaggaagaaaataaagaatctagtagctccagctcagaggaggaggaaggtgaagatgaagcttctgagtcagaaactgagaaggaggcagttctcttctggcctttttaacaagccagaagagcccaaagatgaatctccttcttcatggagattgggactgagaaaaactggcagccacaacatgctgagtgaggtggccaattccagggaacctataagggaccgaggctcttccatctatcgctcctcttcaagccctcggatttctgctctactggacaacaaagataaggtgcagtttgggagggtatgggggaattccaaggcagttttttttttccatgaaaattcaatcttaggaacaaatgaaaatattttctagtccttaagttgattttggaaatgcaaagtctttaaagagagagaggcacactgatagtttattcaagtagctatttgcttgctattgtttgcttgaccaaaaaagaaaataaaaaagctttaaaaata

SEQ ID NO: 171007 - DNA, 15431 bp, Homo sapiens
  Payload ID: 13644
  Gene Symbol: PPP1R12B
  Gene Name: protein phosphatase 1, regulatory subunit 12B
  ENST ID: ENST00000391959
  CDS Start-End: 154-3285
ggtactactggcgggaggagtaaagatggcggcgcgagggtctccgccctctgctccgggctgaagcgctctgagagaggcggcagcggcaactcgagccccaacagtaatttagtgttggtagttttggcagcagctgccgaggccggagcaatggcggaactggagcacctaggagggaagcgggcagagtcggcgcgaatgcggcgggcagagcagcttcggcgctggcggggctcgctgacagagcaggagcctgcggagcgacgaggcgcggggcggcagccgctgaccaggcgcgggagccccagggtccgcttcgaggacggtgctgtctttctggccgcctgctctagcggggacaccgacgaggtgagaaagcttctggcaagaggtgctgatatcaacacggtcaacgtggacggcttgacagccctgcaccaggcatgtattgatgaaaatttggacatggtgaagtttctggtggagaacagagccaatgtaaaccagcaagacaacgagggctggacaccccttcatgcagcagcttcctgtggctatctcaacatagcagagtatttcattaatcacggagccagtgtaggtattgtcaatagtgaaggtgaagttccctctgaccttgcagaagagccagccatgaaggatcttcttctggagcaagtaaagaagcaaggagttgatctagagcagtcaagaaaagaagaagagcagcagatgttgcaggatgcccgccagtggctcaacagtgggaaaatagaggatgtgaggcaggctcgctcaggggctacagcccttcatgtggctgctgccaagggctactctgaagtcctcagacttttaattcaggctggctatgaactcaatgttcaggattatgatggctggactcccctccatgctgctgcacactggggagtgaaggaggcttgctccatcctggcagaagcactttgtgacatggatattcgaaataaactgggccagacaccatttgatgtggctgatgagggtctcgtggagcatttggagttgctccagaagaagcagaatgtgcttcgaagtgaaaaggagacacggaataaactcattgagtcagatctgaacagcaagattcagagtgggttctttaagaacaaagagaagatgctctatgaggaggagacacctaagtcccaagaaatggaggaagaaaataaagaatctagtagctccagctcagaggaggaggaaggtgaagatgaagcttctgagtcagaaactgagaaggaggcagataaaaagccagaagcctttgtcaatcattccaactctgaaagcaagagtagtatcacagagcagataccagcaccagctcaaaataccttctctgcctcttctgctaggaggttctcttctggcctttttaacaagccagaagagcccaaagatgaatctccttcttcatggagattgggactgagaaaaactggcagccacaacatgctgagtgaggtggccaattccagggaacctataagggaccgaggctcttccatctatcgctcctcttcaagccctcggatttctgctctactggacaacaaagataaggagagagaaaacaaaagctatattagttcactagcaccccggaagctcaacagcacaagtgatattgaagaaaaggagaacagagaatcagctgttaatctagtgaggagtggctcctatacccggcagctatggagggatgaagcaaaaggaaatgaaatcccacagacaattgctccctccacctatgtatcaacttacttgaaaagtgcttcatttggtagaagtagtgaccccacaagtccctacatttcagccaatcgcaattcatctcctgctacctcacccattaccattggttcatctacctctcggggcagccagtggcaacctgcctcttcttgccctgcaccaatcagtgcaaacactactgcatctgtacatcatggcaggactcctcacaaatcccaggccgacacaacagcagagaaaacagcagacaatgtctcttctagcaccccgctctgtgtgatcaccaatcgccctcttcctagcactgccaatggggttacagctactcctgtgctctccattactggaacagattcctctgtggaagccagggagaagaggaggtcctatctgactcctgtacgggatgaggaagcagagtctttacggaaagcacgctccagacaagctcggcagacacgaaggtctactcaaggtgtcaccctaacagaccttcaagaagcagaaaggacattcagccggtcgagggcagagaggcaagctcaggagcagcctcgtgagaagcccacagacactgaagggcttgaggggagccctgagaagcatgagccctcagcagttccagcaacagaagctggggagggccagcagccctggggcaggagtctggatgaagagcctatctgtcatcgcctgaggtgcccagctcagccagacaaacccaccacgccagcatctccttctacgtcaagaccctcactctacaccagttcccacctgctatggacaaatagattttcagtccctgattctgagagttcagagactaccacaaacactacaactgcaaaggaaatggacaaaaatgagaatgaagaagcagatttggatgagcagtcctctaagaggctgtccatccgagagaggaggcggcccaaggaacgacgaagaggcacaggcatcaatttctggacaaaggatgaggatgaaactgatggctctgaagaggtcaaagaaacgtggcatgaaagactttctaggttggaatcgggaggtagtaatcctacaaccagtgattcttacggtgaccgggcttcagcaagagcccgtcgggaggcccgggaggcccgcctagccaccctgaccagccgtgtagaagaagacagcaacagagattataaaaaactctatgagagtgctctgactgaaaaccaaaaactgaaaacaaaacttcaggaagcccagctagagctagcagatataaagtccaagcttgagaaggtggcccagcagaaacaagaaaagacctctgaccgatcatcagtgctggagatggagaaacgggagaggcgagccttggagcgcaaaatgtcagaaatggaggaagaaatgaaggtgttaacagaactgaaatccgacaaccagaggctgaaagatgaaaatggtgccctcatcagagtcatcagcaaactgtccaagtaggctaggctccagatttatgaggaaagaaagggacagcatttgctgcccccacccctcttttccagtccttgccttccaaccaaaagaaatggatgttttggtggaaggacacttctttctatcaccctcttcagtcacctctatacactctacattttctctgcactttcaatgccctgttcttccaaacccctatcccaagttttatgacagttttaattgaagcatgattgtggtaattcgagccatctggagaatgctctggggagtacaccaggctcagctgtggacccctcaacttcctgctgctcagctactttgtccacattggatttggtccaaacatgtaagacttctaccctaatcagtatccttcagctttttacattaacccagtgtcctctgatataggtgagtcttgtggtagccactccaggatcctgattggggtgccaagagaaacagcaggatgttgaattgatcatcagatgccctctggaatggttagcatccaaggtgacagtgactgcattgaggcgctctattcttcttcacctctcaggaactgacttttattttttctgtcaacacccagtaatctccctaactagttttaacccttattcctccctcatacctagccatttctccaaggcgcaaatggccctggcttcatttattcctttcctttctatccttttatatttttcccttccccaccccctcactcaatggtataaaagctaggacagagcacctgacctcagttgtctttggccattgtgggaagtcattattctggagacaagaaaatcatcactctggtgccttggtggcagcaccactgcctgctccctggaaggtagactatggcataagtgtcagctcattgttttcgtctcccacttatcttcccccttcaaagtgattttctttataagaaaatttgggctctgaatactccattctgcctcacttccttgaccttgttttcctctcttcgccctgacacctgcttctaatgagaaatgaagtcagtgcaaggaggaatgagaggtggggaggggagattgttgagagatggactaggaagtggaagcaggctggaaagacacatatggcgaaagtcaagtatctgaggccacttgcaacattgtgacaaagaagatggaagatagcagcctactgggctgtgagaatagtggtgaatttgattatttccagtggttagatttagcagagagatttactttcttagaaattaataggggaaatggcacttaatagaggtttaatggaatgaagtactttcaacccattgatgagagtcatggaagtttagagtggcaagacccagaggtcattaggtccagctttctattattgtgtcacagggacccctgctaccacagctttcacccatgggcatggtcaggtagcctctggtggctatgcatttattactcaaaagttgggcaactctaataacgagagagtttttcctcatatcagctgaagtctgcctgtggattctccttgtagtccagatctactatctgcaactctttaacggcacttgagatatgtgcagtgggtggtctccccctcagtcttactttgagctgctgttactctagtcctttaagtcattcctcatatggcatgcttttcttacctgtcacatcttggccatcctcctctagacaaaaccagcctttaaaatatcatgtccaggcctggaaagaatacaaatccagtgcaaaattaaaccattagttcttgatgataacctagcattaatacttacagtattttctttttgtaggagttttatcccttggttcacttgagtgtgcaagtcattaaatcctcatcattttagggttgccagtgatattcagtgtttagagtggttcattcccttaatatatactacctctgtctgttaattctttcctaacatgacatgtagctctccatggtcctccctctgaaacaccacatgctgtttaaactagaagctgtaattcaagatcccaattccaccaggtgcagtggctcatgcctgtaatcccagcacttcaggaggccgaggtggacagatcacgaggtcaggagttcgagaccatcctggctaacacggtgaaacccaatctctactaaaaatacaaaaaattagccaggcgtggtggcaggcgcctgtagtcccagctactcaggaggctgaggcaggagaatggcgtgaacccgggaggcggagcttgcagtgagccttgatcacgccactgcactccagcctgggtgacagagcaagactccatctcaaaaaaaataataataataaataaataaaaaatcccaattacagaacaggagatatgtttcctctgacaaaaccccatttttagagtgtataaaattctgtctttcatttccaaccatttttcaagagaagctgctactatcttgagacttcgtattatcatgggagtactgtaagttcagttctcagggaatgctaaattagagtaataagttttatatccttcattctgggagaggaaatcaacataaggtgttgactaattgattatcctggaacattttgaatattggggaaggaagatgatacttctttctcaagaaaagaaaattggattattaggaatacatcttgacccttttccactcaatagaccagggaaaggggttacagagagcctcctcagatctgtttgtgcctttcaaaagtactgggggcagattctcaaaactcttagattggtgttgcatccctgccacttcacatgacccttccatgttaaagctgacttttcttgccagaaagttttccttgtgacaagaaatttgcaagcttttcaatctcaggaatactggattctatagccaagaactcatgaaagtaagtgtaaactatcctaggtaatttcaggtactttctcttatgcaattaattttattaactgatttctggtctatctccagagataaaataccattccttcacaactgtattgtctggaagccccatgagatggtaattataggccttctactagccagcagttctctctggatactggcatcagcaggtctcctttttcttgtgctgcttggacaggtacctactgctggcctcttcagtggccacaatcctcagtcctcacctgctggtttggagactcatgagcaccccaggcagctcaagctgaataaatagctgcagacatggccaacaacatggggctcaggtctgtcacttaacttagagtctttacatgaaatatcagaatgggaaagagaatgttcctggtaaaactctgttttcattaatttgttatttttcaaaaaccgagccacacctttggaagtaatgatttggccattccagagattctggggctaaagtttgtttttccagggctgctgatccttttccagatagctccagagtatgatgaccccagccccatcccaatctctagcgaaagggttatgcaaatctcagggtgttgcctctaaagaatctaaagaatagacatgctttgggcttactcagtgtaccagattctctagtgggccattctcatttgatgttccctagaacctccctgtcttccaactgcaggatgtgtttacttctcttctgggcttcccctggtttctgtcctagttcccaccccaagtttaagaagacttagattcatttattgctatctgaggccactagtgagatttcagatctctcttttgcaacattttacccatttcccttccccaaaccatgtgcttattagatggttccactcaggaagcaaggaagctaaaactcaagttaatggtctgtggatcccacgaaagtgtgtgtaaactactgactgtttctccactagaggcatttaattgagccaaagatgatggaagaagaaactctcaaagccatgtactttgttaggtgtctggatttttggcctgtttgcagcctctcctagccacagacagacactgtctcctctcagagaaaggccagtgtttcggtccaggccactggtgagtgtcggcacccttgaggtgggcatggagtgagcagaagaagcctggagaagagagaactatttaaaagtgttgccagttattcagcttccaggcggctttgcacctccaaaggtgcaaaaaggaaaaagaaagcagaaaggattcagcatttaagcagaaagaaaagggaaattctactctaccagatgagccactggttccactggagcttatcagtgaagtaacactgcaggagccctggtatccttccctcagagatatcatcaggggccctcaaaccccattgtttatgccagcactgaccgcactttaagcacacacttaccaatcagaggtcgtgtaattggcctaaatctaggcccagttattactacaaatcttagtcaccatactctctcgcccaggctggagtgcagtggtgtgatctcagctcactgcaacctccacctcccaggctcaagggatcctctcacctcagctcccgagcagctaggactgcaggtgtgcaccaccatgcccagctaatttttgaatttttttgtagagatggggttttgccatgttgcccaggctggtctgaagctgctgggctcaagcaatccacctggctgggcctcccaaagcgataggattacaggcgtaagggcccacgcccagcctaccatactgattttcaaggcagggtctaacccttcataagatgtgagttcttccaacccaataagcaggcagctttgaggacaaaaaggcaacattaaaagataagaccctagaagtcagaacatctgtattccaaggccaccccttctccttttagtcatgtgactttgggcaggtcaccctccctgtctgtaaaatgaggttggactggataatctttatgtgccctttccttttggcttaaaattctgtgatttattcattcttaggaagatcagcatatttattgggatttctgcttcaaaaattctttctaacctcaaaaatccaagtccagaattttttgttttcttctggatttaaactgtttaatatgagcacatcaaggttgacttctcatcctttttgggaagtgaatttaatattgagggtaattgaatgatgttgcaatggctttccctcctgctggcttggtaagaatattaaagcctgcagaggtggaaattggagctcatggagaaatggatagaaagcaatttgttgcaggcagcctttggacaagttgttttaataggaaatagacctgctgcttcataggtttcctcaaccacctttcctcagctttcttaaaatgggatctacattggctcttcacacccaaatagcagactaatcgtttttctgcttagcaccgtctggttcattgtcttgaactctgccttacagcagcaagaaaattttcctcgacaagaacctcaatctttagttccattgagctccccctctggattttggacttaccagaagtaggaggttctgataccattcaagatggtctttccttcaaagcaggtctgaagaggagactaccaaagcagtgtttacaaacccagagtccacacaaccatattgcatagaacagcacttggctttcacaagcctcctacaggacctggtgtaattggagtgaaagggcagagaccctggaagtggaggtggctgtgtgctgcgatgggaagaaggcagaaggcccaggggctttggacatagagcagggtggaagctgcaagtactgggaaggaagagagtttcacagaaacaaagctttgtcacacagaaatgagttctgtctcactggtgacttcatccctcaggctccagctgagcagagattttaatcagcttccttaatgggtattgacactgctcaggaagcagtagaccctgtcagggacagctattgatcttttgtgttctgattagattggaaaatagatcaacttcattgtagtccaggaactgttggtcacagctactaggaatgaggtgatttctgagggctgagaaaaaacacagaatcttggccagcagccagcagctgcatggtgaaagatgcattcacttctcctttgagagttggggttgagggcaaacatagaacccaggtttggcttacaacccagtgtcccggaagccctccttcgggagaactgtaagtaagaggtgggtgtgtctaaagacaataccattaatgaatgttctggccttacctaaaaaggtttagcaatttggggataactcttggatctagcttatgtgcgttcacatgcacatttgctagcccagagcttttaaaatgaggtctggcatatacttgattacaaatgaaaactcagaaaccaattttatttattaaatcatatcttttgtttttccccctcccttctaatcccccaaaggacctatttgagctgttccccaattcatctgcttattttggaccatgaatctgccagagtgatattttctgttatttctcctccaaatttttccctgatgtttccaataaagatttacttgggtggccccttaaggtgacatcaggatgctcttatgtccttccagaataagcatacacttcactcctctccctttcatctccctctgcattcttaattccttgcttttctcacttggagccgagggtgctttagagaggtggttttccatgaatcagccaagattcctgtagaagttgggtataccaaccaccaccaccaccgccccctattccagtttcaaagctcctcggctatgctaatgtcccctcagagatgaggtttgacttttaggcccgtatgactcctccatagcctggccaaggagaccatgagtagccatgtctggtttactctttatcctgagactgtttatagcttaaaacagaagtgtgtcttcccagcacaaacctaatcaatcagtgtatcagtgcatctggtggcaacagctcagcccattcaaagagcaaggattcaggaaaggcacactgatggtggggagcctcttaagagcctctaatgttctcccaaaaccagagttgagagtcggagtgccagtcgtcggggcccactattcctgaataagggacatgcaagggccagaagtagcttgactctcgcctaaatatctgtgcctttgcctgtcctttctcccactctactgaaacccggaacagattcccgcttgccttctgatgaagagaggttaggtaaagagagtttggaggaaaaaagacaccaggaggcaggctgcggggtaggagagggttctgagaggaggcagcaatccagaatacctccttttctagccagcatcccttgaacttttgaaaggttgtgcctaccactggctggcacaccagggcaatgatttccctgcagaaggaaggaaagaatgtttcacccttgcatccttcttggagaagctacagcctgtgctcagttgagtggttcacactcagactttggctttatggttttccttcctccttgtctttgccctgaccttgatcaacaggggtgaaaagaaccaccctgaggtttccatgcctctcccattttagtggtagcattttgtgtctttactccacccttcaccctagttccaccaaggttcacacaccagatgtaactgtttttcagctgagttgtatggattaacttcagtccactgtaaatacacctgggatggggtggggttggggttgtttagggagaagcagccagacttgctttgtgaactgaatgtatttttatgcaattttgagtggcctttcaaccctaagatgaatggttttgttttactggttgttgttatatagttttgagtattctgtgtttgaaagtttgggaataataatattcacttctatatgatgcctgtaaacacaacagtatttataaatgagtaaataaaactgtgttttaactttgtgactgtctccacagttcagagcatgggatttctagaatctcacatctggggcagcctcttctgattttacatcttatcattggtgggggcctcgcccaccagcctcctacaactcctgtccacatagaggccccttccccagggacagccacagtgagtcatggccactgagaagggtctctggtagtatcaaggaatttcctaaatggagtcaggccaaggagaagcctagattggcgttcaaaagaaccgtaagatagatagatagatagatagatagatagatagatagatagatagatatcaaggttccaagcttcaagtaaccaagagtatatacggttatttcttggaagacaccaggtttaagtgacaaaggtgttgaggccatccaggtgaacactagcacactctagtacatgggaaagttgaggtctagggaggtggtgatttccttgggctcatggaagtctcctgccatcacccttagtcatctgctatatccataagtcttcatgaggtcattgtttaattcaggagatccaaaactatcctgtagttccaaactacaaatgtagttaacttgggggctattgaaggttaaatctaaactcaaaatgaaggagccatgcccagagaagagctgttcaggcccgctggcagggtttgtacgtgggtggccaggtctgaccccaggcagccaggatctgggtctggtttctccatccagcaagccctgcctctggctttgctcagccctgtgtttcctgccaagcggaaatccctggtcactgacttggggagaggtcagggagggaagattcttctcccctgatgtcacccagctgtttgtaacccaagcagcagcagaacaagcacacttgatgtcatggttgaagaattcagtcctgtcctggggcacaaaacagaggcaaagaagcatgaccgatgcaaagggttcctagactgcaaatgtcatttctctttctgacccccactggttgtagtaaggtctgcagatacagtatcacctagccgtcacgtggtccagccctcttggggggaaaggagaaggccacaacctattggcagagtaaaaagctcatattcttagccaggagaccctcaggtgataaatcccagtccgtctgctgaaaggctcatgcccctcaccctacccagccttagggactgaagcagcaagacaggatagatgttaaaggatctgggctcatgctccctcaggtgggcagctcccatccctgcttgcattcactgcccccatgcctttggacctgatggacaagcacacatctagccaacggtgttcctggaggacaggtgctggtgtaaactgacaaaaatggtagctgctggtctatcctcaaggagaggagacaggtggaagtgggaaccgaagaaggagttttactcttccctggtctttgggggcaatgctgtcccactctccctttccctaaaaattctgacgccctatccctggtccctaacatctttgcttcagaagttaaagacatttcaagttatttgcaaagagtcaactgaggactttgtagaaattgttacttttcaaattcccacttcccagggccagcctccctctcgtcattgggctcagactgtggctgttccctaagcccagctctactggaagggaattcaagaatatagtccccaccaccaccccgccccgcccagcctcccagacaatgttccccggcaccaccacactccccacagttccacagcctggcatgtgttctcaggagatgtgtgggccccagcacccaccagagtgccaatctggtcttcccccaaccccaggagagaggggacctcagccccttttggtgcttccctgaagggagattctgggttagaagccagagcctcaggaccatctcaccaccctcacccaccatactgaccctcacaggcagctcccactccctcacccccacctcagcgcagcaaaaacaaccagagacaccccccacccccaggtttctttcagctcatttctttaataaggagacgcagttcattacaaaataacaatttgacaagagatcagacaagaacaagagtccacataagggagatggagagcattgccaagcagaagtgggaatgagagggccgggggcaagggctgtacatgtgtccttcctatggagacgaaggcagggctcctggtgggctgaccttggcgaagctaggctctgccaggccctgattttgaagttttcagccccagggttttcagaaagcagcaaatcaagtccttagatgggcaggagtcagggcagaagggtcactatctttgaagaggcccccctaaagtcctgatcgctaaggcaggtgggatggaggaactcctggtgccccatgcacactgctcccatcacctcaccagacagatgctctctcaactcttgcctcaatttgtctctgctgtgggtgtggagagtgggagggccccagagagagctggaggaagcaagacatgtcttcactggtccaagcacctgattccagcctgctctgaaatggtcccctccaccttccccactctttcagttcccagcacaaaggtccctgggacttctgtgtgcaacttctgttgtggtttgtgcagggcaagcctgcctcgccacctctggcctcctcgaatgcgccctgcctgattcccttcccgttctctctccttcctcatacttgtcacagttgccaggcctgaggcatcctgggctcttcccatgcagtactgccctcaggtgcccatggggccaggggccgcaggcaggggggctacctgtccctctcagttcaacaggatgacctggggccttggaagcccccaggcccctctactcacctctgctacttggtgcaactggctggggcttctctggggagcaggtgtgaaggtcaggggacttagtccacacctgctctgcctgagcctctctcacagctgaacctgcccaccccactctcaggggatcgctggtagccctgaggttgccccgctattgggctgctttctgtcagactgcaggaggatgcacgagggaagagcgtcagcccctgtattcaccggcctctccctgagtccctcctccatcaccacccacagaccctcacactacagaggtgagtaagcagggatggttctgtcatccctggctgagctgctgactggctgctcctgaaaatcctggttgcctccacagggaccccaggaaaggtatccagaaccatggagtcccactgctgtctgctcctcgcccagcgtagagatggagctgaactgtgaacccaggccgagaaagccagctcgggcagggccagcatgggcatctcctgagaccccaccggaagccctggacaccgtccattctcatgacacgggactgagggagcaggagggagtgacaacaggtgagcccttcagaagtggtctgtggggagccagttggagagacatgggggctcctgggaggagccaagggaggccaaatctccagcaggaggccccctttatggcttttcagtgaattcaaacagtgggaggaaggggcacaccacacacatacacagaacatggaagctactgggatgccagataccaggctggacactgcaccgggccctgaggtttggctctgcaggcagatgtgcagcaaacaggccttcagggcgacagggtcctccagcatctcccaaggcagggctggactggagcaggcaccgactcccgcccactgatgactcccatggggggtttcccgatgggaggaggcaggggtggggctggggaacaaagactttacacgacataaaatcaaaggagcagcctcaaccagttctgtaaaatgggtttgaggttggggatcaaggggactctcagcattgccatgcggctatttacagaaagttatagacatgcatcttgattaaacaagattctgttcatatgtttctaggtaattatcttcttttatatataattaaatatacacggatgggggcagatgaggctcaaatggcttcagaaggttcttattttgttgttgcttaaaaaataaagtaattcatgtgtcttcaagtca

SEQ ID NO: 171008 - DNA, 1808 bp, Homo sapiens
  Payload ID: 13644
  Gene Symbol: PPP1R12B
  Gene Name: protein phosphatase 1, regulatory subunit 12B
  Uniprot ID: O60237
  ENST ID: ENST00000480184
  CDS Start-End: 133-1680
aaagatggcggcgcgagggtctccgccctctgctccgggctgaagcgctctgagagaggcggcagcggcaactcgagccccaacagtaatttagtgttggtagttttggcagcagctgccgaggccggagcaatggcggaactggagcacctaggagggaagcgggcagagtcggcgcgaatgcggcgggcagagcagcttcggcgctggcggggctcgctgacagagcaggagcctgcggagcgacgaggcgcggggcggcagccgctgaccaggcgcgggagccccagggtccgcttcgaggacggtgctgtctttctggccgcctgctctagcggggacaccgacgaggtgagaaagcttctggcaagaggtgctgatatcaacacggtcaacgtggacggcttgacagccctgcaccaggcatgtattgatgaaaatttggacatggtgaagtttctggtggagaacagagccaatgtaaaccagcaagacaacgagggctggacaccccttcatgcagcagcttcctgtggctatctcaacatagcagagtatttcattaatcacggagccagtgtaggtattgtcaatagtgaaggtgaagttccctctgaccttgcagaagagccagccatgaaggatcttcttctggagcaagtaaagaagcaaggagttgatctagagcagtcaagaaaagaagaagagcagcagatgttgcaggatgcccgccagtggctcaacagtgggaaaatagaggatgtgaggcaggctcgctcaggggctacagcccttcatgtggctgctgccaagggctactctgaagtcctcagacttttaattcaggctggctatgaactcaatgttcaggattatgatggctggactcccctccatgctgctgcacactggggagtgaaggaggcttgctccatcctggcagaagcactttgtgacatggatattcgaaataaactgggccagacaccatttgatgtggctgatgagggtctcgtggagcatttggagttgctccagaagaagcagaatgtgcttcgaagtgaaaaggagacacggaataaactcattgagtcagatctgaacagcaagattcagagtgggttctttaagaacaaagagaagatgctctatgaggaggagacacctaagtcccaagaaatggaggaagaaaataaagaatctagtagctccagctcagaggaggaggaaggtgaagatgaagcttctgagtcagaaactgagaaggaggcagataaaaagccagaagcctttgtcaatcattccaactctgaaagcaagagtagtatcacagagcagataccagcaccagctcaaaataccttctctgcctcttctgctaggaggttctcttctggcctttttaacaagccagaagagcccaaagatgaatctccttcttcatggagattgggactgagaaaaactggcagccacaacatgctgagtgaggtggccaattccagggaacctataagggaccgaggctcttccatctatcgctcctcttcaagccctcggatttctgctctactggacaacaaagataaggtgcagtttgggagggtatgggggaattccaaggcagttttttttttccatgaaaattcaatcttaggaacaaatgaaaatattttctagtccttaagttgattttggaaatgcaaagtctttaaagagagagaggcacactgatagtttattcaagtagctatttgcttgctattgtttgcttgaccaaaaaagaaaataaaaaagctttaaaaata

SEQ ID NO: 171009 - DNA, 1681 bp, Homo sapiens
  Payload ID: 13644
  Gene Symbol: PPP1R12B
  Gene Name: protein phosphatase 1, regulatory subunit 12B
  ENST ID: ENST00000476364
  CDS Start-End: 125-553
cggcgcgagggtctccgccctctgctccgggctgaagcgctctgagagaggcggcagcggcaactcgagccccaacagtaatttagtgttggtagttttggcagcagctgccgaggccggagcaatggcggaactggagcacctaggagggaagcgggcagagtcggcgcgaatgcggcgggcagagcagcttcggcgctggcggggctcgctgacagagcaggagcctgcggagcgacgaggcgcggggcggcagccgctgaccaggcgcgggagccccagggtccgcttcgaggacggtgctgtctttctggccgcctgctctagcggggacaccgacgaggtgagaaagcttctggcaagaggtgctgatatcaacacggtcaacgtggacggcttgacagccctgcaccaggcatgtattgatgaaaatttggacatggtgaagtttctggtggagaacagagccaatgtaaaccagcaagacaacgagggctggacaccccttcatgcagcagcttcctgtggctatctcaacatagcagagagttgatctagagcagtcaagaaaagaagaagagcagcagatgttgcaggatgcccgccagtggctcaacagtgggaaaatagaggatgtgaggcaggctcgctcaggggctacagcccttcatgtggctgctgccaagggctactctgaagtcctcagacttttaattcaggctggctatgaactcaatgttcaggattatgatggctggactcccctccatgctgctgcacactggggagtgaaggaggcttgctccatcctggcagaagcactttgtgacatggatattcgaaataaactgggccagacaccatttgatgtggctgatgagggtctcgtggagcatttggagttgctccagaagaagcagaatgtgcttcgaagtgaaaaggagacacggaataaactcattgagtcagatctgaacagcaagattcagagtgggttctttaagaacaaagagaagatgctctatgaggaggagacacctaagtcccaagaaatggaggaagaaaataaagaatctagtagctccagctcagaggaggaggaaggtgaagatgaagcttctgagtcagaaactgagaaggaggcagataaaaagccagaagcctttgtcaatcattccaactctgaaagcaagagtagtatcacagagcagataccagcaccagctcaaaataccttctctgcctcttctgctaggaggttctcttctggcctttttaacaagccagaagagcccaaagatgaatctccttcttcatggagattgggactgagaaaaactggcagccacaacatgctgagtgaggtggccaattccagggaacctataagggaccgaggctcttccatctatcgctcctcttcaagccctcggatttctgctctactggacaacaaagataaggtgcagtttgggagggtatgggggaattccaaggcagttttttttttccatgaaaattcaatcttaggaacaaatgaaaatattttctagtccttaagttgattttggaaatgcaaagtctttaaagagagagaggcacactgatagtttattcaagtagctatttgcttgctattgtttgcttgaccaaaaaagaaaataaaaaagctttaaaaata

SEQ ID NO: 171010 - DNA, 635 bp, Homo sapiens
  Payload ID: 13644
  Gene Symbol: PPP1R12B
  Gene Name: protein phosphatase 1, regulatory subunit 12B
  ENST ID: ENST00000466968
  CDS Start-End: 1-635
gaacagagccaatgtaaaccagcaagacaacgagggctggacaccccttcatgcagcagcttcctgtggctatctcaacatagcagaacttttaattcaggctggctatgaactcaatgttcaggattatgatggctggactcccctccatgctgctgcacactggggagtgaaggaggcttgctccatcctggcagaagcactttgtgacatggatattcgaaataaactgggccagacaccatttgatgtggctgatgagggtctcgtggagcatttggagttgctccagaagaagcagaatgtgcttcgaagtgaaaaggagacacggaataaactcattgagtcagatctgaacagcaagattcagagtgggttctttaagaacaaagagaagatgctctatgaggaggagacacctaagtcccaagaaatggaggaagaaaataaagaatctagtagctccagctcagaggaggaggaaggtgaagatgaagcttctgagtcagaaactgagaaggaggcagataaaaagccagaagcctttgtcaatcattccaactctgaaagcaagagtagtatcacagagcagataccagcaccagctcaaaataccttctctgcctcttctgcta

SEQ ID NO: 171011 - DNA, 15248 bp, Homo sapiens
  Payload ID: 13644
  Gene Symbol: PPP1R12B
  Gene Name: protein phosphatase 1, regulatory subunit 12B
  Uniprot ID: O60237
  ENST ID: ENST00000608999
  CDS Start-End: 154-3102
ggtactactggcgggaggagtaaagatggcggcgcgagggtctccgccctctgctccgggctgaagcgctctgagagaggcggcagcggcaactcgagccccaacagtaatttagtgttggtagttttggcagcagctgccgaggccggagcaatggcggaactggagcacctaggagggaagcgggcagagtcggcgcgaatgcggcgggcagagcagcttcggcgctggcggggctcgctgacagagcaggagcctgcggagcgacgaggcgcggggcggcagccgctgaccaggcgcgggagccccagggtccgcttcgaggacggtgctgtctttctggccgcctgctctagcggggacaccgacgaggtgagaaagcttctggcaagaggtgctgatatcaacacggtcaacgtggacggcttgacagccctgcaccaggcatgtattgatgaaaatttggacatggtgaagtttctggtggagaacagagccaatgtaaaccagcaagacaacgagggctggacaccccttcatgcagcagcttcctgtggctatctcaacatagcagagtatttcattaatcacggagccagtgtaggtattgtcaatagtgaaggtgaagttccctctgaccttgcagaagagccagccatgaaggatcttcttctggagcaagtaaagaagcaaggagttgatctagagcagtcaagaaaagaagaagagcagcagatgttgcaggatgcccgccagtggctcaacagtgggaaaatagaggatgtgaggcaggctcgctcaggggctacagcccttcatgtggctgctgccaagggctactctgaagtcctcagacttttaattcaggctggctatgaactcaatgttcaggattatgatggctggactcccctccatgctgctgcacactggggagtgaaggaggcttgctccatcctggcagaagcactttgtgacatggatattcgaaataaactgggccagacaccatttgatgtggctgatgagggtctcgtggagcatttggagttgctccagaagaagcagaatgtgcttcgaagtgaaaaggagacacggaataaactcattgagtcagatctgaacagcaagattcagagtgggttctttaagaacaaagagaagatgctctatgaggaggagacacctaagtcccaagaaatggaggaagaaaataaagaatctagtagctccagctcagaggaggaggaaggtgaagatgaagcttctgagtcagaaactgagaaggaggcagataaaaagccagaagcctttgtcaatcattccaactctgaaagcaagagtagtatcacagagcagataccagcaccagctcaaaataccttctctgcctcttctgctaggaggttctcttctggcctttttaacaagccagaagagcccaaagatgaatctccttcttcatggagattgggactgagaaaaactggcagccacaacatgctgagtgaggtggccaattccagggaacctataagggaccgaggctcttccatctatcgctcctcttcaagccctcggatttctgctctactggacaacaaagataaggagagagaaaacaaaagctatattagttcactagcaccccggaagctcaacagcacaagtgatattgaagaaaaggagaacagagaatcagctgttaatctagtgaggagtggctcctatacccggcagctatggagggatgaagcaaaaggaaatgaaatcccacagacaattgctccctccacctatgtatcaacttacttgaaaaggactcctcacaaatcccaggccgacacaacagcagagaaaacagcagacaatgtctcttctagcaccccgctctgtgtgatcaccaatcgccctcttcctagcactgccaatggggttacagctactcctgtgctctccattactggaacagattcctctgtggaagccagggagaagaggaggtcctatctgactcctgtacgggatgaggaagcagagtctttacggaaagcacgctccagacaagctcggcagacacgaaggtctactcaaggtgtcaccctaacagaccttcaagaagcagaaaggacattcagccggtcgagggcagagaggcaagctcaggagcagcctcgtgagaagcccacagacactgaagggcttgaggggagccctgagaagcatgagccctcagcagttccagcaacagaagctggggagggccagcagccctggggcaggagtctggatgaagagcctatctgtcatcgcctgaggtgcccagctcagccagacaaacccaccacgccagcatctccttctacgtcaagaccctcactctacaccagttcccacctgctatggacaaatagattttcagtccctgattctgagagttcagagactaccacaaacactacaactgcaaaggaaatggacaaaaatgagaatgaagaagcagatttggatgagcagtcctctaagaggctgtccatccgagagaggaggcggcccaaggaacgacgaagaggcacaggcatcaatttctggacaaaggatgaggatgaaactgatggctctgaagaggtcaaagaaacgtggcatgaaagactttctaggttggaatcgggaggtagtaatcctacaaccagtgattcttacggtgaccgggcttcagcaagagcccgtcgggaggcccgggaggcccgcctagccaccctgaccagccgtgtagaagaagacagcaacagagattataaaaaactctatgagagtgctctgactgaaaaccaaaaactgaaaacaaaacttcaggaagcccagctagagctagcagatataaagtccaagcttgagaaggtggcccagcagaaacaagaaaagacctctgaccgatcatcagtgctggagatggagaaacgggagaggcgagccttggagcgcaaaatgtcagaaatggaggaagaaatgaaggtgttaacagaactgaaatccgacaaccagaggctgaaagatgaaaatggtgccctcatcagagtcatcagcaaactgtccaagtaggctaggctccagatttatgaggaaagaaagggacagcatttgctgcccccacccctcttttccagtccttgccttccaaccaaaagaaatggatgttttggtggaaggacacttctttctatcaccctcttcagtcacctctatacactctacattttctctgcactttcaatgccctgttcttccaaacccctatcccaagttttatgacagttttaattgaagcatgattgtggtaattcgagccatctggagaatgctctggggagtacaccaggctcagctgtggacccctcaacttcctgctgctcagctactttgtccacattggatttggtccaaacatgtaagacttctaccctaatcagtatccttcagctttttacattaacccagtgtcctctgatataggtgagtcttgtggtagccactccaggatcctgattggggtgccaagagaaacagcaggatgttgaattgatcatcagatgccctctggaatggttagcatccaaggtgacagtgactgcattgaggcgctctattcttcttcacctctcaggaactgacttttattttttctgtcaacacccagtaatctccctaactagttttaacccttattcctccctcatacctagccatttctccaaggcgcaaatggccctggcttcatttattcctttcctttctatccttttatatttttcccttccccaccccctcactcaatggtataaaagctaggacagagcacctgacctcagttgtctttggccattgtgggaagtcattattctggagacaagaaaatcatcactctggtgccttggtggcagcaccactgcctgctccctggaaggtagactatggcataagtgtcagctcattgttttcgtctcccacttatcttcccccttcaaagtgattttctttataagaaaatttgggctctgaatactccattctgcctcacttccttgaccttgttttcctctcttcgccctgacacctgcttctaatgagaaatgaagtcagtgcaaggaggaatgagaggtggggaggggagattgttgagagatggactaggaagtggaagcaggctggaaagacacatatggcgaaagtcaagtatctgaggccacttgcaacattgtgacaaagaagatggaagatagcagcctactgggctgtgagaatagtggtgaatttgattatttccagtggttagatttagcagagagatttactttcttagaaattaataggggaaatggcacttaatagaggtttaatggaatgaagtactttcaacccattgatgagagtcatggaagtttagagtggcaagacccagaggtcattaggtccagctttctattattgtgtcacagggacccctgctaccacagctttcacccatgggcatggtcaggtagcctctggtggctatgcatttattactcaaaagttgggcaactctaataacgagagagtttttcctcatatcagctgaagtctgcctgtggattctccttgtagtccagatctactatctgcaactctttaacggcacttgagatatgtgcagtgggtggtctccccctcagtcttactttgagctgctgttactctagtcctttaagtcattcctcatatggcatgcttttcttacctgtcacatcttggccatcctcctctagacaaaaccagcctttaaaatatcatgtccaggcctggaaagaatacaaatccagtgcaaaattaaaccattagttcttgatgataacctagcattaatacttacagtattttctttttgtaggagttttatcccttggttcacttgagtgtgcaagtcattaaatcctcatcattttagggttgccagtgatattcagtgtttagagtggttcattcccttaatatatactacctctgtctgttaattctttcctaacatgacatgtagctctccatggtcctccctctgaaacaccacatgctgtttaaactagaagctgtaattcaagatcccaattccaccaggtgcagtggctcatgcctgtaatcccagcacttcaggaggccgaggtggacagatcacgaggtcaggagttcgagaccatcctggctaacacggtgaaacccaatctctactaaaaatacaaaaaattagccaggcgtggtggcaggcgcctgtagtcccagctactcaggaggctgaggcaggagaatggcgtgaacccgggaggcggagcttgcagtgagccttgatcacgccactgcactccagcctgggtgacagagcaagactccatctcaaaaaaaataataataataaataaataaaaaatcccaattacagaacaggagatatgtttcctctgacaaaaccccatttttagagtgtataaaattctgtctttcatttccaaccatttttcaagagaagctgctactatcttgagacttcgtattatcatgggagtactgtaagttcagttctcagggaatgctaaattagagtaataagttttatatccttcattctgggagaggaaatcaacataaggtgttgactaattgattatcctggaacattttgaatattggggaaggaagatgatacttctttctcaagaaaagaaaattggattattaggaatacatcttgacccttttccactcaatagaccagggaaaggggttacagagagcctcctcagatctgtttgtgcctttcaaaagtactgggggcagattctcaaaactcttagattggtgttgcatccctgccacttcacatgacccttccatgttaaagctgacttttcttgccagaaagttttccttgtgacaagaaatttgcaagcttttcaatctcaggaatactggattctatagccaagaactcatgaaagtaagtgtaaactatcctaggtaatttcaggtactttctcttatgcaattaattttattaactgatttctggtctatctccagagataaaataccattccttcacaactgtattgtctggaagccccatgagatggtaattataggccttctactagccagcagttctctctggatactggcatcagcaggtctcctttttcttgtgctgcttggacaggtacctactgctggcctcttcagtggccacaatcctcagtcctcacctgctggtttggagactcatgagcaccccaggcagctcaagctgaataaatagctgcagacatggccaacaacatggggctcaggtctgtcacttaacttagagtctttacatgaaatatcagaatgggaaagagaatgttcctggtaaaactctgttttcattaatttgttatttttcaaaaaccgagccacacctttggaagtaatgatttggccattccagagattctggggctaaagtttgtttttccagggctgctgatccttttccagatagctccagagtatgatgaccccagccccatcccaatctctagcgaaagggttatgcaaatctcagggtgttgcctctaaagaatctaaagaatagacatgctttgggcttactcagtgtaccagattctctagtgggccattctcatttgatgttccctagaacctccctgtcttccaactgcaggatgtgtttacttctcttctgggcttcccctggtttctgtcctagttcccaccccaagtttaagaagacttagattcatttattgctatctgaggccactagtgagatttcagatctctcttttgcaacattttacccatttcccttccccaaaccatgtgcttattagatggttccactcaggaagcaaggaagctaaaactcaagttaatggtctgtggatcccacgaaagtgtgtgtaaactactgactgtttctccactagaggcatttaattgagccaaagatgatggaagaagaaactctcaaagccatgtactttgttaggtgtctggatttttggcctgtttgcagcctctcctagccacagacagacactgtctcctctcagagaaaggccagtgtttcggtccaggccactggtgagtgtcggcacccttgaggtgggcatggagtgagcagaagaagcctggagaagagagaactatttaaaagtgttgccagttattcagcttccaggcggctttgcacctccaaaggtgcaaaaaggaaaaagaaagcagaaaggattcagcatttaagcagaaagaaaagggaaattctactctaccagatgagccactggttccactggagcttatcagtgaagtaacactgcaggagccctggtatccttccctcagagatatcatcaggggccctcaaaccccattgtttatgccagcactgaccgcactttaagcacacacttaccaatcagaggtcgtgtaattggcctaaatctaggcccagttattactacaaatcttagtcaccatactctctcgcccaggctggagtgcagtggtgtgatctcagctcactgcaacctccacctcccaggctcaagggatcctctcacctcagctcccgagcagctaggactgcaggtgtgcaccaccatgcccagctaatttttgaatttttttgtagagatggggttttgccatgttgcccaggctggtctgaagctgctgggctcaagcaatccacctggctgggcctcccaaagcgataggattacaggcgtaagggcccacgcccagcctaccatactgattttcaaggcagggtctaacccttcataagatgtgagttcttccaacccaataagcaggcagctttgaggacaaaaaggcaacattaaaagataagaccctagaagtcagaacatctgtattccaaggccaccccttctccttttagtcatgtgactttgggcaggtcaccctccctgtctgtaaaatgaggttggactggataatctttatgtgccctttccttttggcttaaaattctgtgatttattcattcttaggaagatcagcatatttattgggatttctgcttcaaaaattctttctaacctcaaaaatccaagtccagaattttttgttttcttctggatttaaactgtttaatatgagcacatcaaggttgacttctcatcctttttgggaagtgaatttaatattgagggtaattgaatgatgttgcaatggctttccctcctgctggcttggtaagaatattaaagcctgcagaggtggaaattggagctcatggagaaatggatagaaagcaatttgttgcaggcagcctttggacaagttgttttaataggaaatagacctgctgcttcataggtttcctcaaccacctttcctcagctttcttaaaatgggatctacattggctcttcacacccaaatagcagactaatcgtttttctgcttagcaccgtctggttcattgtcttgaactctgccttacagcagcaagaaaattttcctcgacaagaacctcaatctttagttccattgagctccccctctggattttggacttaccagaagtaggaggttctgataccattcaagatggtctttccttcaaagcaggtctgaagaggagactaccaaagcagtgtttacaaacccagagtccacacaaccatattgcatagaacagcacttggctttcacaagcctcctacaggacctggtgtaattggagtgaaagggcagagaccctggaagtggaggtggctgtgtgctgcgatgggaagaaggcagaaggcccaggggctttggacatagagcagggtggaagctgcaagtactgggaaggaagagagtttcacagaaacaaagctttgtcacacagaaatgagttctgtctcactggtgacttcatccctcaggctccagctgagcagagattttaatcagcttccttaatgggtattgacactgctcaggaagcagtagaccctgtcagggacagctattgatcttttgtgttctgattagattggaaaatagatcaacttcattgtagtccaggaactgttggtcacagctactaggaatgaggtgatttctgagggctgagaaaaaacacagaatcttggccagcagccagcagctgcatggtgaaagatgcattcacttctcctttgagagttggggttgagggcaaacatagaacccaggtttggcttacaacccagtgtcccggaagccctccttcgggagaactgtaagtaagaggtgggtgtgtctaaagacaataccattaatgaatgttctggccttacctaaaaaggtttagcaatttggggataactcttggatctagcttatgtgcgttcacatgcacatttgctagcccagagcttttaaaatgaggtctggcatatacttgattacaaatgaaaactcagaaaccaattttatttattaaatcatatcttttgtttttccccctcccttctaatcccccaaaggacctatttgagctgttccccaattcatctgcttattttggaccatgaatctgccagagtgatattttctgttatttctcctccaaatttttccctgatgtttccaataaagatttacttgggtggccccttaaggtgacatcaggatgctcttatgtccttccagaataagcatacacttcactcctctccctttcatctccctctgcattcttaattccttgcttttctcacttggagccgagggtgctttagagaggtggttttccatgaatcagccaagattcctgtagaagttgggtataccaaccaccaccaccaccgccccctattccagtttcaaagctcctcggctatgctaatgtcccctcagagatgaggtttgacttttaggcccgtatgactcctccatagcctggccaaggagaccatgagtagccatgtctggtttactctttatcctgagactgtttatagcttaaaacagaagtgtgtcttcccagcacaaacctaatcaatcagtgtatcagtgcatctggtggcaacagctcagcccattcaaagagcaaggattcaggaaaggcacactgatggtggggagcctcttaagagcctctaatgttctcccaaaaccagagttgagagtcggagtgccagtcgtcggggcccactattcctgaataagggacatgcaagggccagaagtagcttgactctcgcctaaatatctgtgcctttgcctgtcctttctcccactctactgaaacccggaacagattcccgcttgccttctgatgaagagaggttaggtaaagagagtttggaggaaaaaagacaccaggaggcaggctgcggggtaggagagggttctgagaggaggcagcaatccagaatacctccttttctagccagcatcccttgaacttttgaaaggttgtgcctaccactggctggcacaccagggcaatgatttccctgcagaaggaaggaaagaatgtttcacccttgcatccttcttggagaagctacagcctgtgctcagttgagtggttcacactcagactttggctttatggttttccttcctccttgtctttgccctgaccttgatcaacaggggtgaaaagaaccaccctgaggtttccatgcctctcccattttagtggtagcattttgtgtctttactccacccttcaccctagttccaccaaggttcacacaccagatgtaactgtttttcagctgagttgtatggattaacttcagtccactgtaaatacacctgggatggggtggggttggggttgtttagggagaagcagccagacttgctttgtgaactgaatgtatttttatgcaattttgagtggcctttcaaccctaagatgaatggttttgttttactggttgttgttatatagttttgagtattctgtgtttgaaagtttgggaataataatattcacttctatatgatgcctgtaaacacaacagtatttataaatgagtaaataaaactgtgttttaactttgtgactgtctccacagttcagagcatgggatttctagaatctcacatctggggcagcctcttctgattttacatcttatcattggtgggggcctcgcccaccagcctcctacaactcctgtccacatagaggccccttccccagggacagccacagtgagtcatggccactgagaagggtctctggtagtatcaaggaatttcctaaatggagtcaggccaaggagaagcctagattggcgttcaaaagaaccgtaagatagatagatagatagatagatagatagatagatagatagatagatatcaaggttccaagcttcaagtaaccaagagtatatacggttatttcttggaagacaccaggtttaagtgacaaaggtgttgaggccatccaggtgaacactagcacactctagtacatgggaaagttgaggtctagggaggtggtgatttccttgggctcatggaagtctcctgccatcacccttagtcatctgctatatccataagtcttcatgaggtcattgtttaattcaggagatccaaaactatcctgtagttccaaactacaaatgtagttaacttgggggctattgaaggttaaatctaaactcaaaatgaaggagccatgcccagagaagagctgttcaggcccgctggcagggtttgtacgtgggtggccaggtctgaccccaggcagccaggatctgggtctggtttctccatccagcaagccctgcctctggctttgctcagccctgtgtttcctgccaagcggaaatccctggtcactgacttggggagaggtcagggagggaagattcttctcccctgatgtcacccagctgtttgtaacccaagcagcagcagaacaagcacacttgatgtcatggttgaagaattcagtcctgtcctggggcacaaaacagaggcaaagaagcatgaccgatgcaaagggttcctagactgcaaatgtcatttctctttctgacccccactggttgtagtaaggtctgcagatacagtatcacctagccgtcacgtggtccagccctcttggggggaaaggagaaggccacaacctattggcagagtaaaaagctcatattcttagccaggagaccctcaggtgataaatcccagtccgtctgctgaaaggctcatgcccctcaccctacccagccttagggactgaagcagcaagacaggatagatgttaaaggatctgggctcatgctccctcaggtgggcagctcccatccctgcttgcattcactgcccccatgcctttggacctgatggacaagcacacatctagccaacggtgttcctggaggacaggtgctggtgtaaactgacaaaaatggtagctgctggtctatcctcaaggagaggagacaggtggaagtgggaaccgaagaaggagttttactcttccctggtctttgggggcaatgctgtcccactctccctttccctaaaaattctgacgccctatccctggtccctaacatctttgcttcagaagttaaagacatttcaagttatttgcaaagagtcaactgaggactttgtagaaattgttacttttcaaattcccacttcccagggccagcctccctctcgtcattgggctcagactgtggctgttccctaagcccagctctactggaagggaattcaagaatatagtccccaccaccaccccgccccgcccagcctcccagacaatgttccccggcaccaccacactccccacagttccacagcctggcatgtgttctcaggagatgtgtgggccccagcacccaccagagtgccaatctggtcttcccccaaccccaggagagaggggacctcagccccttttggtgcttccctgaagggagattctgggttagaagccagagcctcaggaccatctcaccaccctcacccaccatactgaccctcacaggcagctcccactccctcacccccacctcagcgcagcaaaaacaaccagagacaccccccacccccaggtttctttcagctcatttctttaataaggagacgcagttcattacaaaataacaatttgacaagagatcagacaagaacaagagtccacataagggagatggagagcattgccaagcagaagtgggaatgagagggccgggggcaagggctgtacatgtgtccttcctatggagacgaaggcagggctcctggtgggctgaccttggcgaagctaggctctgccaggccctgattttgaagttttcagccccagggttttcagaaagcagcaaatcaagtccttagatgggcaggagtcagggcagaagggtcactatctttgaagaggcccccctaaagtcctgatcgctaaggcaggtgggatggaggaactcctggtgccccatgcacactgctcccatcacctcaccagacagatgctctctcaactcttgcctcaatttgtctctgctgtgggtgtggagagtgggagggccccagagagagctggaggaagcaagacatgtcttcactggtccaagcacctgattccagcctgctctgaaatggtcccctccaccttccccactctttcagttcccagcacaaaggtccctgggacttctgtgtgcaacttctgttgtggtttgtgcagggcaagcctgcctcgccacctctggcctcctcgaatgcgccctgcctgattcccttcccgttctctctccttcctcatacttgtcacagttgccaggcctgaggcatcctgggctcttcccatgcagtactgccctcaggtgcccatggggccaggggccgcaggcaggggggctacctgtccctctcagttcaacaggatgacctggggccttggaagcccccaggcccctctactcacctctgctacttggtgcaactggctggggcttctctggggagcaggtgtgaaggtcaggggacttagtccacacctgctctgcctgagcctctctcacagctgaacctgcccaccccactctcaggggatcgctggtagccctgaggttgccccgctattgggctgctttctgtcagactgcaggaggatgcacgagggaagagcgtcagcccctgtattcaccggcctctccctgagtccctcctccatcaccacccacagaccctcacactacagaggtgagtaagcagggatggttctgtcatccctggctgagctgctgactggctgctcctgaaaatcctggttgcctccacagggaccccaggaaaggtatccagaaccatggagtcccactgctgtctgctcctcgcccagcgtagagatggagctgaactgtgaacccaggccgagaaagccagctcgggcagggccagcatgggcatctcctgagaccccaccggaagccctggacaccgtccattctcatgacacgggactgagggagcaggagggagtgacaacaggtgagcccttcagaagtggtctgtggggagccagttggagagacatgggggctcctgggaggagccaagggaggccaaatctccagcaggaggccccctttatggcttttcagtgaattcaaacagtgggaggaaggggcacaccacacacatacacagaacatggaagctactgggatgccagataccaggctggacactgcaccgggccctgaggtttggctctgcaggcagatgtgcagcaaacaggccttcagggcgacagggtcctccagcatctcccaaggcagggctggactggagcaggcaccgactcccgcccactgatgactcccatggggggtttcccgatgggaggaggcaggggtggggctggggaacaaagactttacacgacataaaatcaaaggagcagcctcaaccagttctgtaaaatgggtttgaggttggggatcaaggggactctcagcattgccatgcggctatttacagaaagttatagacatgcatcttgattaaacaagattctgttcatatgtttctaggtaattatcttcttttatatataattaaatatacacggatgggggcagatgaggctcaaatggcttcagaaggttcttattttgttgttgcttaaaaaataaagtaattcatgtgtcttcaagtca

SEQ ID NO: 171012 - DNA, 2046 bp, Homo sapiens
  Payload ID: 13644
  Gene Symbol: PPP1R12B
  Gene Name: protein phosphatase 1, regulatory subunit 12B
  Uniprot ID: O60237
  ENST ID: ENST00000491336
  CDS Start-End: 828-1454
gttgctggtacaatctcataaaatgggctccagtgtttagagaaggacagtcagaggagtggccacctgtttgttgaaaattgggcttctgggaaagttgctgcacaagtgtgtggcaaggtgtgtctgagatagcttgacctgctttcacctggaatgatttgatctggcaatagagttccttgccattcctggttttatggaaatcagaggcacaggaagttgatctgggtgttctggggaattgagacaagcctctgccatagtttgttagtactctgtgtttggatgctaactccagtgtgctgagttgagacatcagcaagtgctgggcctggaatgtcagaagcagcaggtcctatctgactcctgtacgggatgaggaagcagagtctttacggaaagcacgctccagacaagctcggcagacacgaaggtctactcaaggtgtcaccctaacagaccttcaagaagcagaaaggacattcagccggtcgagggcagagaggcaagctcaggagcagcctcgtgagaagcccacagacactgaagggcttgaggggagccctgagaagcatgagccctcagcagttccagcaacagaagctggggagggccagcagccctggggcaggagtctggatgaagagcctatctgtcatcgcctgaggtgcccagctcagccagacaaacccaccacgccagcatctccttctacgtcaagaccctcactctacaccagttcccacctgctatggacaaatagattttcagtccctgattctgagagttcagagactaccacaaacactacaactgcaaaggaaatggacaaaaatgagaatgaagaagcagatttggatgagcagtcctctaagaggctgtccatccgagagaggaggcggcccaaggaacgacgaagaggcacaggcatcaatttctggacaaaggatgaggatgaaactgatggctctgaagaggtcaaagaaacgtggcatgaaagactttctaggttggaatcgggaggtagtaatcctacaaccagtgattcttacggtgaccgggcttcagcaagagcccgtcgggaggcccgggaggcccgcctagccaccctgaccagccgtgtagaagaagacagcaacagagattataaaaaactctatgagagtgctctgactgaaaaccaaaaactgaaaacaaaacttcaggaagcccagctagagctagcagatataaagtccaagcttgagaaggtggcccagcagaaacaagaaaagacctctgaccgatcatcagtgctggagatggagaaacgggagaggcgagccttggagcgcaaaatgtcagaaatggaggaagaaatgaaggtgttaacagaactgaaatccgacaaccagaggctgaaagatgaaaatggtgccctcatcagagtcatcagcaaactgtccaagtaggctaggctccagatttatgaggaaagaaagggacagcatttgctgcccccacccctcttttccagtccttgccttccaaccaaaagaaatggatgttttggtggaaggacacttctttctatcaccctcttcagtcacctctatacactctacattttctctgcactttcaatgccctgttcttccaaacccctatcccaagttttatgacagttttaattgaagcatgattgtggtaattcgagccatctggagaatgctctggggagtacaccaggctcagctgtggacccctcaacttcctgctgctcagctactttgtccacattggatttggtccaaacatgtaagacttctaccctaatcagtatccttcagctttttacattaacccagtgtcctctgatataggtgagtcttgtggtagccactccaggatcctgattggggtgccaagagaaacagcaggatgttgaattgatcatcagatgccctctggaatggttagcatccaaggtgacagtgactgcattgaggcgctctattcttcttcacctctcaggaactgacttttattttttctgtcaacacc

SEQ ID NO: 171013 - DNA, 2227 bp, Homo sapiens
  Payload ID: 13644
  Gene Symbol: PPP1R12B
  Gene Name: protein phosphatase 1, regulatory subunit 12B
  Uniprot ID: O60237
  ENST ID: ENST00000290419
  CDS Start-End: 828-1502
gttgctggtacaatctcataaaatgggctccagtgtttagagaaggacagtcagaggagtggccacctgtttgttgaaaattgggcttctgggaaagttgctgcacaagtgtgtggcaaggtgtgtctgagatagcttgacctgctttcacctggaatgatttgatctggcaatagagttccttgccattcctggttttatggaaatcagaggcacaggaagttgatctgggtgttctggggaattgagacaagcctctgccatagtttgttagtactctgtgtttggatgctaactccagtgtgctgagttgagacatcagcaagtgctgggcctggaatgtcagaagcagcaggtcctatctgactcctgtacgggatgaggaagcagagtctttacggaaagcacgctccagacaagctcggcagacacgaaggtctactcaaggtgtcaccctaacagaccttcaagaagcagaaaggacattcagccggtcgagggcagagaggcaagctcaggagcagcctcgtgagaagcccacagacactgaagggcttgaggggagccctgagaagcatgagccctcagcagttccagcaacagaagctggggagggccagcagccctggggcaggagtctggatgaagagcctatctgtcatcgcctgaggtgcccagctcagccagacaaacccaccacgccagcatctccttctacgtcaagaccctcactctacaccagttcccacctgctatggacaaatagattttcagtccctgattctgagagttcagagactaccacaaacactacaactgcaaaggaaatggacaaaaatgagaatgaagaagcagatttggatgagcagtcctctaagaggctgtccatccgagagaggaggcggcccaaggaacgacgaagaggcacaggcatcaatttctggacaaaggatgaggatgaaactgatggctctgaagaggtcaaagaaacgtggcatgaaagactttctaggttggaatcgggaggtagtaatcctacaaccagtgattcttacggtgaccgggcttcagcaagagcccgtcgggaggcccgggaggcccgcctagccaccctgaccagccgtgtagaagaagacagcaacagagattataaaaaactctatgagagtgctctgactgaaaaccaaaaactgaaaacaaaacttcaggaagcccagctagagctagcagatataaagtccaagcttgagaaggtggcccagcagaaacaagaaaagacctctgaccgatcatcagtgctggagatggagaaacgggagaggcgagccttggagcgcaaaatgtcagaaatggaggaagaaatgaagaacctccaccagctaaaacagattcaaaccttgaagcagatgaacgagcaactgcaggctgagaacagggccctgacccgagtggtggccagactctcggagtccatcgagtcctcggacacccaggagctctagttcttgcccctactctccaactcacttccctcctccactactccaggtgttaacagaactgaaatccgacaaccagaggctgaaagatgaaaatggtgccctcatcagagtcatcagcaaactgtccaagtaggctaggctccagatttatgaggaaagaaagggacagcatttgctgcccccacccctcttttccagtccttgccttccaaccaaaagaaatggatgttttggtggaaggacacttctttctatcaccctcttcagtcacctctatacactctacattttctctgcactttcaatgccctgttcttccaaacccctatcccaagttttatgacagttttaattgaagcatgattgtggtaattcgagccatctggagaatgctctggggagtacaccaggctcagctgtggacccctcaacttcctgctgctcagctactttgtccacattggatttggtccaaacatgtaagacttctaccctaatcagtatccttcagctttttacattaacccagtgtcctctgatataggtgagtcttgtggtagccactccaggatcctgattggggtgccaagagaaacagcaggatgttgaattgatcatcagatgccctctggaatggttagcatccaaggtgacagtgactgcattgaggcgctctattcttcttcacctctcaggaactgacttttattttttctgtcaacacc

SEQ ID NO: 171014 - DNA, 878 bp, Homo sapiens
  Payload ID: 13644
  Gene Symbol: PPP1R12B
  Gene Name: protein phosphatase 1, regulatory subunit 12B
  ENST ID: ENST00000634903
  CDS Start-End: 301-861
tctaggcataaaaggtgttgctcagcacaataccctctacggtaagctaccagtcctgagaacctgtggtcaaagctgaattgaaaatattgatggaactcagactctgtgtaactggggactggttcagagctcaagactataatttacagggctgcttttatcctttatttagttctatccaaagtcatcttgcatcaactcaaaaggagagattctgtgagggtaacctacagggaaatttcccagctttgtgtgaagaatccagtggttgagtgtctatctgcatcctgaggaaccatgtcctctttatatacccgaagtaaagaattcactcggaataggaaatctcagtctgattctcccccagcatctccctccccgactgccaagacgctccgacatgaaagactttctaggttggaatcgggaggtagtaatcctacaaccagtgattcttacggtgaccgggcttcagcaagagcccgtcgggaggcccgggaggcccgcctagccaccctgaccagccgtgtagaagaagacagcaacagagattataaaaaactctatgagagtgctctgactgaaaaccaaaaactgaaaacaaaacttcaggaagcccagctagagctagcagatataaagtccaagcttgagaaggtggcccagcagaaacaagaaaagacctctgaccgatcatcagtgctggagatggagaaacgggagaggcgagccttggagcgcaaaatgtcagaaatggaggaagaaatgaaggtgttaacagaactgaaatccgacaaccagaggctgaaagatgaaaatggtgccctcatcagagtcatcagcaaactgtccaagtaggctaggctccagattta

SEQ ID NO: 171015 - DNA, 380 bp, Homo sapiens
  Payload ID: 13644
  Gene Symbol: PPP1R12B
  Gene Name: protein phosphatase 1, regulatory subunit 12B
  ENST ID: ENST00000434615
  CDS Start-End: 1-63
ccacagacaattgctccctccacctatgtatcaacttacttgaaaagatccatcaagatgtgaaactcgcaagtttggtgcagagaagtgcttcatttggtagaagtagtgaccccacaagtccctacatttcagccaatcgcaattcatctcctgctacctcacccattaccattggttcatctacctctcggggcagccagtggcaacctgcctcttcttgccctgcaccaatcagtgcaaacactactgcatctgtacatcatggcaggactcctcacaaatcccaggccgacacaacagcagagaaaacagcagacaatgtctcttctagcaccccgctctgtgtgatcaccaatcgccctcttcctagcactgcc

SEQ ID NO: 171016 - DNA, 350 bp, Homo sapiens
  Payload ID: 13644
  Gene Symbol: PPP1R12B
  Gene Name: protein phosphatase 1, regulatory subunit 12B
  ENST ID: ENST00000466273
  CDS Start-End: 1-25
gtggcaggttacatgttcgaattgacttgctagtagcatctcacctccttgagtgaaggaacgtcttcttgaaggacaacttaaaagcctactcagagtatcaagattcagtgggtagagcatcagcattcttctgctgtccttgacatagcatgaaagactttctaggttggaatcgggaggtagtaatcctacaaccagtgattcttacggtgaccgggcttcagcaagagcccgtcgggaggcccgggaggcccgcctagccaccctgaccagccgtgtagaagaagacagcaacagagattataaaaaactctatgagagtgctctgactgaaaaccaaaaactga

SEQ ID NO: 171017 - DNA, 2924 bp, Homo sapiens
  Payload ID: 13645
  Gene Symbol: PPP1R12C
  Gene Name: protein phosphatase 1, regulatory subunit 12C
  Uniprot ID: Q9BZL4
  ENST ID: ENST00000263433
  CDS Start-End: 17-2365
gcgggcgggcggtgcgatgtccggagaggatggcccggcggctggcccgggggcggcggcggcggctgcccgggagcggcgacgggagcagctgcggcagtggggggcgcgggcgggcgccgagcctggccccggagagcgccgcgcccgcaccgtccgcttcgagcgcgccgccgagttcctggcggcctgtgcgggcggcgacctggacgaggcgcgtctgatgctgcgcgccgccgaccctggccccggcgccgagctcgaccccgccgcgccgccgcccgcccgcgccgtgctggactccaccaacgccgacggtatcagcgccctgcaccaggcctgcattgatgagaacctggaggtggtgcgcttcttggtggagcagggcgccactgtgaaccaggcagacaacgagggctggacgccactgcacgtggccgcctcctgtggctacctagatatcgccaggtacctcctgagccacggggccaacatcgccgccgtcaacagtgacggggacctgcccctggacctggccgagtcggacgccatggaggggctgctgaaggcggagatcgcccgccgaggtgtggatgtggaagcagccaagcgggcagaagaggaattgctccttcatgacacgaggtgctggctgaatgggggcgccatgccagaggcccggcacccccgcacaggcgcctctgccctgcacgtggctgctgccaagggctacattgaggtgatgaggttgctccttcaggctggctacgacccagagctccgggacggggacggctggactcccctgcacgcagcggcacactggggcgtggaggatgcctgccgcctgctggccgagcatggcgggggcatggactcactgacccatgcggggcagcgtccctgtgacctggccgatgaggaagtactgagcctgttggaggaactggcccggaaacaggaggaccttcggaaccaaaaagaagcttcccagagccggggccaggagccccaagcgccctctagcagcaaacacagaaggagctctgtgtgtcgtctgagcagtcgcgagaagatttccctccaggacttgtccaaggagcgccggcctggtggggctggggggccccccatccaggacgaggatgagggggaagaaggtcccaccgaaccaccccctgcagaacccagaaccctcaatggcgtctcctccccgccgcaccccagccctaagagtcccgtgcagcttgaagaggcccccttctccaggcgctttggcctcctgaagacagggagttctggtgccctgggtccccctgaaaggcggacagcggagggagcccctggggctgggctgcagcgctcggcttcctcctcctggctggaagggacctccactcaggccaaggagctccgtcttgccagaattaccccgaccccctccccgaagctgccggagccctctgtcctgtctgaggtcaccaagcctcctccttgcttggagaactcctcgcctccctccaggattccggagcctgaatccccagcgaagccaaacgtccccacagcctccacggcgcccccagcggactcccgggaccgacggaggtcctaccagatgcctgtgcgggatgaggagtcggaatcccagagaaaagctcgctcccgtctcatgcgccagtctcggaggtccacacagggtgtgactcttacagacctgaaggaggcagagaaggctgcagggaaggccccagagtcagagaagccggcgcagagcctggacccttcccgaaggccccgcgtccctggagtggagaactctgacagccctgcccagagagcagaggcgcccgacgggcagggtccgggaccgcaggcggccagggagcaccgcaaggtcggaaaggagtggagggggcctgcggagggggaggaggcggagccggctgaccgcagccaggagtccagcaccctggagggcggcccctcggcccgcaggcagcggtggcagcgggacctcaacccagaacctgagccagaatcggaagagccagacggaggctttaggacgctgtatgcagagctgcgcagggagaacgagcggcttcgcgaggccctgaccgagaccacgctgcggctggcgcagctcaaggtggagctggagcgggccacgcagaggcaagaacgcttcgctgagaggccagccctcctggaactggagagattcgagcgcagggccctggaacgcaaggccgcagagctggaggaggagctgaaggccctgtctgacctccgcgctgacaaccagcgcctcaaggatgagaatgcagcgttgatccgcgtcatcagcaaactctccaagtgacccggagggactttcccgcacccgtatttatacagctgcttctgccacacgcaccccttcccccgtgtgaacacgagtgacagggctccgggggaagtctcagagaagccatagcccccctgggacctccggactgggaggggagcagagtccccaggagccgagggggccacccgaggccaggatggaggtgggaggccgagccaagcagggggacgttgccagaggggaccagggccagagacgggaccaggaaggaactgaggaccaagaagtgcaaggatcagtagccaggaccagagtggccgcctggaggtccccatctcacgtgtgatgccaccccgtcacccctcccctcctgagcagggatccaagaatgtgccaagagtcccgccagcctcagccaggtgggcctgtatatagggtccatgtgcaatagggagggacgtcttctattttttgctgccccctccccgcccactgtctggggcagggggagaaggtattttcgagataaagcacaggcaccacaaataaaagtcgtgaagttgccactcaa

SEQ ID NO: 171018 - DNA, 2363 bp, Homo sapiens
  Payload ID: 13645
  Gene Symbol: PPP1R12C
  Gene Name: protein phosphatase 1, regulatory subunit 12C
  Uniprot ID: Q9BZL4
  ENST ID: ENST00000435544
  CDS Start-End: 129-2252
actccttcctcagctccagttcaggtcccggagcccacccagtgtccacaaggcctggggcaagtccctcctccgaccccctggacttcggcttttgtccccccaagttttggacccctaagggaagaatgagaaacggtggcccgtgtcagcccctggctgcagggccccgtgcagagggggcctcagtgaactggagtgtgacagcctggggcccaggcacacaggcctgcattgatgagaacctggaggtggtgcgcttcttggtggagcagggcgccactgtgaaccaggcagacaacgagggctggacgccactgcacgtggccgcctcctgtggctacctagatatcgccaggtacctcctgagccacggggccaacatcgccgccgtcaacagtgacggggacctgcccctggacctggccgagtcggacgccatggaggggctgctgaaggcggagatcgcccgccgaggtgtggatgtggaagcagccaagcgggcagaagaggaattgctccttcatgacacgaggtgctggctgaatgggggcgccatgccagaggcccggcacccccgcacaggcgcctctgccctgcacgtggctgctgccaagggctacattgaggtgatgaggttgctccttcaggctggctacgacccagagctccgggacggggacggctggactcccctgcacgcagcggcacactggggcgtggaggatgcctgccgcctgctggccgagcatggcgggggcatggactcactgacccatgcggggcagcgtccctgtgacctggccgatgaggaagtactgagcctgttggaggaactggcccggaaacaggaggaccttcggaaccaaaaagaagcttcccagagccggggccaggagccccaagcgccctctagcagcaaacacagaaggagctctgtgtgtcgtctgagcagtcgcgagaagatttccctccaggacttgtccaaggagcgccggcctggtggggctggggggccccccatccaggacgaggatgagggggaagaaggtcccaccgaaccaccccctgcagaacccagaaccctcaatggcgtctcctccccgccgcaccccagccctaagagtcccgtgcagcttgaagaggcccccttctccaggcgctttggcctcctgaagacagggagttctggtgccctgggtccccctgaaaggcggacagcggagggagcccctggggctgggctgcagcgctcggcttcctcctcctggctggaagggacctccactcaggccaaggagctccgtcttgccagaattaccccgaccccctccccgaagctgccggagccctctgtcctgtctgaggtcaccaagcctcctccttgcttggagaactcctcgcctccctccaggattccggagcctgaatccccagcgaagccaaacgtccccacagcctccacggcgcccccagcggactcccgggaccgacggaggtcctaccagatgcctgtgcgggatgaggagtcggaatcccagagaaaagctcgctcccgtctcatgcgccagtctcggaggtccacacagggtgtgactcttacagacctgaaggaggcagagaaggctgcagggaaggccccagagtcagagaagccggcgcagagcctggacccttcccgaaggccccgcgtccctggagtggagaactctgacagccctgcccagagagaggcgcccgacgggcagggtccgggaccgcaggcggccagggagcaccgcaaggtcggaaaggagtggagggggcctgcggagggggaggaggcggagccggctgaccgcagccaggagtccagcaccctggagggcggcccctcggcccgcaggcagcggtggcagcgggacctcaacccagaacctgagccagaatcggaagagccagacggaggctttaggacgctgtatgcagagctgcgcagggagaacgagcggcttcgcgaggccctgaccgagaccacgctgcggctggcgcagctcaaggtggagctggagcgggccacgcagaggcaagaacgcttcgctgagaggccagccctcctggaactggagagattcgagcgcagggccctggaacgcaaggccgcagagctggaggaggagctgaaggccctgtctgacctccgcgctgacaaccagcgcctcaaggatgagaatgcagcgttgatccgcgtcatcagcaaactctccaagtgacccggagggactttcccgcacccgtatttatacagctgcttctgccacacgcaccccttcccccgtgtgaacacgagtgacagggctccgggggaagtctcagagaagcca

SEQ ID NO: 171019 - DNA, 2269 bp, Homo sapiens
  Payload ID: 13645
  Gene Symbol: PPP1R12C
  Gene Name: protein phosphatase 1, regulatory subunit 12C
  ENST ID: ENST00000592993
  CDS Start-End: 1-2213
cccgcaccgtccgcttcgagcgcgccgccgagttcctggcggcctgtgcgggcggcgacctggacgaggcgcgtctgatgctgcgcgccgccgaccctggccccggcgccgagctcgaccccgccgcgccgccgcccgcccgcgccgtgctggactccaccaacgccgacggtatcagcgccctgcaccaggcctgcattgatgagaacctggaggtggtgcgcttcttggtggagcagggcgccactgtgaaccaggcagacaacgagggctggacgccactgcacgtggccgcctcctgtggctacctagatatcgccaggtacctcctgagccacggggccaacatcgccgccgtcaacagtgacggggacctgcccctggacctggccgagtcggacgccatggaggggctgctgaaggcggagatcgcccgccgaggtgtggatgtggaagcagccaagcgggcagaagaggaattgctccttcatgacacgaggtgctggctgaatgggggcgccatgccagaggcccggcacccccgcacaggcgcctctgccctgcacgtggctgctgccaagggctacattgaggtgatgaggttgctccttcaggctggctacgacccagagctccgggacggggacggctggactcccctgcacgcagcggcacactggggcgtggaggatgcctgccgcctgctggccgagcatggcgggggcatggactcactgacccatgcggggcagcgtccctgtgacctggccgatgaggaagtactgagcctgttggaggaactggcccggaaacaggaggaccttcggaaccaaaaagaagcttcccagagccggggccaggagccccaagcgccctctagcagcaaacacagaaggagctctgtgtgtcgtctgagcagtcgcgagaagatttccctccaggacttgtccaaggagcgccggcctggtggggctggggggccccccatccaggacgaggatgagggggaagaaggtcccaccgaaccaccccctgcagaacccagaaccctcaatggcgtctcctccccgccgcaccccagccctaagagtcccgtgcttgaagaggcccccttctccaggcgctttggcctcctgaagacagggagttctggtgccctgggtccccctgaaaggcggacagcggagggagcccctggggctgggctgcagcgctcggcttcctcctcctggctggaagggacctccactcaggccaaggagctccgtcttgccagaattaccccgaccccctccccgaagctgccggagccctctgtcctgtctgaggtcaccaagcctcctccttgcttggagaactcctcgcctccctccaggattccggagcctgaatccccagcgaagccaaacgtccccacagcctccacggcgcccccagcggactcccgggaccgacggaggtcctaccagatgcctgtgcgggatgaggagtcggaatcccagagaaaagctcgctcccgtctcatgcgccagtctcggaggtccacacagggtgtgactcttacagacctgaaggaggcagagaaggctgcagggaaggccccagagtcagagaagccggcgcagagcctggacccttcccgaaggccccgcgtccctggagtggagaactctgacagccctgcccagagagaggcgcccgacgggcagggtccgggaccgcaggcggccagggagcaccgcaaggtcggaaaggagtggagggggcctgcggagggggaggaggcggagccggctgaccgcagccaggagtccagcaccctggagggcggcccctcggcccgcaggcagcggtggcagcgggacctcaacccagaacctgagccagaatcggaagagccagacggaggctttaggacgctgtatgcagagctgcgcagggagaacgagcggcttcgcgaggccctgaccgagaccacgctgcggctggcgcagctcaaggtggagctggagcgggccacgcagaggcaagaacgcttcgctgagaggccagccctcctggaactggagagattcgagcgcagggccctggaacgcaaggccgcagagctggaggaggagctgaaggccctgtctgacctccgcgctgacaaccagcgcctcaaggatgagaatgcagcgttgatccgcgtcatcagcaaactctccaagtgacccggagggactttcccgcacccgtatttatacagctgcttctgccacacgcaccc

SEQ ID NO: 171020 - DNA, 1262 bp, Homo sapiens
  Payload ID: 13645
  Gene Symbol: PPP1R12C
  Gene Name: protein phosphatase 1, regulatory subunit 12C
  ENST ID: ENST00000591938
  CDS Start-End: 1-704
ctgaggtcaccaagcctcctccttgcttggagaactcctcgcctccctccaggattccggagcctgaatccccagcgaagccaaacgtccccacagcctccacggcgcccccagcggactcccgggaccgacggaggtcctaccagatgcctgtgcgggatgaggagtcggaatcccagagaaaagctcgctcccgtctcatgcgccagtctcggaggtccacacagggtgtgactcttacagacctgaaggaggcagagaaggctgcagggaaggcggagccggctgaccgcagccaggagtccagcaccctggagggcggcccctcggcccgcaggcagcggtggcagcgggacctcaacccagaacctgagccagaatcggaagagccagacggaggctttaggacgctgtatgcagagctgcgcagggagaacgagcggcttcgcgaggccctgaccgagaccacgctgcggctggcgcagctcaaggtggagctggagcgggccacgcagaggcaagaacgcttcgctgagaggccagccctcctggaactggagagattcgagcgcagggccctggaacgcaaggccgcagagctggaggaggagctgaaggccctgtctgacctccgcgctgacaaccagcgcctcaaggatgagaatgcagcgttgatccgcgtcatcagcaaactctccaagtgacccggagggactttcccgcacccgtatttatacagctgcttctgccacacgcaccccttcccccgtgtgaacacgagtgacagggctccgggggaagtctcagagaagccatagcccccctgggacctccggactgggaggggagcagagtccccaggagccgagggggccacccgaggccaggatggaggtgggaggccgagccaagcagggggacgttgccagaggggaccagggccagagacgggaccaggaaggaactgaggaccaagaagtgcaaggatcagtagccaggaccagagtggccgcctggaggtccccatctcacgtgtgatgccaccccgtcacccctcccctcctgagcagggatccaagaatgtgccaagagtcccgccagcctcagccaggtgggcctgtatatagggtccatgtgcaatagggagggacgtcttctattttttgctgccccctccccgcccactgtctggggcagggggagaaggtattttcgagataaagcacaggcaccacaaataaaagtcgtgaagttgccactca

SEQ ID NO: 171021 - DNA, 3104 bp, Homo sapiens
  Payload ID: 13646
  Gene Symbol: PPP1R13L
  Gene Name: protein phosphatase 1, regulatory subunit 13 like
  Uniprot ID: Q8WUF5
  ENST ID: ENST00000360957
  CDS Start-End: 62-2548
gctggaggaagcccccaggtgccaggatctgcccggatccgcgcccgctccggccggcaccatggacagcgaggcattccagagcgcgcgggactttctggacatgaacttccagtcgctggccatgaaacacatggatctgaagcagatggagctggacacggcggcggccaaggtggatgaactgaccaagcagctggagtcgctgtggtcagactctcccgcgcctcctggcccgcaggccggacccccttctaggccgccccggtacagctccagctcgatccctgagcccttcggcagccgagggtccccccggaaggcggccaccgacggcgcagacaccccgttcggacgatcagagagtgccccaaccctacacccctacagcccgctgtcccccaagggacggccgtcgtcgccgcgcaccccgctctacctgcagccggacgcctacggcagcctggaccgcgcgacctcgccccggccccgcgccttcgatggcgcaggcagctccctcggccgtgcgccctccccgcggcccgggccaggcccgctccgccagcagggtccccccacgcctttcgacttcctgggccgcgcaggctccccccgcggcagccccctggcggaggggccccaggccttcttccccgagcgtgggccgtcaccgcgcccccctgccacagcctacgacgcgccagcgtccgccttcgggagctccctgctaggctccggcggcagcgcattcgccccgcctctgcgcgcgcaagacgacctgacgctgcgccggcggcctccgaaagcctggaacgagtctgacctggacgtggcgtacgagaagaagccttcgcagacagcgagctatgaacgcctggacgtcttcgcaaggcctgcctcgccgagcctgcagctgttgccttggagggagagcagcctggatggactggggggcaccggcaaggacaacctcactagcgccaccctgccgcgcaattacaaggtctctcctctggccagcgaccggcgttcagacgcgggcagctaccggcgctcgctgggctccgcggggccgtcgggcactttgcctcgcagctggcagcccgtcagccgcatccccatgcccccctccagcccccagccccgcggggccccgcgccagcgtcccatccccctcagcatgatcttcaagctgcagaacgccttctgggagcacggggccagccgcgccatgctccctgggtcccccctcttcacccgagcacccccgcctaagctgcagccccaaccacaaccacagccccagccacaatcacaaccacagccccagctgcccccacagccccagacccaaccccaaacccctaccccagccccccagcatccccaacagacatggccccctgtgaacgaaggaccccccaaaccccccaccgagctggagcctgagccggagatagaggggctgctgacaccagtgctggaggctggcgatgtggatgaaggccctgtagcaaggcctctcagccccacgaggctgcagccagcactgccaccggaggcacagtcggtgcccgagctggaggaggtggcacgggtgttggcggaaattccccggcccctcaaacgcaggggctccatggagcaggcccctgctgtggccctgccccctacccacaagaaacagtaccagcagatcatcagccgcctcttccatcgtcatggggggccagggcccggggggccggagccagagctgtcccccatcactgagggatctgaggccagggcagggccccctgctcctgccccaccagctcccattccacccccggccccgtcccagagcagcccaccagagcagccgcagagcatggagatgcgctctgtgctgcggaaggcgggctccccgcgcaaggcccgccgcgcgcgcctcaaccctctggtgctcctcctggacgcggcgctgaccggggagctggaggtggtgcagcaggcggtgaaggagatgaacgacccgagccagcccaacgaggagggcatcactgccttgcacaacgccatctgcggcgccaactactctatcgtggatttcctcatcaccgcgggtgccaatgtcaactcccccgacagccacggctggacacccttgcactgcgcggcgtcgtgcaacgacacagtcatctgcatggcgctggtgcagcacggcgctgcaatcttcgccaccacgctcagcgacggcgccaccgccttcgagaagtgcgacccttaccgcgagggttatgctgactgcgccacctacctggcagacgtcgagcagagtatggggctgatgaacagcggggcagtgtacgctctctgggactacagcgccgagttcggggacgagctgtccttccgcgagggcgagtcggtcaccgtgctgcggagggacgggccggaggagaccgactggtggtgggccgcgctgcacggccaggagggctacgtgccgcggaactacttcgggctgttccccagggtgaagcctcaaaggagtaaagtctagcaggatagaaggaggtttctgaggctgacagaaacaagcattcctgccttccctccagacctctccctctgttttttgctgcctttatctgcacccctcaccctgctggtggtggtccttgccaccggttctctgttctcctggaagtccagggaagaaggagggccccagccttaaatttagtaatctgccttagccttgggaggtctgggaagggctggaaatcactggggacaggaaaccacttccttttgccaaatcagatcccgtccaaagtgcctcccatgcctaccaccatcatcacatcccccagcaagccagccacctgcccagccgggcctgggatgggccaccacaccactggatattcctgggagtcactgctgacaccatctctcccagcagtcttggggtctgggtgggaaacattggtctctaccaggatccctgccccacctctccccaattaagtgccttcacacagcactggtttaatgtttataaacaaaatagagaaactttccttataaataaaagtagtttgcacagaaattga

SEQ ID NO: 171022 - DNA, 3118 bp, Homo sapiens
  Payload ID: 13646
  Gene Symbol: PPP1R13L
  Gene Name: protein phosphatase 1, regulatory subunit 13 like
  Uniprot ID: Q8WUF5
  ENST ID: ENST00000418234
  CDS Start-End: 80-2566
cttcctaagccttaaagagacaggacggtcgattggtctgaaattcttgaagagacaggcgcccgctccggccggcaccatggacagcgaggcattccagagcgcgcgggactttctggacatgaacttccagtcgctggccatgaaacacatggatctgaagcagatggagctggacacggcggcggccaaggtggatgaactgaccaagcagctggagtcgctgtggtcagactctcccgcgcctcctggcccgcaggccggacccccttctaggccgccccggtacagctccagctcgatccctgagcccttcggcagccgagggtccccccggaaggcggccaccgacggcgcagacaccccgttcggacgatcagagagtgccccaaccctacacccctacagcccgctgtcccccaagggacggccgtcgtcgccgcgcaccccgctctacctgcagccggacgcctacggcagcctggaccgcgcgacctcgccccggccccgcgccttcgatggcgcaggcagctccctcggccgtgcgccctccccgcggcccgggccaggcccgctccgccagcagggtccccccacgcctttcgacttcctgggccgcgcaggctccccccgcggcagccccctggcggaggggccccaggccttcttccccgagcgtgggccgtcaccgcgcccccctgccacagcctacgacgcgccagcgtccgccttcgggagctccctgctaggctccggcggcagcgcattcgccccgcctctgcgcgcgcaagacgacctgacgctgcgccggcggcctccgaaagcctggaacgagtctgacctggacgtggcgtacgagaagaagccttcgcagacagcgagctatgaacgcctggacgtcttcgcaaggcctgcctcgccgagcctgcagctgttgccttggagggagagcagcctggatggactggggggcaccggcaaggacaacctcactagcgccaccctgccgcgcaattacaaggtctctcctctggccagcgaccggcgttcagacgcgggcagctaccggcgctcgctgggctccgcggggccgtcgggcactttgcctcgcagctggcagcccgtcagccgcatccccatgcccccctccagcccccagccccgcggggccccgcgccagcgtcccatccccctcagcatgatcttcaagctgcagaacgccttctgggagcacggggccagccgcgccatgctccctgggtcccccctcttcacccgagcacccccgcctaagctgcagccccaaccacaaccacagccccagccacaatcacaaccacagccccagctgcccccacagccccagacccaaccccaaacccctaccccagccccccagcatccccaacagacatggccccctgtgaacgaaggaccccccaaaccccccaccgagctggagcctgagccggagatagaggggctgctgacaccagtgctggaggctggcgatgtggatgaaggccctgtagcaaggcctctcagccccacgaggctgcagccagcactgccaccggaggcacagtcggtgcccgagctggaggaggtggcacgggtgttggcggaaattccccggcccctcaaacgcaggggctccatggagcaggcccctgctgtggccctgccccctacccacaagaaacagtaccagcagatcatcagccgcctcttccatcgtcatggggggccagggcccggggggccggagccagagctgtcccccatcactgagggatctgaggccagggcagggccccctgctcctgccccaccagctcccattccacccccggccccgtcccagagcagcccaccagagcagccgcagagcatggagatgcgctctgtgctgcggaaggcgggctccccgcgcaaggcccgccgcgcgcgcctcaaccctctggtgctcctcctggacgcggcgctgaccggggagctggaggtggtgcagcaggcggtgaaggagatgaacgacccgagccagcccaacgaggagggcatcactgccttgcacaacgccatctgcggcgccaactactctatcgtggatttcctcatcaccgcgggtgccaatgtcaactcccccgacagccacggctggacacccttgcactgcgcggcgtcgtgcaacgacacagtcatctgcatggcgctggtgcagcacggcgctgcaatcttcgccaccacgctcagcgacggcgccaccgccttcgagaagtgcgacccttaccgcgagggttatgctgactgcgccacctacctggcagacgtcgagcagagtatggggctgatgaacagcggggcagtgtacgctctctgggactacagcgccgagttcggggacgagctgtccttccgcgagggcgagtcggtcaccgtgctgcggagggacgggccggaggagaccgactggtggtgggccgcgctgcacggccaggagggctacgtgccgcggaactacttcgggctgttccccagggtgaagcctcaaaggagtaaagtctagcaggatagaaggaggtttctgaggctgacagaaacaagcattcctgccttccctccagacctctccctctgttttttgctgcctttatctgcacccctcaccctgctggtggtggtccttgccaccggttctctgttctcctggaagtccagggaagaaggagggccccagccttaaatttagtaatctgccttagccttgggaggtctgggaagggctggaaatcactggggacaggaaaccacttccttttgccaaatcagatcccgtccaaagtgcctcccatgcctaccaccatcatcacatcccccagcaagccagccacctgcccagccgggcctgggatgggccaccacaccactggatattcctgggagtcactgctgacaccatctctcccagcagtcttggggtctgggtgggaaacattggtctctaccaggatccctgccccacctctccccaattaagtgccttcacacagcactggtttaatgtttataaacaaaatagagaaactttccttataaataaaagtagtttgcacagaaa

SEQ ID NO: 171023 - DNA, 355 bp, Homo sapiens
  Payload ID: 13646
  Gene Symbol: PPP1R13L
  Gene Name: protein phosphatase 1, regulatory subunit 13 like
  ENST ID: ENST00000589371
  CDS Start-End: 1-273
gagaccgactggtggtgggccgcgctgcacggccaggagggctacgtgccgcggaactacttcgggatcccgtccaaagtgcctcccatgcctaccaccatcatcacatcccccagcaagccagccacctgcccagccgggcctgggatgggccaccacaccactggatattcctgggagtcactgctgacaccatctctcccagcagtcttggggtctgggtgggaaacattggtctctaccaggatccctgccccacctctccccaattaagtgccttcacacagcactggtttaatgtttataaacaaaatagagaaactttccttataaataaaagtagtttgcacagaaa

SEQ ID NO: 171024 - DNA, 525 bp, Homo sapiens
  Payload ID: 13646
  Gene Symbol: PPP1R13L
  Gene Name: protein phosphatase 1, regulatory subunit 13 like
  ENST ID: ENST00000593226
  CDS Start-End: 141-525
ggacggtcgattggtctgaaattcttgaagagacagctcctgccccgccccgttctccgctccccaagccggagcccgagctggaggaagcccccaggtgccaggatctgcccggatccgcgcccgctccggccggcaccatggacagcgaggcattccagagcgcgcgggactttctggacatgaacttccagtcgctggccatgaaacacatggatctgaagcagatggagctggacacggcggcggccaaggtggatgaactgaccaagcagctggagtcgctgtggtcagactctcccgcgcctcctggcccgcaggccggacccccttctaggccgccccggtacagctccagctcgatccctgagcccttcggcagccgagggtccccccggaaggcggccaccgacggcgcagacaccccgttcggacgatcagagagtgccccaaccctacacccctacagcccgctgtcccccaagggacggccgtcgtcgccgcgcaccccgctctacctgcagc

SEQ ID NO: 171025 - DNA, 648 bp, Homo sapiens
  Payload ID: 13646
  Gene Symbol: PPP1R13L
  Gene Name: protein phosphatase 1, regulatory subunit 13 like
  ENST ID: ENST00000591986
  CDS Start-End: 1-89
tcgagaagtgcgacccttaccgcgagggttatgctgactgcgccacctacctggcagctgttccccagggtgaagcctcaaaggagtaaagtctagcaggatagaaggaggtttctgaggctgacagaaacaagcattcctgccttccctccagacctctccctctgttttttgctgcctttatctgcacccctcaccctgctggtggtggtccttgccaccggttctctgttctcctggaagtccagggaagaaggagggccccagccttaaatttagtaatctgccttagccttgggaggtctgggaagggctggaaatcactggggacaggaaaccacttccttttgccaaatcagatcccgtccaaagtgcctcccatgcctaccaccatcatcacatcccccagcaagccagccacctgcccagccgggcctgggatgggccaccacaccactggatattcctgggagtcactgctgacaccatctctcccagcagtcttggggtctgggtgggaaacattggtctctaccaggatccctgccccacctctccccaattaagtgccttcacacagcactggtttaatgtttataaacaaaatagagaaactttccttataaataaaagtagtttgcacagaaa

SEQ ID NO: 171026 - DNA, 392 bp, Homo sapiens
  Payload ID: 13646
  Gene Symbol: PPP1R13L
  Gene Name: protein phosphatase 1, regulatory subunit 13 like
  ENST ID: ENST00000592134
  CDS Start-End: 213-392
ctccgctccccaagccggagcccgagctggaggaagcccccaggtgccaggatctgcccggatcctctcttcttcctgaggcctcaattctcagagctctgaattcttcctgcaccttctgaccaggtggattcttacagtagtcctatgaggtgaactttcatccccattttacggattacgagactgaggcgcccgctccggccggcaccatggacagcgaggcattccagagcgcgcgggactttctggacatgaacttccagtcgctggccatgaaacacatggatctgaagcagatggagctggacacggcggcggccaaggtggatgaactgaccaagcagctggagtcgctgtggtcagactctcccgcgcctcctggcccgcag

SEQ ID NO: 171027 - DNA, 2504 bp, Homo sapiens
  Payload ID: 13646
  Gene Symbol: PPP1R13L
  Gene Name: protein phosphatase 1, regulatory subunit 13 like
  ENST ID: ENST00000612351
  CDS Start-End: 906-1952
ggctggagtgcagtggtgcagtggtgcaatctcggctcactgcaacctccgcctcctgggttcaagcgattcctgtgcctcagccttccgagtagctgggattacaggcatgtgccaccacgcccagctaatttttttttttttttttttttttttgtatttttagtagagacagggttttaccatgttggccaggctggtctcaaactcctgatctcaagagatctgcctgcctcggcctcccaaagttctgggattacaggtgtgagccactcgactcagccaataatgcatatttttatttccacctgctttactgtcagaatgagtaagacagagaagaaatcattaaacaccaggattctacttcctgctggagttttctgcctgagatgttaggagaggaaactctcaggatctcagaaaatcacatctatcacggttggtagaagtagattctagagtcagccagaactgagttcaagtcccaactgcatggctttgggcaactgacttgtcctctctgaggcccagattccctttcggtaatgtggagatggcagtgtatctacctcacaaagcagtggtgagattacaataaggtaggcatgtaaagcgccaggcacatactaactgctcaataaatgggaggcatcataattgtatattattcacagcccaaggaaagtgtagcccagagagggcaaggaacttccctgaggtcacacagaaaatcatgtgctggttgtatgccctggaagttgtggagagggagtgttgggtgtctcctggggacctgtcctctgatgggctcttgttccggctaggaccccccaaaccccccaccgagctggagcctgagccggagatagaggggctgctgacaccagtgctggaggctggcgatggaaggccctgtagcaaggcctctcagccccacgaggctgcagccagcactgccaccggaggcacagtcggtgcccgagctggaggaggtggcacgggtgttggcggaaattccccggcccctcaaacgcaggggctccatggagcaggcccctgctgtggccctgccccctacccacaagaaacagtaccagcagatcatcagccgcctcttccatcgtcatggggggccagggcccggggggcggagccagagctgtcccccatcactgagggatctgaggccagggcagggccccctgctcctgccccaccagctcccattccaccccgccccgtcccagagcagcccaccagagcagccgcagagcatggagatgcgctctgtgctgcggaaggcgggctccccgcgcaaggcccgccgcgcgcgcctcaaccctctggtgctcctcctggacgcggcgctgaccggggagctggaggtggtgcagcaggcggtgaaggagatgaacgacccgagccagcccaacgaggagggcatcactgccttgcacaacgccatctgcggcgccaactactctatcgtggatttcctcatcaccgcgggtgccaatgtcaactcccccgacagccacggctggacacccttgcactgcgcggcgtcgtgcaacgacacagtcatctgcatggcgctggtgcagcacggcgctgcaatcttcgccaccacgctcagcgacggcgccaccgccttcgagaagtgcgacccttaccgcgagggttatgctgactgcgccacctacctggcagacgtcgagcagagtatggggctgatgaacagcggggcagtgtacgctctctgggactacagcgccgagttcggggacgagctgtccttccgcgagggcgagtcggtcaccgtgctgcggagggacgggccggaggagaccgactggtggtgggccgcgctgcacggccaggagggctacgtgccgcggaactacttcgggctgttccccagggtgaagcctcaaaggagtaaagtctagcaggatagaaggaggtttctgaggctgacagaaacaagcattcctgccttccctccagacctctccctctgttttttgctgcctttatctgcacccctcaccctgctggtggtggtccttgccaccggttctctgttctcctggaagtccagggaagaaggagggccccagccttaaatttagtaatctgccttagccttgggaggtctgggaagggctggaaatcactggggacaggaaaccacttccttttgccaaatcagatcccgtccaaagtgcctcccatgcctaccaccatcatcacatcccccagcaagccagccacctgcccagccgggcctgggatgggccaccacaccactggatattcctgggagtcactgctgacaccatctctcccagcagtcttggggtctgggtgggaaacattggtctctaccaggatccctgccccacctctccccaattaagtgccttcacacagcactggtttaatgtttataaacaaaatagagaaactttccttataaataaaagtagtttgcacagaaa

SEQ ID NO: 171028 - DNA, 4958 bp, Homo sapiens
  Payload ID: 13647
  Gene Symbol: PPP1R13B
  Gene Name: protein phosphatase 1, regulatory subunit 13B
  Uniprot ID: Q96KQ4
  ENST ID: ENST00000202556
  CDS Start-End: 284-3556
gggcgggcgggccgcaggctgtcgggctggggctgaggctgaggctgaggttgaggcggcggcggcggcggccgggtgcccgggacagcgacgcagcgcgccggcggccgcgacagggccagcgagagccccgcagcccgccgcagctgccgcctcgccgcggccgggccggagagcacggcggcgggagcgcggccttaggaggcggccggagcggtgggcacagctcggcgcggagcgtcctgtcaggcggcggccgagggcgtcgcggactctccccgcgatgatgccgatgatattaactgttttcttgagcaacaatgaacagattttaacagaagttcctataacaccggaaacaacctgtcgagatgttgtagaattttgcaaggaacctggagaaggcagctgccatttagctgaagtgtggaggggaaatgaacgtcccataccctttgatcatatgatgtacgaacatcttcagaaatggggtccacggagggaagaagtgaaatttttccttcgacacgaggactccccaactgagaacagtgaacaaggtggccgtcagacccaagagcaacgaactcagagaaatgtaataaatgtacctggagaaaaacgtactgaaaatggggttgggaatccacgtgttgaacttaccctctcagagctccaagatatggcagctaggcaacagcagcagattgaaaatcagcagcagatgttggttgccaaggaacagcgtttacattttctaaagcaacaggagcgccgtcagcagcagtctatttctgaaaatgaaaagcttcagaaattgaaagaacgagttgaagcccaggagaacaagctgaagaaaattcgtgcaatgagaggacaagtcgactacagcaaaatcatgaacggcaatctgtctgctgaaatagaaaggttcagtgccatgttccaggaaaagaagcaggaagtacagactgcaattttaagggttgatcagcttagtcagcaattggaagatttaaagaaaggaaaactgaatgggttccagtcttacaatggcaaattgacgggaccagcggcggtggagttaaaaagactgtaccaagaactacagattcgtaaccaacttaaccaggaacaaaattcaaaacttcagcagcagaaggaactcttaaataagcgcaacatggaggtggccatgatggacaagcgaatcagtgaactgcgtgaacgtctctatgggaaaaaaattcagctgaaccgtgtgaatggcacgtcatcaccacagtcccctctgagcacatcgggcagggtcgctgctgtggggccttatatccaggttcccagtgccggaagctttcctgtgctgggggaccctataaagccccagtctctcagtattgcctcaaatgctgctcatggaagatccaaatccgctaatgatggaaactggccaacattaaaacagaattctagctcttccgtgaaaccagtgcaggtggccggtgcagactggaaggatccgagcgtggaggggtctgtcaagcagggcactgtctccagccagcctgtgcccttctcagcactgggacccacggagaagccgggcatcgagattggtaaagtgccacctcccatcccgggtgtaggcaagcagctgcctccaagctatgggacatacccaagtcctacacctctgggtcctgggtcgacaagctccctggaaaggaggaaggaaggcagcttgcccaggcccagtgcaggcctgccaagtcgacagaggcccaccctgctgcccgccacaggcagcaccccccagccaggctcctcacaacagattcagcagaggatttccgtaccgccaagtcccacgtacccgccagcgggaccacctgcatttccagctggggacagcaagcctgaactcccactgacagtggccattaggcctttcctggctgataaagggtcaaggccacagtctcccaggaaaggaccccagacagtgaattcaagttccatatactccatgtacctccagcaagccacaccacctaagaattaccagccggcagcacacagcgccttaaataagtcagttaaagcagtgtatggtaagcccgttttaccttcgggttcaacctctccatcgccgctgccgtttcttcacgggtcactgtccacgggcacaccacagcctcagccaccttcagaaagtactgagaaagagcctgagcaggatggccccgccgcccccgcagatggcagcaccgtggagagcctgccacggccactcagccccaccaagctcacgcccatcgtgcattcgccactgcgctaccagagtgatgcagacctggaggccctccgcaggaagctggccaacgcgccccggcccctgaaaaagcgcagctccatcacagagcccgagggccccggcgggcccaacatccagaagctgctgtaccagcgcttcaacaccctggccggtggcatggagggcacccctttctaccagcccagcccctcccaggacttcatgggcaccttggccgatgtggacaatggaaacaccaatgccaatggaaacctggaagagctcccccctgcccagcccacagccccactccccgctgagcctgccccgtcatcagatgccaatgataatgagttaccttcccccgaaccagaggagctcatctgtccccaaaccacccaccaaactgccgagccggcagaggacaataacaacaacgtggccacggtccccaccacggagcagatcccgagtcctgtggctgaggccccatctccaggggaagagcaggtccctccagcacctcttccccctgccagccaccctcctgccacctccacgaacaagcggaccaacttgaagaagcccaactcggagcggacggggcacgggctgagagtccggtttaaccccctggcactgctcctagacgcgtctctggaaggagagttcgatctggtgcagaggatcatctatgaggtggaagatcccagcaagcccaacgacgaagggatcaccccactgcacaacgccgtctgcgccggccaccatcacatcgtgaagttcctgctggattttggtgtcaacgtgaatgctgctgatagtgatggatggacgccgctgcactgcgctgcctcttgtaacagcgttcacctctgcaaacagctggtggagagtggtgccgccatttttgcctcaaccataagcgacattgaaactgctgcagacaagtgtgaggagatggaggaaggctacatccagtgctcccagtttctatatggggtgcaggaaaagctgggtgtgatgaacaaaggtgtggcgtatgctctgtgggactacgaggcccagaacagtgacgagctgtccttccacgaaggggacgccctcaccatcctgaggcgcaaggacgaaagcgagactgagtggtggtgggctcgccttggagaccgggagggctatgtgcccaaaaacctgctggggctgtatccacggatcaaaccccgacagcgaacactcgcctgaacttccttttggagcaccgcatggtcttgccagctaccaggagccacttaagagattattgtgctgttttccaggaaagctgcagctagaaaatggtcttaatggtgctcactttagcagacagcgtccacaatgtgaatcctacagtttccaggtgaggccctttctccagtttgcccattaactgggagaggtactttcgcctccaaggactgaattttgccaattactataaatccaaataaatacccactttcaaaacacccacccctcttgccattaagaagtcccataacccccggttggttgccagtgaagacagaagctcttactgacttggccccgaggccatcaccccctccagcagtgaacactgtccgccgctgtgaggcctgctcccctgcgaccgccctgccccccgtcaccgaatcggacactcatcctttctcacacttcccacacatgatccttcttcccttcatcaccaaaggagcctctgtatggaaacatgtccagtgttgctgcccagtgtgtatgcctcccagtacccactctgctcggccgccttgggggttccgcttcctgttccagttcacctaaaggctgattgtgcaggcccagcactgtggctggactgccgcgccacgggcaccaggacccctaagaccaagtgacaactgggagagcctcagcatatactcttctcctccgatctcacagcctgtcatgctgctcagtgtggttctcacccctgcaagctcaaattcagttccctgaatggagtcaggtgctggaggccgtggcagcggagggtggttggggttggggctgggggtggactggtgtgagggcagaccagggccaggtagacggggctgtttggtgcctgaaggatggcagacgcctggtgtcaggaggggccgccaccaaggagcagcagctggggcagaggagctggggtcaggggccacccctctctgccgatctccctgcctgggctggctgtgaggccacctttgtcccaggcccagcctcaaggcaaggagggcgcttcactgaggtgtgaattgtacgtacaggctttttatataccaaaagtattttttgactagaccattcaaagctacccgaactatgttggaaattttttttttctcattaaaatacaggcccttaggctctatttttcatgtatgagtcgtgtgtaatttatgtaaaaatgtgtgtacagactcactgatgcagcactgtagcccatcaccttggagcactgactgtacatagtgtggtgaagaaaagtgaacgcccttgtagagcagcccgaccacaggagcatggccgctgccagcccagacgctgctgacgctgtgtaaatgtgcacaataaacccgtctcaccccgg

SEQ ID NO: 171029 - DNA, 611 bp, Homo sapiens
  Payload ID: 13647
  Gene Symbol: PPP1R13B
  Gene Name: protein phosphatase 1, regulatory subunit 13B
  ENST ID: ENST00000553739
  CDS Start-End: 181-611
gcggccgcgacagggccagcgagagccccgcagcccgccgcagctgccgcctcgccgcggccgggccggagagcacggcggcgggagcgcggccttaggaggcggccggagcggtgggcacagctcggcgcggagcgtcctgtcaggcggcggccgagggcgtcgcggactctccccgcgatgatgccgatgatattaactgttttcttgagcaacaatgaacagattttaacagaagttcctataacaccggaaacaacctgtcgagatgttgtagaattttgcaaggaacctggagaaggcagctgccatttagctgaagtgtggaggggaaatggtttcagagaaccctcacataaaacttactgcacctggccgggcactgtggctcactcttgtaatctcaacactttgggaggccgagaacgtcccataccctttgatcatatgatgtacgaacatcttcagaaatggggtccacggagggaagaagtgaaatttttccttcgacacgaggactccccaactgagaacagtgaacaaggtggccgtcagacccaagagcaacgaactcagagaaatgtaataaatgtacctggagaaaaacgtac

SEQ ID NO: 171030 - DNA, 4254 bp, Homo sapiens
  Payload ID: 13647
  Gene Symbol: PPP1R13B
  Gene Name: protein phosphatase 1, regulatory subunit 13B
  ENST ID: ENST00000557082
  CDS Start-End: 106-474
actctgcaggcgcattcccgtagccttcgcggttgtactgaggaaaggtgccgagtgcacggatttggagagccatcttaggaattcccttttcccgtatctgcaatgttgatgatattaactgttttcttgagcaacaatgaacagattttaacagaagttcctataacaccggaaacaacctgtcgagatgttgtagaattttgcaaggaacctggagaaggcagctgccatttagctgaagtgtggaggggaaatgaacgtcccataccctttgatcatatgatgtacgaacatcttcagaaatggggtccacggagggaagaagtgaaatttttccttcgacacgaggactccccaactgagaacagtgaacaaggtggccgtcagacccaagagcaacgaactcagagaaatgtaataaatgtacctggagaaaaacgtactgaaaatggggactcatatctgggataacatactgttacaattcaacaagaagaagacaaccaacttaaaaatagacatctcatcaaagaagagagacaagtggctaacaggcatatgaaaagatgcttaacatttccagtcattggggaaacgcaaattgaaaccacagtgagacaccattacacatccacaagaattaagctataagcaaaaagacaaatattagcaagaatgtggacacactggtgtccattgctggtggaaatgtaaaatagtgcaatcgctttggagaacagtttggcagtcttttaaaaagctaaacataaactcaccatacaagccaggaattccactcctaggtatctactcaagagaaatgaaatatctgctcgcacagacttctatgcaaatgtgcacagcagcactgttactcataccagctaagaaatagcccaaatgtccattaactggtgaatggataaacaaattgtggtgtatccatctgactgaatatgatgcagcattaaaaagaaaccactcaacacagatgaacctcaaaaacctcacagcaggtgtgaaagactacctatggtatgacttcacttatatgaagcgtccggaagaaagttgggaatccacgtgttgaacttaccctctcagagctccaagatatggcagctaggcaacagcagcagattgaaaatcagcagcagatgttggttgccaaggaacagcgtttacattttctaaagcaacaggagcgccgtcagcagcagtctatttctgaaaatgaaaagcttcagaaattgaaagaacgagttgaagcccaggagaacaagctgaagaaaattcgtgcaatgagaggacaagtcgactacagcaaaatcatgaacggcaatctgtctgctgaaatagaaaggttcagtgccatgttccaggaaaagaagcaggaagtacagactgcaattttaagggttgatcagcttagtcagcaattggaagatttaaagaaaggaaaactgaatgggttccagtcttacaatggcaaattgacgggaccagcggcggtggagttaaaaagactgtaccaagaactacagattcgtaaccaacttaaccaggaacaaaattcaaaacttcagcagcagaaggaactcttaaataagcgcaacatggaggtggccatgatggacaagcgaatcagtgaactgcgtgaacgtctctatgggaaaaaaattcagctgaaccgtgtgaatggcacgtcatcaccacagtcccctctgagcacatcgggcagggtcgctgctgtggggccttatatccaggttcccagtgccggaagctttcctgtgctgggggaccctataaagccccagtctctcagtattgcctcaaatgctgctcatggaagatccaaatccgctaatgatggaaactggccaacattaaaacagaattctagctcttccgtgaaaccagtgcaggtggccggtgcagactggaaggatccgagcgtggaggggtctgtcaagcagggcactgtctccagccagcctgtgcccttctcagcactgggacccacggagaagccgggcatcgagattggtaaagtgccacctcccatcccgggtgtaggcaagcagctgcctccaagctatgggacatacccaagtcctacacctctgggtcctgggtcgacaagctccctggaaaggaggaaggaaggcagcttgcccaggcccagtgcaggcctgccaagtcgacagaggcccaccctgctgcccgccacaggcagcaccccccagccaggctcctcacaacagattcagcagaggatttccgtaccgccaagtcccacgtacccgccagcgggaccacctgcatttccagctggggacagcaagcctgaactcccactgacagtggccattaggcctttcctggctgataaagggtcaaggccacagtctcccaggaaaggaccccagacagtgaattcaagttccatatactccatgtacctccagcaagccacaccacctaagaattaccagccggcagcacacagcgccttaaataagtcagttaaagcagtgtatggtaagcccgttttaccttcgggttcaacctctccatcgccgctgccgtttcttcacgggtcactgtccacgggcacaccacagcctcagccaccttcagaaagtactgagaaagagcctgagcaggatggccccgccgcccccgcagatggcagcaccgtggagagcctgccacggccactcagccccaccaagctcacgcccatcgtgcattcgccactgcgctaccagagtgatgcagacctggaggccctccgcaggaagctggccaacgcgccccggcccctgaaaaagcgcagctccatcacagagcccgagggccccggcgggcccaacatccagaagctgctgtaccagcgcttcaacaccctggccggtggcatggagggcacccctttctaccagcccagcccctcccaggacttcatgggcaccttggccgatgtggacaatggaaacaccaatgccaatggaaacctggaagagctcccccctgcccagcccacagccccactccccgctgagcctgccccgtcatcagatgccaatgataatgagttaccttcccccgaaccagaggagctcatctgtccccaaaccacccaccaaactgccgagccggcagaggacaataacaacaacgtggccacggtccccaccacggagcagatcccgagtcctgtggctgaggccccatctccaggggaagagcaggtccctccagcacctcttccccctgccagccaccctcctgccacctccacgaacaagcggaccaacttgaagaagcccaactcggagcggacggggcacgggctgagagtccggtttaaccccctggcactgctcctagacgcgtctctggaaggagagttcgatctggtgcagaggatcatctatgaggtggaagatcccagcaagcccaacgacgaagggatcaccccactgcacaacgccgtctgcgccggccaccatcacatcgtgaagttcctgctggattttggtgtcaacgtgaatgctgctgatagtgatggatggacgccgctgcactgcgctgcctcttgtaacagcgttcacctctgcaaacagctggtggagagtggtgccgccatttttgcctcaaccataagcgacattgaaactgctgcagacaagtgtgaggagatggaggaaggctacatccagtgctcccagtttctatatggggtgcaggaaaagctgggtgtgatgaacaaaggtgtggcgtatgctctgtgggactacgaggcccagaacagtgacgagctgtccttccacgaaggggacgccctcaccatcctgaggcgcaaggacgaaagcgagactgagtggtggtgggctcgccttggagaccgggagggctatgtgcccaaaaacctgctggggctgtatccacggatcaaaccccgacagcgaacactcgcctgaacttccttttggagcaccgcatggtcttgccagctaccaggagccacttaagagattattgtgctgttttccaggaaagctgcagctagaaaatggtcttaatggtgctcactttagcagacagcgtccacaatgtgaatcctacagtttccaggtgaggccctttctccagtttgcccattaactgggagaggtactttcgcctccaaggactgaattttgccaattactataaatccaaataaatacccactttcaaaac

SEQ ID NO: 171031 - DNA, 671 bp, Homo sapiens
  Payload ID: 13647
  Gene Symbol: PPP1R13B
  Gene Name: protein phosphatase 1, regulatory subunit 13B
  ENST ID: ENST00000557587
  CDS Start-End: 1-320
gcaaacagctggtggagagtggtgccgccatttttgcctcaaccataagcgacattgaaactgctgcagacaagtgtgaggagatggaggaaggctacatccagtgctcccagtttctatatggaaagctgcagctagaaaatggtcttaatggtgctcactttagcagacagcgtccacaatgtgaatcctacagtttccaggagcctctgtatggaaacatgtccagtgttgctgcccagtgtgtatgcctcccagtacccactctgctcggccgccttgggggttccgcttcctgttccagttcacctaaaggctgattgtgcaggcccagcactgtggctggactgccgcgccacgggcaccaggacccctaagaccaagtgacaactgggagagcctcagcatatactcttctcctccgatctcacagcctgtcatgctgctcagtgtggttctcacccctgcaagctcaaattcagttccctgaatggagtcagactcactgatgcagcactgtagcccatcaccttggagcactgactgtacatagtgtggtgaagaaaagtgaacgcccttgtagagcagcccgaccacaggagcatggccgctgccagcccagacgctgctgacgctgtgtaaatgtgcacaataaacccgtctcaccccgg

SEQ ID NO: 171032 - DNA, 3473 bp, Homo sapiens
  Payload ID: 13647
  Gene Symbol: PPP1R13B
  Gene Name: protein phosphatase 1, regulatory subunit 13B
  ENST ID: ENST00000556597
  CDS Start-End: 1-1906
tgtggggccttatatccaggttcccagtgccggaagctttcctgtgctgggggaccctataaagccccagtctctcagtattgcctcaaatgctgctcatggaagatccaaatccgctaatgatggaaactggccaacattaaaacagaattctagctcttccgtgaaaccagtgcaggtggccggtgcagactggaaggatccgagcgtggaggggtctgtcaagcagggcactgtctccagccagcctgtgcccttctcagcactgggacccacggagaagccgggcatcgagattggtaaagtgccacctcccatcccgggtgtaggcaagcagctgcctccaagctatgggacatacccaagtcctacacctctgggtcctgggtcgacaagctccctggaaaggaggaaggaaggcagcttgcccaggcccagtgcaggcctgccaagtcgacagaggcccaccctgctgcccgccacaggcagcaccccccagccaggctcctcacaacagattcagcagaggatttccgtaccgccaagtcccacgtacccgccagcgggaccacctgcatttccagctggggacagcaagcctgaactcccactgacagtggccattaggcctttcctggctgataaagggtcaaggccacagtctcccaggaaaggaccccagacagtgaattcaagttccatatactccatgtacctccagcaagccacaccacctaagaattaccagccggcagcacacagcgccttaaataagtcagttaaagcagtgtatggtaagcccgttttaccttcgggttcaacctctccatcgccgctgccgtttcttcacgggtcactgtccacgggcacaccacagcctcagccaccttcagaaagtactgagaaagagcctgagcaggatggccccgccgcccccgcagatggcagcaccgtggagagcctgccacggccactcagccccaccaagctcacgcccatcgtgcattcgccactgcgctaccagagtgatgcagacctggaggccctccgcaggaagctggccaacgcgccccggcccctgaaaaagcgcagctccatcacagagcccgagggccccggcgggcccaacatccagaagctgctgtaccagcgcttcaacaccctggccggtggcatggagggcacccctttctaccagcccagcccctcccaggacttcatgggcaccttggccgatgtggacaatggaaacaccaatgccaatggaaacctggaagagctcccccctgcccagcccacagccccactccccgctgagcctgccccgtcatcagatgccaatgataatgagttaccttcccccgaaccagaggagctcatctgtccccaaaccacccaccaaactgccgagccggcagaggacaataacaacaacgtggccacggtccccaccacggagcagatcccgagtcctgtggctgaggccccatctccaggggaagagcaggtccctccagcacctcttccccctgccagccaccctcctgccacctccacgaacaagcggaccaacttgaagaagcccaactcggagcggacggggcacgggctgagagtccggtttaaccccctggcactgctcctagacgcgtctctggaaggagagttcgatctggtgcagaggatcatctatgaggtggaagatcccagcaagcccaacgacgaagggatcaccccactgcacaacgccgtctgcgccggccaccatcacatcgtgaagttcctgctggattttggtgtcaacgtgaatgctgctgatagtgatggatggggtgcaggaaaagctgggtgtgatgaacaaaggtgtggcgtatgctctgtgggactacgaggcccagaacagtgacgagctgtccttccacgaaggggacgccctcaccatcctgaggcgcaaggacgaaagcgagactgagtggtggtgggctcgccttggagaccgggagggctatgtgcccaaaaacctgctggggctgtatccacggatcaaaccccgacagcgaacactcgcctgaacttccttttggagcaccgcatggtcttgccagctaccaggagccacttaagagattattgtgctgttttccaggaaagctgcagctagaaaatggtcttaatggtgctcactttagcagacagcgtccacaatgtgaatcctacagtttccaggtgaggccctttctccagtttgcccattaactgggagaggtactttcgcctccaaggactgaattttgccaattactataaatccaaataaatacccactttcaaaacacccacccctcttgccattaagaagtcccataacccccggttggttgccagtgaagacagaagctcttactgacttggccccgaggccatcaccccctccagcagtgaacactgtccgccgctgtgaggcctgctcccctgcgaccgccctgccccccgtcaccgaatcggacactcatcctttctcacacttcccacacatgatccttcttcccttcatcaccaaaggagcctctgtatggaaacatgtccagtgttgctgcccagtgtgtatgcctcccagtacccactctgctcggccgccttgggggttccgcttcctgttccagttcacctaaaggctgattgtgcaggcccagcactgtggctggactgccgcgccacgggcaccaggacccctaagaccaagtgacaactgggagagcctcagcatatactcttctcctccgatctcacagcctgtcatgctgctcagtgtggttctcacccctgcaagctcaaattcagttccctgaatggagtcaggtgctggaggccgtggcagcggagggtggttggggttggggctgggggtggactggtgtgagggcagaccagggccaggtagacggggctgtttggtgcctgaaggatggcagacgcctggtgtcaggaggggccgccaccaaggagcagcagctggggcagaggagctggggtcaggggccacccctctctgccgatctccctgcctgggctggctgtgaggccacctttgtcccaggcccagcctcaaggcaaggagggcgcttcactgaggtgtgaattgtacgtacaggctttttatataccaaaagtattttttgactagaccattcaaagctacccgaactatgttggaaattttttttttctcattaaaatacaggcccttaggctctatttttcatgtatgagtcgtgtgtaatttatgtaaaaatgtgtgtacagactcactgatgcagcactgtagcccatcaccttggagcactgactgtacatagtgtggtgaagaaaagtgaacgcccttgtagagcagcccgaccacaggagcatggccgctgccagcccagacgctgctgacgctgtgtaaatgtgcacaataaacccgtctcaccccg

SEQ ID NO: 171033 - DNA, 504 bp, Homo sapiens
  Payload ID: 13647
  Gene Symbol: PPP1R13B
  Gene Name: protein phosphatase 1, regulatory subunit 13B
  ENST ID: ENST00000555734
  CDS Start-End: 57-504
cggccgcggggagaagcagatgcatttggggccggtcatctcctcggtcctctcagatgatattaactgttttcttgagcaacaatgaacagattttaacagaagttcctataacaccggaaacaacctgtcgagatgttgtagaattttgcaaggaacctggagaaggcagctgccatttagctgaagtgtggaggggaaatgaacgtcccataccctttgatcatatgatgtacgaacatcttcagaaatggggtccacggagggaagaagtgaaatttttccttcgacacgaggactccccaactgagaacagtgaacaaggtggccgtcagacccaagagcaacgaactcagagaaatgtaataaatgtacctggagaaaaacgtactgaaaatggggttgggaatccacgtgttgaacttaccctctcagagctccaagatatggcagctaggcaacagcagcagattgaaaatcagcagcagatgttggttgccaagg

SEQ ID NO: 171034 - DNA, 2378 bp, Homo sapiens
  Payload ID: 13648
  Gene Symbol: PPP1R15A
  Gene Name: protein phosphatase 1, regulatory subunit 15A
  Uniprot ID: O75807
  ENST ID: ENST00000200453
  CDS Start-End: 270-2294
ataaaagcctagtggccattgtgttcgttgctcttatcggttcccatcccagttgttgatcttatgcaagacgctgcacgaccccgcgcccgcttgtcgccacggcacttgaggcagccggagatactctgagttactcggagcccgacgcctgagggtgagatgaacgcgctggcctccctaaccgtccggacctgtgatcgcttctggcagaccgaaccggcgctcctgcccccggggtgacgcgcagctcccagccgcccagacacatggccccaggccaagcaccccatcaggctaccccgtggagggatgcccaccctttcttcctcctgtccccagtgatgggcctcctcagccgcgcctggagccgcctgaggggcctgggacctctagagccctggctggtggaagcagtaaaaggagcagctctggtagaagctggcctggagggagaagctaggactcctctggcaatcccccataccccttggggcagacgccctgaagaggaggctgaagacagtggaggccctggagaggacagagaaacactggggctgaaaaccagcagttcccttcctgaagcctggggacttttggatgatgatgatggcatgtatggtgagcgagaggcaaccagtgtccctagagggcagggaagtcaatttgcagatggccagcgtgctcccctgtctcccagccttctgataaggacactgcaaggttctgataagaacccaggggaggagaaagccgaggaagagggagttgctgaagaggagggagttaacaagttctcttatccaccatcacaccgggagtgttgtccagccgtggaggaggaggacgatgaagaagctgtaaagaaagaagctcacagaacctctacttctgccttgtctccaggatccaagcccagcacttgggtgtcttgcccaggggaggaagagaatcaagccacggaggataaaagaacagaaagaagtaaaggagccaggaagacctccgtgtccccccgatcttcaggctccgaccccaggtcctgggagtatcgttcaggagaggcgtccgaggagaaggaggaaaaggcacacaaagaaactgggaaaggagaagctgccccagggccgcaatcctcagccccagcccagaggccccagctcaagtcctggtggtgccaacccagtgatgaagaggagggtgaggtcaaggctttgggggcagctgagaaggatggagaagctgagtgtcctccctgcatccccccaccaagtgccttcctgaaggcctgggtgtattggccaggagaggacacagaggaagaggaagatgaggaagaagatgaggacagtgactctggatcagatgaggaagagggagaagctgaggcttcctcttccactcctgctacaggtgtcttcttgaagtcctgggtctatcagccaggagaggacacagaggaggaggaagatgaggacagtgatacaggatcagccgaggatgaaagagaagctgagacttctgcttccacaccccctgcaagtgctttcttgaaggcctgggtgtatcggccaggagaggacacggaggaggaggaagatgaggatgtggatagtgaggataaggaagatgattcagaagcagccttgggagaagctgagtcagacccacatccctcccacccggaccagagggcccacttcaggggctggggatatcgacctggaaaagagacagaggaagaggaagctgctgaggactggggagaagctgagccctgccccttccgagtggccatctatgtacctggagagaagccaccgcctccctgggctcctcctaggctgcccctccgactgcaaaggcggctcaagcgcccagaaacccctactcatgatccggaccctgagactcccctaaaggccagaaaggtgcgcttctccgagaaggtcactgtccatttcctggctgtctgggcagggccggcccaggccgcccgccagggcccctgggagcagcttgctcgggatcgcagccgcttcgcacgccgcatcacccaggcccaggaggagctgagcccctgcctcacccctgctgcccgggccagagcctgggcacgcctcaggaacccacctttagcccccatccctgccctcacccagaccttgccttcctcctctgtcccttcgtccccagtccagaccacgcccttgagccaagctgtggccacaccttcccgctcgtctgctgctgcagcggctgccctggacctcagtgggaggcgtggctgagaccaactggtttgcctataatttattaactatttattttttctaagtgtgggtttatataaggaataaagccttttgatttgt

SEQ ID NO: 171035 - DNA, 1725 bp, Homo sapiens
  Payload ID: 13648
  Gene Symbol: PPP1R15A
  Gene Name: protein phosphatase 1, regulatory subunit 15A
  ENST ID: ENST00000600406
  CDS Start-End: 1-776
gtgactctggatcagatgaggaagagggagaagctgaggcttcctcttccactcctgctacaggtgtcttcttgaagtcctgggtctatcagccaggagaggacacagaggaggaggaagatgaggacagtgatacaggatcagccgaggatgaaagagaagctgagacttctgcttccacaccccctgcaagtgctttcttgaaggcctgggtgtatcggccaggagaggacacggaggaggaggaagatgaggatgtggatagtgaggataaggaagatgattcagaagcagccttgggagaagctgagtcagacccacatccctcccacccggaccagagggcccacttcaggggctggggatatcgacctggaaaagagacagaggaagaggaagctgctgaggactggggagaagctgagccctgccccttccgagtggccatctatgtacctggagagaagccaccgcctccctgggctcctcctaggctgcccctccgactgcaaaggcggctcaagcgcccagaaacccctactcatgatccggaccctgagactcccctaaaggccagaaaggtaggtgctgagagcccagattctattttttttttttttttaattgagttggagtcttgggctgtcacccaggctggagtgcagcggcatgatcttggctcactgccaacctctgccgcccaagttcaggcgattctcgtgcctcagcctccagagtatctgggattacaggcgcatgacaccacacccagctaattttttttgtatttttagtagagacgggggttttgccatgttggccaggctggtctcaaactcctgacatcacgtgatccacccatctcagcctcccaaagtgctgggattacaggcgtgagctaccacatctggctgagagcccagattcttgagtcttagaaagaaagggggctgggggccgagacttctgggtccctgtatgttgcagagggttgcatgtcatctccatggagaaggctgtgtacgctgtcacgcaatcccttgtaagaggccaggcccctgggggaggagggagcagctgtggctcacagcagccccaggaaaccacctcttccttcagtgagtcagatagatagagaatcccgtgacagtgacaggcaagtgactagccagatagaaagcatttttgtgtaataactaatttttgtttgcttctctctctctcttccccgccctccccatccggattcccgtggctgtgtgcatctcctgcctgtgtccccatgtctgcccgcaggtgcgcttctccgagaaggtcactgtccatttcctggctgtctgggcagggccggcccaggccgcccgccagggcccctgggagcagcttgctcgggatcgcagccgcttcgcacgccgcatcacccaggcccaggaggagctgagcccctgcctcacccctgctgcccgggccagagcctgggcacgcctcaggaacccacctttagcccccatccctgccctcacccagaccttgccttcctcctctgtcccttcgtccccagtccagaccacgcccttgagccaagctgtggccacaccttcccgctcgtctgctgctgcagcggctgccctggacctcagtgggaggcgtggctgagaccaactggtttgcctataatttattaactatttattttttctaagtgtgggtttatataaggaataa

SEQ ID NO: 171036 - DNA, 5227 bp, Homo sapiens
  Payload ID: 13649
  Gene Symbol: PPP1R15B
  Gene Name: protein phosphatase 1, regulatory subunit 15B
  Uniprot ID: Q5SWA1
  ENST ID: ENST00000367188
  CDS Start-End: 381-2522
agccggcctacccagtccttccggtatcgcgttgctcaggggcttttcaaccctctgtcagtcggaaaaccatcgccgaggccgtggggggactcctatccatggtgttgaagcgtcgagccgactagggaacctccttccccgccaggatggaagtcgcatcagtcgccgcctattgcgcgggctgttcttccctgtgttctgccgcccgctgccgcattcgctgccctctgtggcttttctgctggctcgaagatcggcctggagcagcgacgccaccgctgggcaaggccgagactctgtaggcttcctccgaatcccgtcgacctccagccgctgagcgccgcggccctacctgagagactgtcaagaaaaaggagatggagccggggacaggcggatcgcggaaacggcttggccctcgggcgggcttccggttctggccaccctttttccctcggcgatcgcaagcaggctcttctaagttcccgacgcctcttggcccggaaaactccgggaaccccacactgctttcctctgcccagcccgagactcgggtcagttactggacgaaactgctctcccagctccttgcgccgctccccggattgcttcagaaggtgctaatttggagccaacttttcggtggaatgtttccgaccagatggctagattttgctggagtctacagcgccctgagagccctgaagggacgggagaaaccagccgcccccacagcgcagaaatctttgagttcgctgcagctcgactcctcagacccctcggtcaccagtccccttgattggctagaggaggggatccactggcaatactcgcccccagacctaaaattggagcttaaggccaagggaagtgctttggaccctgcagcacaggcttttctcttagagcagcagctgtggggagtggagctgttgcccagtagccttcaatcccgtctgtactctaaccgggaacttggctcttcgccctctgggcctctaaacattcaacgcatagacaatttcagtgtggtatcctatttgctgaacccttcctacctggactgctttcctaggctagaagtcagctatcagaacagtgatggaaatagcgaggtagtcggcttccagacactaaccccagagagcagctgcctgagagaggaccattgtcatccccagccgctgagtgcagaactcattccggcctcgtggcagggatgtccacctctttctacggaaggcctaccagaaattcaccatcttcgcatgaaacggctggaattccttcaacaggctagcaaggggcaagatttacccacccctgaccaggataatggctaccacagcctggaggaggaacacagccttctccggatggatccaaaacactgcagagataacccaacacagtttgttcctgctgctggagacattcctggaaacacccaggaatccactgaagaaaaaatagaattattaactacagaggttccacttgctttggaagaagagagcccttctgagggctgtccatctagtgagatacctatggaaaaggagcctggagagggccgaataagtgtagttgattactcatacctagaaggtgaccttcccatttctgccagaccagcttgtagtaacaaactgatagattatattttgggaggtgcatccagtgacctggaaacaagttctgatccagaaggtgaggattgggatgaggaagctgaggatgatggttttgatagtgatagctcactgtcagactcagaccttgaacaagaccctgaagggcttcacctttggaactctttctgcagtgtagatccttataatccccagaactttacagcaacaattcagactgctgccagaattgttcctgaagagccttctgattcagagaaggatttgtctggcaagtctgatctagagaattcctcccagtctggaagccttcctgagacccctgagcatagttctggggaggaagatgactgggaatctagtgcagatgaagcagagagtctcaaactgtggaactcattctgtaattctgatgacccctacaaccctttaaattttaaggctccttttcaaacatcaggggaaaatgagaaaggctgtcgtgactcaaagaccccatctgagtccattgtggccatttctgagtgtcacaccttactttcttgtaaggtgcagctgttggggagccaagaaagtgaatgtccagactcggtacagcgtgacgttctttctggaggaagacacacacatgtcaaaagaaaaaaggtaaccttccttgaagaagttactgagtattatataagtggtgatgaggatcgcaaaggaccatgggaagaatttgcaagggatggatgcaggttccagaaacgaattcaagaaacagaagatgctattggatattgcttgacatttgaacacagagaaagaatgtttaatagactccagggaacatgcttcaaaggacttaatgttctcaagcaatgttgagttggcagcctgtagtcctagctagcatacactacctcttacctgagaggtgtcttttaaaaacaaatcttggcagctgtcctttgacatttttttttttagaggaaatgtaacttggatctagtttaatttttttttttgcaacatatcccactcagaaacattcaggtttgaagccagccctgataatgaaggatgaactagtgtgatttctaatcctcccttttttgatttagttggatgtgcttttaaatgtcctttgcctgcatgaggtggaaaggggacctttttgagttgtcattttgcactttcaaaacttattttcttggaaaacaatatttatagggcttaaagcccattttcatttctaatctaaattatgtgtgcctatctgaaaactttgggctctttcttgtttctttcccaaaattcagaagttaatgggcttttatgtttttctatattttttttatttcaatgatttggcctgtctatgttaggctaaaaaataaccttgtgtatgctaccaacttaaagtgcattattttgtgtcacttttttttttcttgtaaaaatgacttggattgaaaatatgtggtagcctttttatttctacattaagttctacctaggatatttccaaggactgccacaaaacccatatgtgcagtactttactactttgggaaagctgcatctttctaccacattttaacatctaatatatttaatttctttgaagagggttctgtgtacgttattgtagttcccagtttaatatagttctttgtatctcttaacaggttgaagttattgcaaaacactctggaaagtaataattacatcataatcatttattttttaaacttaaaagcctagaaatttcctagaaagaaaataggagacatctcagagcaatttggttttggtgtatatgttctcaacagaaaaccagtgttaatgaatatcatgcctcagcactgtcacttttaaaacctgtcaggatcccactgtaaaattggaaatgggcagttctgaattttcacgtttgaaatgtaaaatataaacttcagtcaatatccaggtttattgtgtcctactatttaataatgagagaagtaatggcaaggcctttactttcaggaaaggatagaagtatagattaatgactggaaagttttaatatatttagcccaaaggttactttgaattgaagtctttgcattgactgtttgtgtttggtttatttgtttagctttacaaggtacacataagttaggttgaggggttgttaacccttccgtggtctgctttcattccgtgtgcttcctgtcacaggtaatggaaaacataagtagaataggtgacctcttagttttgaacttatttaagtgtggggatgaatttttcatcagaagtgcttacagggttactacctcagtttacaatctacctggtcattattttatttctatccagttctaagaactgcctccactgtttatatattcataattaaacacattgagaatgcaacactataaaagctggtcaaatttttgcagagcccttattctgtgtgttttttgtttttttcttttttttttgagacagagtctcgttcggtcccccagcttggagtgcagtggcgcgatctcggctcactgcaacctccgcctcctgggttcacgcgattctcctgcctcagcctcccgagtagctgggattacaggcacacaccaccacgcccggctaattttttgtgtctttttagtagagacggggtttcgctatgttggccagactggtcttgaactgctgacctcgtgatccgcccgcctcggcctctcaaagtgctgggattctgtgtgttttgtgcacctccactttaggtaatcatagggagcacatttacaggatggtctaataacatgaaaacaggctagtttcaagcaacagcaatgtcggttggaaagcaggcgtcatttgccttgaaaaaagccttttgacaacatacaggcattcttttaaaaccaggctgaaacattttatttccgagacttaacgttgtgtttcctgtttcttaaacctagcacctctgtgtatttgaaaataatgagacatctttcattggattttggaaaattgttccccatgggattctaacctcactaccaaatgagtgaaagcttgattaagagttcttccatatactagcctccttggaagaagtgatcagaaggtgataagaaggacagaaaggactattttaaagttggactgaaggagaaaaaagcaaaattcttgtttcatcccaattctagttagaacaaagttaaacccccgtaatcttaaagagaaaatctttggaggttttaattaaacattttatacatttaaagtcttgttaatggtgctttaagtgtcaatgtagcatgtaaaaggctttgtacagacaggtaaaagttccatttctgagtgatgaaatgtaacacttcttcatctttaacttgaaatcaaaactatcagattttatttttgtataatttaaggaaggtaaagttaggggactagaagactctaaattggcttctacagatcaataatttaaatgtaactagttgggattttatagttaaaattatatttgtgtatataacataactaatctgtaaattgtaataaatatatttgcaattattaaa

SEQ ID NO: 171037 - DNA, 2722 bp, Homo sapiens
  Payload ID: 13650
  Gene Symbol: PPP1R16A
  Gene Name: protein phosphatase 1, regulatory subunit 16A
  Uniprot ID: Q96I34
  ENST ID: ENST00000292539
  CDS Start-End: 918-2504
ccaggtactggcacacggatgaggagtcgtagaagaggggcctgcagattgtgctctcagcaagcctgtcgtctagtggaagacactggccgggacacagagcccacgtgtggacaccgctgtgggttggtggcaggggtcgagcaggtgccatcaggcacatgaacggtggagtcttcaaaggtgtgagcagctgctggaagaggaggtgctcctgaagacactgcggccggcccgcctgtgcccttggtgccctggctgcctagagagcctcacccctgggccctggggccaggactccaggactctgactacctgccctcccccagcctcagcggctgcacctcctcgttagtactgatgcactgacctcggcacacagctgggaggggttgggggctgggtcatggctgctcccaggccccacccaggctcctgagcctagaaggtgaaaagaggactctcaggggctcacaggggctctcactgctggttggccctgccctcccttccccctcagcagggtgcccggaagctggaaccttgttatctgggtaattagtttcagaccctgcactgaggccggccaggtctcggggctgcctcccataggttgtgcaccctgaccccgagagggaggcgaggcgctgcttgtcgacagctagaggctggcctggggagcaggtttggggtgccctcccacactgccctccctgccccggcccatgccccccagggctgcctgggcctggttattgtgtggggcctcctgacccagccaagggcacgaagctctgggaaggggatgcccccgagggtgccagtccagctagctgccccacccctcaggcccagcctggcccccaagctccccactctggtgccccgagcagccctgtgggcaagcagccgccgccatggccgagcacctggagctgctggcagagatgcccatggtgggcaggatgagcacacaggagcggctgaagcatgcccagaagcggcgcgcccagcaggtgaagatgtgggcccaggctgagaaggaggcccagggcaagaagggtcctggggagcgtccccggaaggaggcagccagccaagggctcctgaagcaggtcctcttccctcccagtgttgtccttctggaggccgctgcccgaaatgacctggaagaagtccgccagttccttgggagtggggtcagccctgacttggccaacgaggacggcctgacggccctgcaccagtgctgcattgatgatttccgagagatggtgcagcagctcctggaggctggggccaacatcaatgcctgtgacagtgagtgctggacgcctctgcatgctgcggccacctgcggccacctgcacctggtggagctgctcatcgccagtggcgccaatctcctggcggtcaacaccgacgggaacatgccctatgacctgtgtgatgatgagcagacgctggactgcctggagactgccatggccgaccgtggcatcacccaggacagcatcgaggccgcccgggccgtgccagaactgcgcatgctggacgacatccggagccggctgcaggccggggcagacctccatgcccccctggaccacggggccacgctgctgcacgtcgcagccgccaacgggttcagcgaggcggctgccctgctgctggaacaccgagccagcctgagcgctaaggaccaagacggctgggagccgctgcacgccgcggcctactggggccaggtgcccctggtggagctgctcgtggcgcacggggccgacctgaacgcaaagtccctgatggacgagacgccccttgatgtgtgcggggacgaggaggtgcgggccaagctgctggagctgaagcacaagcacgacgccctcctgcgcgcccagagccgccagcgctccttgctgcgccgccgcacctccagcgccggcagccgcgggaaggtggtgaggcgggtgagcctaacccagcgcaccgacctgtaccgcaagcagcacgcccaggaggccatcgtgtggcaacagccgccgcccaccagcccggagccgcccgaggacaacgatgaccgccagacaggcgcagagctcaggccgccgcccccggaggaggacaaccccgaagtggtcaggccgcacaatggccgagtagggggctccccagtgcggcatctatactccaagcgactagaccggagtgtctcctaccagctgagccccctggacagcaccaccccccacaccctggtccacgacaaggcccaccacaccctggctgacctgaagcgccagcgagctgctgccaagctgcagcgacccccacctgaggggcccgagagccctgagacagctgagcctggcctgcctggtgacacggtgaccccccagcctgactgtggcttcagggcaggcggggacccacccctgctcaagctcacagccccggcggtggaggctcccgtggagaggaggccgtgctgcctgctcatgtgaggctgttgctcagcatgcaggggccctgtcgcgggcacagcccaaggctgcctccccacggtgcgtgccctggtgctgcgggtgcagcacggaaaccccggcttctactgtacaggacactggcccctctcaggtcagaagacatgcctggagggatgtctggctgcaaagactatttttatcctgcaactcttgataaagggctgttttgccatgga

SEQ ID NO: 171038 - DNA, 2273 bp, Homo sapiens
  Payload ID: 13650
  Gene Symbol: PPP1R16A
  Gene Name: protein phosphatase 1, regulatory subunit 16A
  Uniprot ID: Q96I34
  ENST ID: ENST00000435887
  CDS Start-End: 470-2056
gtgaaaagaggactctcaggggctcacaggggctctcactgctggttggccctgccctcccttccccctcagcagggtgcccggaagctggaaccttgttatctgggtaattagtttcagaccctgcactgaggccggccaggtctcggggctgcctcccataggttgtgcaccctgaccccgagagggaggcgaggcgctgcttgtcgacagctagaggctggcctggggagcaggtttggggtgccctcccacactgccctccctgccccggcccatgccccccagggctgcctgggcctggttattgtgtggggcctcctgacccagccaagggcacgaagctctgggaaggggatgcccccgagggtgccagtccagctagctgccccacccctcaggcccagcctggcccccaagctccccactctggtgccccgagcagccctgtgggcaagcagccgccgccatggccgagcacctggagctgctggcagagatgcccatggtgggcaggatgagcacacaggagcggctgaagcatgcccagaagcggcgcgcccagcaggtgaagatgtgggcccaggctgagaaggaggcccagggcaagaagggtcctggggagcgtccccggaaggaggcagccagccaagggctcctgaagcaggtcctcttccctcccagtgttgtccttctggaggccgctgcccgaaatgacctggaagaagtccgccagttccttgggagtggggtcagccctgacttggccaacgaggacggcctgacggccctgcaccagtgctgcattgatgatttccgagagatggtgcagcagctcctggaggctggggccaacatcaatgcctgtgacagtgagtgctggacgcctctgcatgctgcggccacctgcggccacctgcacctggtggagctgctcatcgccagtggcgccaatctcctggcggtcaacaccgacgggaacatgccctatgacctgtgtgatgatgagcagacgctggactgcctggagactgccatggccgaccgtggcatcacccaggacagcatcgaggccgcccgggccgtgccagaactgcgcatgctggacgacatccggagccggctgcaggccggggcagacctccatgcccccctggaccacggggccacgctgctgcacgtcgcagccgccaacgggttcagcgaggcggctgccctgctgctggaacaccgagccagcctgagcgctaaggaccaagacggctgggagccgctgcacgccgcggcctactggggccaggtgcccctggtggagctgctcgtggcgcacggggccgacctgaacgcaaagtccctgatggacgagacgccccttgatgtgtgcggggacgaggaggtgcgggccaagctgctggagctgaagcacaagcacgacgccctcctgcgcgcccagagccgccagcgctccttgctgcgccgccgcacctccagcgccggcagccgcgggaaggtggtgaggcgggtgagcctaacccagcgcaccgacctgtaccgcaagcagcacgcccaggaggccatcgtgtggcaacagccgccgcccaccagcccggagccgcccgaggacaacgatgaccgccagacaggcgcagagctcaggccgccgcccccggaggaggacaaccccgaagtggtcaggccgcacaatggccgagtagggggctccccagtgcggcatctatactccaagcgactagaccggagtgtctcctaccagctgagccccctggacagcaccaccccccacaccctggtccacgacaaggcccaccacaccctggctgacctgaagcgccagcgagctgctgccaagctgcagcgacccccacctgaggggcccgagagccctgagacagctgagcctggcctgcctggtgacacggtgaccccccagcctgactgtggcttcagggcaggcggggacccacccctgctcaagctcacagccccggcggtggaggctcccgtggagaggaggccgtgctgcctgctcatgtgaggctgttgctcagcatgcaggggccctgtcgcgggcacagcccaaggctgcctccccacggtgcgtgccctggtgctgcgggtgcagcacggaaaccccggcttctactgtacaggacactggcccctctcaggtcagaagacatgcctggagggatgtctggctgcaaagactatttttatcctgcaactcttgataaagggctgttttgccatgg

SEQ ID NO: 171039 - DNA, 657 bp, Homo sapiens
  Payload ID: 13650
  Gene Symbol: PPP1R16A
  Gene Name: protein phosphatase 1, regulatory subunit 16A
  ENST ID: ENST00000529009
  CDS Start-End: 462-657
cacacggatgaggagtcgtagaagaggggcctgcagattgtgctctcagcaagcctgtcgtctagtggaagacactggccgggacacagagcccacgtgtggacaccgctgtgggttggtggcaggggtcgagcaggtgccatcaggcacatgaacggtggagtcttcaaaggtgtgagcagctgctggaagaggaggtgctcctgaagacactgcggccggcccgcctgtgcccttggtgccctggctgcctagagagcctcacccctgggccctggggccaggactccaggactctgactacctgccctcccccagcctcagcggctgcacctcctcgttagtactgatgcactgacctcggcacacagctgggaggggttgggggctgggtcatggctgctcccaggccccacccaggctcctgagcctagaagccctgtgggcaagcagccgccgccatggccgagcacctggagctgctggcagagatgcccatggtgggcaggatgagcacacaggagcggctgaagcatgcccagaagcggcgcgcccagcaggtgaagatgtgggcccaggctgagaaggaggcccagggcaagaagggtcctggggagcgtccccggaaggaggcagccagccaagggctcctgaagc

SEQ ID NO: 171040 - DNA, 6251 bp, Homo sapiens
  Payload ID: 13651
  Gene Symbol: PPP1R16B
  Gene Name: protein phosphatase 1, regulatory subunit 16B
  Uniprot ID: Q96T49
  ENST ID: ENST00000299824
  CDS Start-End: 190-1893
ctctgtcgccgctggagcagctgcggctcggggacccacagacacagccggggtcgggagccgcccggggcagggctcgggagagcgggccacaccatgaggccccagccccaccagaggccccgcgctgccctggcccccggtgcaccgtgctagcccccagccagggcgttggggagggcggtggccatggccagtcacgtggacctgctgacggagctgcagctgctggagaaggtgcccacgctggagcggctgcgggctgcccagaagcgccgggcccagcagctgaagaaatgggcacagtacgagcaggacttgcagcaccgcaagcgaaagcatgagcggaagcgcagcacgggcggccgccgcaagaaagtgtccttcgaggccagcgtggccctgctggaggcctcgctgaggaacgacgccgaggaagtacgctacttcctgaagaataaggtcagccctgatttgtgcaatgaggacggactcacagccctacaccagtgctgcatcgacaactttgaggaaattgtgaagctgctcctctcccatggtgccaatgtgaacgccaaggacaacgagctgtggacacctctccatgctgcagccacctgcggccacatcaacctggtgaagatcctcgttcagtatggggccgacttgcttgctgtcaactcggatgggaacatgccatatgacctctgcgaggatgaacccaccctggatgtcatcgagacctgcatggcataccagggcatcacccaagagaaaatcaacgagatgcgggtggctcctgagcagcagatgattgcggacatccactgcatgatcgcagcgggccaggacctggactggatagatgcccagggtgccacactgctgcacatagctggagccaatggatacctgcgggcagctgagctcctcctggaccatggagtgcgtgtggatgtgaaggactgggatggctgggagcccctgcatgcagctgccttctggggacagatgcagatggcagagctattggtgtcccatggagctagtctcagtgcaaggacatccatggatgagatgccaatagacctgtgcgaggaggaagagttcaaggtcctgctgctggagctaaaacacaagcatgatgtgatcatgaagtcacagctgaggcacaagtcatccttgagccggaggacctccagcgcaggcagccgtgggaaggtggtgcggcgagccagcctgtcggacaggaccaacctgtataggaaggagtatgagggagaggccatcctgtggcagcggagtgcagctgaggatcagcggacctccacctacaacggggacatcagggagaccaggacagaccaagagaataaggaccctaaccccaggctggagaagcccgtgctactctccgaatttcctaccaagatcccacgaggtgaactggacatgcctgttgagaatggcctccgggctccggtcagtgcctaccagtatgcgctggccaacggggatgtctggaaggtgcatgaggtgcctgactacagcatggcctatggcaaccctggcgtggccgacgccaccccgccctggagcagctacaaggaacagagccctcagacgcttctggagctgaagcggcagcgggctgcagccaagctgctcagccaccccttccttagcacacacctgggcagcagcatggccaggacgggcgagagtagcagtgaaggcaaggcccccttgatcggaggcagaacttcaccgtacagcagcaatgggacctcggtatattacacggtcaccagcggagatcccccactcttaaagttcaaggcccccatagaggagatggaggagaaggtgcatggctgttgccgtatctcctagtctccgtgtgatggaggagggagatgcctggggaggggctcctggaatccaggccagcccaacagccctggctggggaggtgtcagggcagctggggagaggtgggctctgcttttcagaggaactcagaccccagccctcagctggctgcccatagcatcccatgtcccacgtcccgtggttctgcttcctgctgcatcgtctgccatctgacacaaggcctgtcgtggcctcctggttcactctgctgtctgatcttgggagggtgggcttgagatcccagctctattcttggtataaaggcttctccggatcagtacatgcatgtcacattaacacacacacacacacacatatacacacacacacaagctcgatcagtgtgtgtaggaatgacatacctgggctcaggggaagcaagggggcttagaatttgtggggtattcccaaaaggatggaagttaagactcagagtctcattaccactgccaatgtggttttagcaggggaggggacctgctaagctgagacccatagtcctgctcagagttatcccaaagtctgagccaccagccacacctgacaggggtgagaagtcctcgctgtgttcagagggagccaggaatctacatgggtagatgagatagacacagacctgctccccgcagccttgttgagagccacacttctgcccatgccaggagccagctgtgtgaccatccaggggtggagggggaaaaccaggcaatttcgttcctggaatcaaccaaatcatgttttcctcttggatggaagtgtcaaaggcagaagggtgtgggagggggacaaggtcagtatttaccaaagtgtatctgattttaaaaattcctttagtctgtaaaactcctagagggagggaggtaactgaattcacttctttttgtggatcgtatcaaggtcactgggttttactggctggtgctgggaaaatgaagctaagtgaggagcttccattggaatgcttttccagggagagaggccagttaatttaaaaaaaacagtcgctagttaacagcgacagagcccagcaccctggggtctttgtgaatatccagactgtttcagcccagcccatctcagccaaccctccttagactgagctgtcagagcaagcaattaggggccagcctgcctccacctcccacccccttccacctccatcagtcatgtgtgcagagtcagtgctcgggatcccgggcccagcttttgcctttttggggatgcttggtgagacagatttgccagtcagcccttttgagttcccgcctcacccaggggctcccagcctgcacttgcaggagtggtgatgccccaagtctgcgaatccagggtgcacgtggtcaatatcccctcctgcattcaggagagccatggtagggctagagttgggtcttgcccagccctgcagtttcatagtcccagccttcctggtgctggggagggaggactgtgaatggctgttctcccctcactgctgagtctcccaggaccccctttggagatgcccatggcatgggcactgcccacaggctcagccagaacctcttggtgtacccgataagctgcaggttatcccttgctctgtgcgccttttatttgtccttaaactacctccttagagctctgaaggggtctcctagttccagattttaatttggggaacagatctgggttctttttaaccctcttctttctcagtctatgagaaacttgccctgaggggcacctgggctaggggcttgggactggaagaccatccccgccttgtgccacaactttggtcatgggatctgctctttgtcattcttagccccctactgtggcccccatagccccataacccagagagggagctggacttcagggagcctgagtgatgctttcccaggagcagggcagctggctggaccagaaagtagagggcccatgggagtgactgcacccttggtggctgctggaaggggagaggttctcagcatcaggccacctccaccccaatgccaggatagatgtattctagagtaggggtggaggcggcccaggaggctgaagacaggtgcacagatgcttcccacgaccttgccatttggggtgggctcttcaacatctcaggctgtggctggaacaggacaggatgatctaaaacacacgtaccattggctgtaaaacagtatgagcccagactgacgctgaaatccctcatgagccaaccttagctacaaggtagggagttctgagggaagccgcgtgctcctcaggagagagctgtttaggttttccgatctttttgctcaggggccaaacactgaaggcacgtactgcccaacccactgagcgcctgaggccattccctccttttccgcatgcctcctgcctcctgggctattcctctccacccagaaggctgggaatcccagctgattccctgacaggagccgacttcacacacaggtgactctcaggcattggctcatgttttcagccagggataaaccatcccttcttggggctttaagtccctggggagctttccctgtaggtctcctgggtgttgagagacaagttggagaccaacctccaatgaatgagccgcggtcattcattaattcactcacgtaatttactgagtagctgcaacatgccagcctctacgttaggttctgcggataaaggaggaataagacagagtcaggagaactgttccttgtggtttccgtcccttggggaccacaggcatcagcagtcccattcaagtcacctgaggcaaagtgtctgcatcttcgtccagcgaccctttgcttttcggctcctagaatccttagagtctgaattcctttagctgggaacagctgtcatggtcacccctggataacatttgccaccaagtatagatgctggatcttgggttccaggcagacatcatccaggtccatctggaactttcagtgatagctgccttcagccagcatctttgggggactctataatagcagcttgagatcagtgtctagaagactgttctgcaatttgctgccaaatgcatctcaggtttttaaagtcattgtttcttgctcatggtggctcatttattacatagtcccctcaccccactaatggataatgggaggaaaagttgctgcttccttcagcatcaaagcctttccttgggaatctgcctccctccatggcaggggtggattcgggagctgggagtaaccaggcaaagtcaaccagatgcctagctcctgctgagacccaggtcctatggcagctcctcattagattaaaggagaccacttccaaagcaggtgctgcatggctcaccatcatatgccccaaacaactgaaagttggcggttatcaccagactgtgagtttctggcaagtagcttggggaagctgaataaactctaggcccagggctactaaagacttcaggatagaattctccatcaaatatacagcataagtaaaactgctctgcactgtttaatccatttccaaggggcttagaaaagctaacaagggtgtgtcccctgtcctgccccaccggtttgctggctttgtaataacataagaccattgtggttgttggtgtcagataccttcccatcctgagctctctcacctacctgctctctctcctagagcaggatactggggtacttttaagaagggtgctccttttaagatgcccagaaaagctgtatttaactcttgctatttgtaacttggggatggtctcccctgccccagggcacataagagcaaaggctccaatggtcagtggatgactctgcaaaagtgaccccctgtgccagaagctatagccctctccccaacaggtctctcttgttggccagagggcctgcttcccatgggcattgcaagtgccaccgtgcggggcctggctctgcacacccaggaaaagtctgcagacccccagccctccgcaataattcaccagaccagaagccactggtgtacagagaacacttaaaaaaatgtattttatgtgaaaaaaaattaaaactctgtatactgtatcagcagctttgtgtaaaaatggcaatcaagagagtctaatatatttaaaacttttttaaaaaaaatcttcgcagatctttgatatcgtactgaggtaacttccacgtagccccttgccacgcggcaccggtgggccttgggtccaaaactgtggctcagccacatcccaaagggggcacatgtccctggagttgcttccagctgccaaggcctgtgacagaattcgctgttaagagtttttaattaaaattattaaattccttttaataaca

SEQ ID NO: 171041 - DNA, 6106 bp, Homo sapiens
  Payload ID: 13651
  Gene Symbol: PPP1R16B
  Gene Name: protein phosphatase 1, regulatory subunit 16B
  Uniprot ID: Q96T49
  ENST ID: ENST00000373331
  CDS Start-End: 171-1748
gctgcggctcggggacccacagacacagccggggtcgggagccgcccggggcagggctcgggagagcgggccacaccatgaggccccagccccaccagaggccccgcgctgccctggcccccggtgcaccgtgctagcccccagccagggcgttggggagggcggtggccatggccagtcacgtggacctgctgacggagctgcagctgctggagaaggtgcccacgctggagcggctgcgggctgcccagaagcgccgggcccagcagctgaagaaatgggcacagtacgagcaggacttgcagcaccgcaagcgaaagcatgagcggaagcgcagcacgggcggccgccgcaagaaagtgtccttcgaggccagcgtggccctgctggaggcctcgctgaggaacgacgccgaggaagtacgctacttcctgaagaataaggtcagccctgatttgtgcaatgaggacggactcacagccctacaccagtgctgcatcgacaactttgaggaaattgtgaagctgctcctctcccatggtgccaatgtgaacgccaaggacaacgagctgtggacacctctccatgctgcagccacctgcggccacatcaacctggtgaagatcctcgttcagtatggggccgacttgcttgctgtcaactcggatgggaacatgccatatgacctctgcgaggatgaacccaccctggatgtcatcgagacctgcatggcataccagggcatcacccaagagaaaatcaacgagatgcgggtggctcctgagcagcagatgattgcggacatccactgcatgatcgcagcgggccaggacctggactggatagatgcccagggtgccacactgatgcagatggcagagctattggtgtcccatggagctagtctcagtgcaaggacatccatggatgagatgccaatagacctgtgcgaggaggaagagttcaaggtcctgctgctggagctaaaacacaagcatgatgtgatcatgaagtcacagctgaggcacaagtcatccttgagccggaggacctccagcgcaggcagccgtgggaaggtggtgcggcgagccagcctgtcggacaggaccaacctgtataggaaggagtatgagggagaggccatcctgtggcagcggagtgcagctgaggatcagcggacctccacctacaacggggacatcagggagaccaggacagaccaagagaataaggaccctaaccccaggctggagaagcccgtgctactctccgaatttcctaccaagatcccacgaggtgaactggacatgcctgttgagaatggcctccgggctccggtcagtgcctaccagtatgcgctggccaacggggatgtctggaaggtgcatgaggtgcctgactacagcatggcctatggcaaccctggcgtggccgacgccaccccgccctggagcagctacaaggaacagagccctcagacgcttctggagctgaagcggcagcgggctgcagccaagctgctcagccaccccttccttagcacacacctgggcagcagcatggccaggacgggcgagagtagcagtgaaggcaaggcccccttgatcggaggcagaacttcaccgtacagcagcaatgggacctcggtatattacacggtcaccagcggagatcccccactcttaaagttcaaggcccccatagaggagatggaggagaaggtgcatggctgttgccgtatctcctagtctccgtgtgatggaggagggagatgcctggggaggggctcctggaatccaggccagcccaacagccctggctggggaggtgtcagggcagctggggagaggtgggctctgcttttcagaggaactcagaccccagccctcagctggctgcccatagcatcccatgtcccacgtcccgtggttctgcttcctgctgcatcgtctgccatctgacacaaggcctgtcgtggcctcctggttcactctgctgtctgatcttgggagggtgggcttgagatcccagctctattcttggtataaaggcttctccggatcagtacatgcatgtcacattaacacacacacacacacacatatacacacacacacaagctcgatcagtgtgtgtaggaatgacatacctgggctcaggggaagcaagggggcttagaatttgtggggtattcccaaaaggatggaagttaagactcagagtctcattaccactgccaatgtggttttagcaggggaggggacctgctaagctgagacccatagtcctgctcagagttatcccaaagtctgagccaccagccacacctgacaggggtgagaagtcctcgctgtgttcagagggagccaggaatctacatgggtagatgagatagacacagacctgctccccgcagccttgttgagagccacacttctgcccatgccaggagccagctgtgtgaccatccaggggtggagggggaaaaccaggcaatttcgttcctggaatcaaccaaatcatgttttcctcttggatggaagtgtcaaaggcagaagggtgtgggagggggacaaggtcagtatttaccaaagtgtatctgattttaaaaattcctttagtctgtaaaactcctagagggagggaggtaactgaattcacttctttttgtggatcgtatcaaggtcactgggttttactggctggtgctgggaaaatgaagctaagtgaggagcttccattggaatgcttttccagggagagaggccagttaatttaaaaaaaacagtcgctagttaacagcgacagagcccagcaccctggggtctttgtgaatatccagactgtttcagcccagcccatctcagccaaccctccttagactgagctgtcagagcaagcaattaggggccagcctgcctccacctcccacccccttccacctccatcagtcatgtgtgcagagtcagtgctcgggatcccgggcccagcttttgcctttttggggatgcttggtgagacagatttgccagtcagcccttttgagttcccgcctcacccaggggctcccagcctgcacttgcaggagtggtgatgccccaagtctgcgaatccagggtgcacgtggtcaatatcccctcctgcattcaggagagccatggtagggctagagttgggtcttgcccagccctgcagtttcatagtcccagccttcctggtgctggggagggaggactgtgaatggctgttctcccctcactgctgagtctcccaggaccccctttggagatgcccatggcatgggcactgcccacaggctcagccagaacctcttggtgtacccgataagctgcaggttatcccttgctctgtgcgccttttatttgtccttaaactacctccttagagctctgaaggggtctcctagttccagattttaatttggggaacagatctgggttctttttaaccctcttctttctcagtctatgagaaacttgccctgaggggcacctgggctaggggcttgggactggaagaccatccccgccttgtgccacaactttggtcatgggatctgctctttgtcattcttagccccctactgtggcccccatagccccataacccagagagggagctggacttcagggagcctgagtgatgctttcccaggagcagggcagctggctggaccagaaagtagagggcccatgggagtgactgcacccttggtggctgctggaaggggagaggttctcagcatcaggccacctccaccccaatgccaggatagatgtattctagagtaggggtggaggcggcccaggaggctgaagacaggtgcacagatgcttcccacgaccttgccatttggggtgggctcttcaacatctcaggctgtggctggaacaggacaggatgatctaaaacacacgtaccattggctgtaaaacagtatgagcccagactgacgctgaaatccctcatgagccaaccttagctacaaggtagggagttctgagggaagccgcgtgctcctcaggagagagctgtttaggttttccgatctttttgctcaggggccaaacactgaaggcacgtactgcccaacccactgagcgcctgaggccattccctccttttccgcatgcctcctgcctcctgggctattcctctccacccagaaggctgggaatcccagctgattccctgacaggagccgacttcacacacaggtgactctcaggcattggctcatgttttcagccagggataaaccatcccttcttggggctttaagtccctggggagctttccctgtaggtctcctgggtgttgagagacaagttggagaccaacctccaatgaatgagccgcggtcattcattaattcactcacgtaatttactgagtagctgcaacatgccagcctctacgttaggttctgcggataaaggaggaataagacagagtcaggagaactgttccttgtggtttccgtcccttggggaccacaggcatcagcagtcccattcaagtcacctgaggcaaagtgtctgcatcttcgtccagcgaccctttgcttttcggctcctagaatccttagagtctgaattcctttagctgggaacagctgtcatggtcacccctggataacatttgccaccaagtatagatgctggatcttgggttccaggcagacatcatccaggtccatctggaactttcagtgatagctgccttcagccagcatctttgggggactctataatagcagcttgagatcagtgtctagaagactgttctgcaatttgctgccaaatgcatctcaggtttttaaagtcattgtttcttgctcatggtggctcatttattacatagtcccctcaccccactaatggataatgggaggaaaagttgctgcttccttcagcatcaaagcctttccttgggaatctgcctccctccatggcaggggtggattcgggagctgggagtaaccaggcaaagtcaaccagatgcctagctcctgctgagacccaggtcctatggcagctcctcattagattaaaggagaccacttccaaagcaggtgctgcatggctcaccatcatatgccccaaacaactgaaagttggcggttatcaccagactgtgagtttctggcaagtagcttggggaagctgaataaactctaggcccagggctactaaagacttcaggatagaattctccatcaaatatacagcataagtaaaactgctctgcactgtttaatccatttccaaggggcttagaaaagctaacaagggtgtgtcccctgtcctgccccaccggtttgctggctttgtaataacataagaccattgtggttgttggtgtcagataccttcccatcctgagctctctcacctacctgctctctctcctagagcaggatactggggtacttttaagaagggtgctccttttaagatgcccagaaaagctgtatttaactcttgctatttgtaacttggggatggtctcccctgccccagggcacataagagcaaaggctccaatggtcagtggatgactctgcaaaagtgaccccctgtgccagaagctatagccctctccccaacaggtctctcttgttggccagagggcctgcttcccatgggcattgcaagtgccaccgtgcggggcctggctctgcacacccaggaaaagtctgcagacccccagccctccgcaataattcaccagaccagaagccactggtgtacagagaacacttaaaaaaatgtattttatgtgaaaaaaaattaaaactctgtatactgtatcagcagctttgtgtaaaaatggcaatcaagagagtctaatatatttaaaacttttttaaaaaaaatcttcgcagatctttgatatcgtactgaggtaacttccacgtagccccttgccacgcggcaccggtgggccttgggtccaaaactgtggctcagccacatcccaaagggggcacatgtccctggagttgcttccagctgccaaggcctgtgacagaattcgctgttaagagtttttaattaaaattattaaattccttttaataaca

SEQ ID NO: 171042 - DNA, 2268 bp, Homo sapiens
  Payload ID: 13652
  Gene Symbol: PPP1R17
  Gene Name: protein phosphatase 1, regulatory subunit 17
  Uniprot ID: O96001
  ENST ID: ENST00000342032
  CDS Start-End: 629-1096
gtaagtagatatgtgtgaagtctctagaagagtgtctggcattttggtagccttacataaatgttagcagtagctacccttctcttcctcctcatgatagtactttgagaagcagcaatagtgattgaaagtactctggatttaaacttaaatagctttgagagtcgaaattagctgtggcctctcttgggcatatcacttaacttcttgtgcctcagtttccatatttacaaaatcaggccaaaaaaaatctatcgcatgggaattcaatgatgtagctggtttgtctgaatttctctggtgtgcacaccggaaactcaaagcacgactctatactgtacttttgtaatgtacaatgattgccgtggagagcagcgatggagatgttagtcctctttccttctccatcccccttgccctggtgcctgtgaaacagagcatccccatggcaacagcagcagctggtccctagataagaggagctggagccggccagcagcagccactgccgcagaggagccaggcccagcctcggtgagcacacacgccctccctgtctctcgccttcgcttccctgcatctgcgctgattgtgctggagaagaaatacatccacccaccctcctttgatgatgtccactgagcaaatgcagccactggaactctcagaagacagactggacaagctagaccctcgttgcagccacttagatgatctttcagaccagttcattaaggactgtgatctcaaaaagaagcctagaaagggaaaaaatgtacaggccaccctgaatgttgagtcagaccaaaaaaaaccaaggaggaaagatacaccggcgctgcacatcccacctttcataccaggtgtgttttcagaacatttaattaaaagatacgatgttcaagagagacatccaaagggcaaaatgatccctgttcttcataacactgacctggaacagaaaaagccaaggagaaaagacacacctgccctgcacatgtccccctttgcagcaggtgtgacattgctcagggacgagagacccaaagcaatcgtggaagatgacgaaaaggatggtgacaagatagctatttaaagatagttcccctgagaccacttgtaaataggttagattggttccctgtggtgacctagagaaaaaatagacttgtttctgctctcatttttgtcatcgtctgacttgaagattcagacaccttctccccaggagatgtatgccatcaaattgccagtcacctctttgtctctctcttctttctgagtatggtttctattctgtgttttgaatttttattttctaatgcagtggaaaagaaacagatcatcctaaatgaggaggtaacagggaaagcactggggttcggtttctgcatcttctggatcaattcacggaacagagatcgtggattacatgggctccttcttggtttttgctgctgggcaggacttgacttagcattatccaagcaccagtccaagtggggttccctgttgccagttagagaggtgagaatgtttggactctaactcaccgattgctttgcagacaaaggtcttttatttctcctgtcctatcttaagagtccaaatgtctctggtgatgttcctaagacccttgtcccagatactctaaatgtgaatgtatgagctgggggagtcaacccagcccaccatgccttggctgatgataccagaggcagagagtgctggtctgtctgggaagcttagcaatgtatcttcaaatttatttttgtttttaaaaatatttcttaaacatgctgtcccaacatttgtgagttgtgtcacaagtgagtcattatcaatggtagataaaatatcaatgtttgtgatgaatttactgtaaaaaaattaaggtcaatgaaagccattctgttatttttagcattctcacttatttagactctattacactttcttggatgagaggggagagtgtggtgttagctagtgagcagaggtctgtatattgtccttgccccagcctgcaatctgtggatgcccaggggaaggcatacaggcctcatccaccaggcaatagacaggagagaggtgagaactatttttagaaggaggaaaagtagatacgcaaattgtcacaactaagagtgataatttggtagctctgtatgtatgctggttccaactgtttaatcccttctgtctttctgttctcacaaagatggaaaagatacaagagcttgccggaaataaagctacatctatcca

SEQ ID NO: 171043 - DNA, 569 bp, Homo sapiens
  Payload ID: 13652
  Gene Symbol: PPP1R17
  Gene Name: protein phosphatase 1, regulatory subunit 17
  Uniprot ID: O96001
  ENST ID: ENST00000409146
  CDS Start-End: 129-443
agccactgccgcagaggagccaggcccagcctcggtgagcacacacgccctccctgtctctcgccttcgcttccctgcatctgcgctgattgtgctggagaagaaatacatccacccaccctcctttgatgatgtccactgagcaaatgcagccactggaactctcagaagacagactggacaagctagaccctcgttgcagccacttaggtgtgttttcagaacatttaattaaaagatacgatgttcaagagagacatccaaagggcaaaatgatccctgttcttcataacactgacctggaacagaaaaagccaaggagaaaagacacacctgccctgcacatgtccccctttgcagcaggtgtgacattgctcagggacgagagacccaaagcaatcgtggaagatgacgaaaaggatggtgacaagatagctatttaaagatagttcccctgagaccacttgtaaataggttagattggttccctgtggtgacctagagaaaaaatagacttgtttctgctctcatttttgtcatcgtctgacttgaagattcagacaccttct

SEQ ID NO: 171044 - DNA, 4599 bp, Homo sapiens
  Payload ID: 13653
  Gene Symbol: PPP1R18
  Gene Name: protein phosphatase 1, regulatory subunit 18
  Uniprot ID: Q6NYC8
  ENST ID: ENST00000274853
  CDS Start-End: 1878-3719
actttgccagagcggccgggtccccattcccattccttcaaatcccctttttcccggcagccgacctgtagacccaagggagacaggttgaagctagaaagagtcggggcagcagctctggtaggggagggagcatccaaaacctctggcttctgagcgcctctcctgccgcccatccacaaagccccccacagcctggcggctgccctcgaccccgcaaaacaaaggacttcagaggctggacctacagacccagatgagaaggcaaaagcgtagggaggagcggcaggagatgggaagggcgggccccgctcggagcagctgccgcttcctcccaaagtcccacgaggggcctgagtcacgggccaccgccctgggtcggcgagctgggggaagggatctggacacctggcgtgtccgggcgggaagctggtgagggcccctggggacagagcggaggaccagtggttggggcgagaagagggcagtcccgcagcgagtcccacgcggggtgggagggatctaggccccgccctctcctcggctccgccctgcgcccccttccctctcctcattgtccttagacaaagcggtcgccgcccccgcccggccccctggtctctgtctccgtccctcctcctttgctgcctctttccctcctcctctccctccctcctcccctccctccagtctccggatctccctcggtccctctctcctcctcttcctctctctggacgcccggctcctccgcaccccctcccccgggggtcccgcggcctgtgagttgactgaggggctcagacttggggagtgggtgtctcctcgcccctgtccttgctcccgtccctggcccggaccttggctgtctcctctttgtgccgagattgtcagtctgtgcggctacagcggggtggagacggccggctctgtcacggcttcatgagagcggggacggggcgcaggacttgcaggcgccggggagaagagacatggagccggcccttggcactctggggtcgcgtggggcagtcggtgggggaggcaggcggtggtgacaggacagggtgggggtggacgccagggttctgggaacgcgctggcagccctgacgcccgggttccgaaagtctcgggggtggctatttcccccgacccgcctcgggggcggagtgcggggcagaggggtgggggctggggagaggcgtggcccgagcggtgctggaagcggagccgggacctttggggcccgcgctgagacgcgcccggctgctgccgccgccctcctttcccctcttccctggtttcccttctcctctagacctgttcgctctccgcccctccttgcctccccaacaccccctcaggtcccgttgcctcctggtcctttcagggattcctggtccttccttcccacactagcctccctggggtatcgctgaggcagcctggcctgcacccaggttcccctcacccctgccacatttctctcttctccctcacgccaactttccttttcgcccttctctctctttctcacatcctagagacggtctttaatacgcattaaccctgtgctgccacatctggctcctgccctcattgcctccaatccggactcttcctctcacatcacccccaccacccccaacttgggctcacaacttctcttcactttttccatttccccagttctctgccttccgtctttccctctgtcctcatccttagcccctctgccctgctttgtgtcccacctctccccctccacttcctctcctcccaccctcagtctcacccccgggctgtctcactctctggagcctctccttcctgttctctgtccccagtgctccctaccctcacctcaagacgaccatggccaccatcccagactggaagctacagctgctagcccggcgccggcaggaggaggcgtccgttcgaggccgagagaaagcagaacgggagcgcctgtcccagatgccagcctggaaacgagggctcctggagcgccgccgggccaagcttgggctgtcccctggggagcctagccctgtgctagggactgtagaggctggacctccagacccggatgagtctgcggtccttctggaggccatcgggccagtgcaccagaaccgattcatccggcaggagcggcagcagcagcagcagcaacaacaacggagtgaagagctgctagcagagagaaagcctgggcctctggaggcccgggagcggagacccagccctggggagatgcgggatcagagccccaagggaagagagtcaagagaagagagactaagtccgagggagaccagagagaggaggctggggatagggggagcccaagagttgagcctgaggcctctggaggctcgggactggaggcaaagcccaggagaggtgggagacaggagctcccgactgtcagaggcatggaaatggaggctgagtcctggagaaactccagagcggagtctgagactagcagagtctcgagagcaaagccccaggagaaaagaggtggaaagtagactgagcccaggggaatctgcctaccagaagttgggcctgacagaggcccataaatggagacctgactccagagagtctcaggaacagagtttggtacaactggaggcaacagagtggaggctgaggtcaggagaagaaagacaagactactcggaagaatgtgggagaaaagaagagtggccagttccaggggtagctccaaaagagactgcagagctgtccgagaccctgacaagggaggcccaaggcaacagttccgcaggagtggaggcagcagagcagaggcctgtggaagatggcgagaggggcatgaagccaacagaagggtggaaatggaccctgaactccgggaaggctcgagaatggacacccagggacatagaggctcaaactcagaaaccagaacctccagagtcagcagagaagcttctggaatctcccggtgtggaggctggagaaggggaggctgagaaggaggaggcgggggctcagggcaggcctctgagagccctgcagaactgctgctctgtgccctcccccctcccaccagaggacgctgggactggaggcctgagacagcaggaagaggaagcagtggagctccagcccccaccaccagcccctctgtctcccccacccccagccccaactgccccccaacctcctggggatcccctcatgagccgcctgttctatggggtgaaggcagggccaggggtgggggccccccgccgcagtggacacaccttcaccgtcaacccccggcggtctgtgccccctgcgaccccagccaccccaacctctccagccacagttgatgctgcagtcccgggggctgggaagaagcggtacccaactgccgaggagatcttggttctggggggctacctccgtctcagccgcagctgccttgccaaggggtcccccgaaagacaccacaaacagcttaagatctccttcagcgagacagccctggagaccacgtaccaatacccctccgagagttcggtactggaggagctgggcccggagcctgaggtccccagtgcccccaaccctccagcagcccaacccgacgacgaagaggatgaggaagagctgctgctgctgcagccagagctccagggcgggctgcgcaccaaggccctgattgtggatgagtcctgccggcggtgaccatcttccaacatagggatatacctccctccttcttataactgaagatcctggagcccggaagattcagggcagacagaccctgataatgagcctggcagggaagggcaaccaacatcttgtaacttgctttccccaccctgtttctgggggcagagccaattgcccaatttctaccctaatccaaagtccctggtgtgggtggggttaaacgtgctggtgcatcctaggtcatccaagagtgagcgccaagtcctgagaaggggcacagaactccctggagggtggagatggagcacctgccccccatggcagggtacactctccccacagccttcctccccaccatcccgtggggactctcgggatttaagcactcgtctctctgggaggcccagaccccactccatttataggcacatctccttcatttcctaggtcactgcccctttgtttacagctcctgcctcctcccttgaccacagcctggtttacaaattccatcagctcccagccccacctgccaaagtcccaggtttacaagccacgcttacttgctgtgtctgcgtggaattctctcctctgtcccctccagtctcctcattggagtgacctgaaggtgtggcttcctccactttttctcagtattactttgccttagttttccccaagagggaaggctggaactcttaactctgtaccccttgatagttatttaattctgtttctcctagtggttcacaattgaactgaattgagatggtgtcgggtggctaaggagacacctcacctctccttccccattgtgccgcctttatcaattgcctgttttgttttgtttgttttttaactttccataataaaatggagttctcttcaa

SEQ ID NO: 171045 - DNA, 2853 bp, Homo sapiens
  Payload ID: 13653
  Gene Symbol: PPP1R18
  Gene Name: protein phosphatase 1, regulatory subunit 18
  Uniprot ID: Q6NYC8
  ENST ID: ENST00000383573
  CDS Start-End: 132-1973
cctccctccagtctccggatctccctcggtccctctctcctcctcttcctctctctggacgcccggctcctccgcaccccctcccccgggggtcccgcggccttgctccctaccctcacctcaagacgaccatggccaccatcccagactggaagctacagctgctagcccggcgccggcaggaggaggcgtccgttcgaggccgagagaaagcagaacgggagcgcctgtcccagatgccagcctggaaacgagggctcctggagcgccgccgggccaagcttgggctgtcccctggggagcctagccctgtgctagggactgtagaggctggacctccagacccggatgagtctgcggtccttctggaggccatcgggccagtgcaccagaaccgattcatccggcaggagcggcagcagcagcagcagcaacaacaacggagtgaagagctgctagcagagagaaagcctgggcctctggaggcccgggagcggagacccagccctggggagatgcgggatcagagccccaagggaagagagtcaagagaagagagactaagtccgagggagaccagagagaggaggctggggatagggggagcccaagagttgagcctgaggcctctggaggctcgggactggaggcaaagcccaggagaggtgggagacaggagctcccgactgtcagaggcatggaaatggaggctgagtcctggagaaactccagagcggagtctgagactagcagagtctcgagagcaaagccccaggagaaaagaggtggaaagtggactgagcccaggggaatctgcctaccagaagttgggcctgacagaggcccataaatggagacctgactccagagagtctcaggaacagagtttggtacaactggaggcaacagagtggaggctgaggtcaggagaagaaagacaagactactcggaagaatgtgggagaaaagaagagtggccagttccaggggtagctccaaaagagactgcagagctgtccgagaccctgacaagggaggcccaaggcaacagttccgcaggagtggaggcagcagagcagaggcctgtggaagatggcgagaggggcatgaagccaacagaagggtggaaatggaccctgaactccgggaaggctcgagaatggacacccagggacatagaggctcaaactcagaaaccagaacctccagagtcagcagagaagcttctggaatctcccggtgtggaggctggagaaggggaggctgagaaggaggaggcgggggctcagggcaggcctctgagagccctgcagaactgctgctctgtgccctcccccctcccaccagaggacgctgggactggaggcctgagacagcaggaagaggaagcagtggagctccagcccccaccaccagcccctctgtctcccccacccccagccccaactgccccccaacctcctggggatcccctcatgagccgcctgttctatggggtgaaggcagggccaggggtgggggccccccgccgcagtggacacaccttcaccgtcaacccccggcggtctgtgccccctgcgaccccagccaccccaacctctccagccacagttgatgctgcagtcccgggggctgggaagaagcggtacccaactgccgaggagatcttggttctggggggctacctccgtctcagccgcagctgccttgccaaggggtcccccgaaagacaccacaaacagcttaagatctccttcagcgagacagccctggagaccacgtaccaatacccctccgagagttcggtactggaggagctgggcccggagcctgaggtccccagtgcccccaaccctccagcagcccaacccgacgacgaagaggatgaggaagagctgctgctgctgcagccagagctccagggcgggctgcgcaccaaggccctgattgtggatgagtcctgccggcggtgaccatcttccaacatagggatatacctccctccttcttataactgaagatcctggagcccggaagattcagggcagacagaccctgataatgagcctggcagggaagggcaaccaacatcttgtaacttgctttccccaccctgtttctgggggcagagccaattgcccaatttctaccctaatccaaagtccctggtgtgggtggggttaaacgtgctggtgcatcctaggtcatccaagagtgagcgccaagtcctgagaaggggcacagaactccctggagggtggagatggagcacctgccccccatggcagggtacactctccccacagccttcctccccaccatcccgtggggactctcgggatttaagcactcgtctctctgggaggcccagaccccactccatttataggcacatctccttcatttcctaggtcactgcccctttgtttacagctcctgcctcctcccttgaccacagcctggtttacaaattccatcagctcccagccccacctgccaaagtcccaggtttacaagccacgcttacttgctgtgtctgcgtggaattctctcctctgtcccctccagtctcctcattggagtgacctgaaggtgtggcttcctccactttttctcagtattactttgccttagttttccccaagagggaaggctggaactcttaactctgtaccccttgatagttatttaattctgtttctcctagtggttcacaattgaactgaattgagatggtgtcgggtggctaaggagacacctcacctctccttccccattgtgccgcctttatcaattgcctgttttgttttgtttgttttttaactttccataataaaatggagttctcttcaa

SEQ ID NO: 171046 - DNA, 2853 bp, Homo sapiens
  Payload ID: 13653
  Gene Symbol: PPP1R18
  Gene Name: protein phosphatase 1, regulatory subunit 18
  Uniprot ID: Q6NYC8
  ENST ID: ENST00000399199
  CDS Start-End: 132-1973
cctccctccagtctccggatctccctcggtccctctctcctcctcttcctctctctggacgcccggctcctccgcaccccctcccccgggggtcccgcggccttgctccctaccctcacctcaagacgaccatggccaccatcccagactggaagctacagctgctagcccggcgccggcaggaggaggcgtccgttcgaggccgagagaaagcagaacgggagcgcctgtcccagatgccagcctggaaacgagggctcctggagcgccgccgggccaagcttgggctgtcccctggggagcctagccctgtgctagggactgtagaggctggacctccagacccggatgagtctgcggtccttctggaggccatcgggccagtgcaccagaaccgattcatccggcaggagcggcagcagcagcagcagcaacaacaacggagtgaagagctgctagcagagagaaagcctgggcctctggaggcccgggagcggagacccagccctggggagatgcgggatcagagccccaagggaagagagtcaagagaagagagactaagtccgagggagaccagagagaggaggctggggatagggggagcccaagagttgagcctgaggcctctggaggctcgggactggaggcaaagcccaggagaggtgggagacaggagctcccgactgtcagaggcatggaaatggaggctgagtcctggagaaactccagagcggagtctgagactagcagagtctcgagagcaaagccccaggagaaaagaggtggaaagtagactgagcccaggggaatctgcctaccagaagttgggcctgacagaggcccataaatggagacctgactccagagagtctcaggaacagagtttggtacaactggaggcaacagagtggaggctgaggtcaggagaagaaagacaagactactcggaagaatgtgggagaaaagaagagtggccagttccaggggtagctccaaaagagactgcagagctgtccgagaccctgacaagggaggcccaaggcaacagttccgcaggagtggaggcagcagagcagaggcctgtggaagatggcgagaggggcatgaagccaacagaagggtggaaatggaccctgaactccgggaaggctcgagaatggacacccagggacatagaggctcaaactcagaaaccagaacctccagagtcagcagagaagcttctggaatctcccggtgtggaggctggagaaggggaggctgagaaggaggaggcgggggctcagggcaggcctctgagagccctgcagaactgctgctctgtgccctcccccctcccaccagaggacgctgggactggaggcctgagacagcaggaagaggaagcagtggagctccagcccccaccaccagcccctctgtctcccccacccccagccccaactgccccccaacctcctggggatcccctcatgagccgcctgttctatggggtgaaggcagggccaggggtgggggccccccgccgcagtggacacaccttcaccgtcaacccccggcggtctgtgccccctgcgaccccagccaccccaacctctccagccacagttgatgctgcagtcccgggggctgggaagaagcggtacccaactgccgaggagatcttggttctggggggctacctccgtctcagccgcagctgccttgccaaggggtcccccgaaagacaccacaaacagcttaagatctccttcagcgagacagccctggagaccacgtaccaatacccctccgagagttcggtactggaggagctgggcccggagcctgaggtccccagtgcccccaaccctccagcagcccaacccgacgacgaagaggatgaggaagagctgctgctgctgcagccagagctccagggcgggctgcgcaccaaggccctgattgtggatgagtcctgccggcggtgaccatcttccaacatagggatatacctccctccttcttataactgaagatcctggagcccggaagattcagggcagacagaccctgataatgagcctggcagggaagggcaaccaacatcttgtaacttgctttccccaccctgtttctgggggcagagccaattgcccaatttctaccctaatccaaagtccctggtgtgggtggggttaaacgtgctggtgcatcctaggtcatccaagagtgagcgccaagtcctgagaaggggcacagaactccctggagggtggagatggagcacctgccccccatggcagggtacactctccccacagccttcctccccaccatcccgtggggactctcgggatttaagcactcgtctctctgggaggcccagaccccactccatttataggcacatctccttcatttcctaggtcactgcccctttgtttacagctcctgcctcctcccttgaccacagcctggtttacaaattccatcagctcccagccccacctgccaaagtcccaggtttacaagccacgcttacttgctgtgtctgcgtggaattctctcctctgtcccctccagtctcctcattggagtgacctgaaggtgtggcttcctccactttttctcagtattactttgccttagttttccccaagagggaaggctggaactcttaactctgtaccccttgatagttatttaattctgtttctcctagtggttcacaattgaactgaattgagatggtgtcgggtggctaaggagacacctcacctctccttccccattgtgccgcctttatcaattgcctgttttgttttgtttgttttttaactttccataataaaatggagttctcttcaa

SEQ ID NO: 171047 - DNA, 4599 bp, Homo sapiens
  Payload ID: 13653
  Gene Symbol: PPP1R18
  Gene Name: protein phosphatase 1, regulatory subunit 18
  Uniprot ID: Q6NYC8
  ENST ID: ENST00000400554
  CDS Start-End: 1878-3719
actttgccagagcggccgggtccccattcccattccttcaaatcccctttttcccggcagccgacctgtagacccaagggagacaggttgaagctagaaagagtcggggcagcagctctggtaggggagggagcatccaaaacctctggcttctgagcgcctctcctgccgcccatccacaaagccccccacagcctggcggctgccctcgaccccgcaaaacaaaggacttcagaggctggacctacagacccagatgagaaggcaaaagcgtagggaggagcggcaggagatgggaagggcgggccccgctcggagcagctgccgcttcctcccaaagtcccacgaggggcctgagtcacgggccaccgccctgggtcggcgagctgggggaagggatctggacacctggcgtgtccgggcgggaagctggtgagggcccctggggacagagcggaggaccagtggttggggcgagaagagggcagtcccgcagcgagtcccacgcggggtgggagggatctaggccccgccctctcctcggctccgccctgcgcccccttccctctcctcattgtccttagacaaagcggtcgccgcccccgcccggccccctggtctctgtctccgtccctcctcctttgctgcctctttccctcctcctctccctccctcctcccctccctccagtctccggatctccctcggtccctctctcctcctcttcctctctctggacgcccggctcctccgcaccccctcccccgggggtcccgcggcctgtgagttgactgaggggctcagacttggggagtgggtgtctcctcgcccctgtccttgctcccgtccctggcccggaccttggctgtctcctctttgtgccgagattgtcagtctgtgcggctacagcggggtggagacggccggctctgtcacggcttcatgagagcggggacggggcgcaggacttgcaggcgccggggagaagagacatggagccggcccttggcactctggggtcgcgtggggcagtcggtgggggaggcaggcggtggtgacaggacagggtgggggtggacgccagggttctgggaacgcgctggcagccctgacgcccgggttccgaaagtctcgggggtgggtatttcccccgacccgcctcgggggcggagtgcggggcagaggggtgggggctggggagaggcgtggcccgagcggtgctggaagcggagccgggacctttggggcccgcgctgagacgcgcccggctgctgccgccgccctcctttcccctcttccctggtttcccttctcctctagacctgttcgctctccgcccctccttgcctccccaacaccccctcaggtcccgttgcctcctggtcctttcagggattcctggtccttccttcccacactagcctccctggggtatcgctgaggcagcctggcctgcacccaggttcccctcacccctgccacatttctctcttctccctcacgccaactttccttttcgcccttctctctctttctcacatcctagagacggtctttaatacgcattaaccctgtgctgccacatctggctcctgccctcattgcctccaatccggactcttcctctcacatcacccccaccacccccaacttgggctcacaacttctcttcactttttccatttccccagttctctgccttccgtctttccctctgtcctcatccttagcccctctgccctgctttgtgtcccacctctccccctccacttcctctcctcccaccctcagtctcacccccgggctgtctcactctctggagcctctccttcctgttctctgtccccagtgctccctaccctcacctcaagacgaccatggccaccatcccagactggaagctacagctgctagcccggcgccggcaggaggaggcgtccgttcgaggccgagagaaagcagaacgggagcgcctgtcccagatgccagcctggaaacgagggctcctggagcgccgccgggccaagcttgggctgtcccctggggagcctagccctgtgctagggactgtagaggctggacctccagacccggatgagtctgcggtccttctggaggccatcgggccagtgcaccagaaccgattcatccggcaggagcggcagcagcagcagcagcaacaacaacggagtgaagagctgctagcagagagaaagcctgggcctctggaggcccgggagcggagacccagccctggggagatgcgggatcagagccccaagggaagagagtcaagagaagagagactaagtccgagggagaccagagagaggaggctggggatagggggagcccaagagttgagcctgaggcctctggaggctcgggactggaggcaaagcccaggagaggtgggagacaggagctcccgactgtcagaggcatggaaatggaggctgagtcctggagaaactccagagcggagtctgagactagcagagtctcgagagcaaagccccaggagaaaagaggtggaaagtggactgagcccaggggaatctgcctaccagaagttgggcctgacagaggcccataaatggagacctgactccagagagtctcaggaacagagtttggtacaactggaggcaacagagtggaggctgaggtcaggagaagaaagacaagactactcggaagaatgtgggagaaaagaagagtggccagttccaggggtagctccaaaagagactgcagagctgtccgagaccctgacaagggaggcccaaggcaacagttccgcaggagtggaggcagcagagcagaggcctgtggaagatggcgagaggggcatgaagccaacagaagggtggaaatggaccctgaactccgggaaggctcgagaatggacacccagggacatagaggctcaaactcagaaaccagaacctccagagtcagcagagaagcttctggaatctcccggtgtggaggctggagaaggggaggctgagaaggaggaggcgggggctcagggcaggcctctgagagccctgcagaactgctgctctgtgccctcccccctcccaccagaggacgctgggactggaggcctgagacagcaggaagaggaagcagtggagctccagcccccaccaccagcccctctgtctcccccacccccagccccaactgccccccaacctcctggggatcccctcatgagccgcctgttctatggggtgaaggcagggccaggggtgggggccccccgccgcagtggacacaccttcaccgtcaacccccggcggtctgtgccccctgcgaccccagccaccccaacctctccagccacagttgatgctgcagtcccgggggctgggaagaagcggtacccaactgccgaggagatcttggttctggggggctacctccgtctcagccgcagctgccttgccaaggggtcccccgaaagacaccacaaacagcttaagatctccttcagcgagacagccctggagaccacgtaccaatacccctccgagagttcggtactggaggagctgggcccggagcctgaggtccccagtgcccccaaccctccagcagcccaacccgacgacgaagaggatgaggaagagctgctgctgctgcagccagagctccagggcgggctgcgcaccaaggccctgattgtggatgagtcctgccggcggtgaccatcttccaacatagggatatacctccctccttcttataactgaagatcctggagcccggaagattcagggcagacagaccctgataatgagcctggcagggaagggcaaccaacatcttgtaacttgctttccccaccctgtttctgggggcagagccaattgcccaatttctaccctaatccaaagtccctggtgtgggtggggttaaacgtgctggtgcatcctaggtcatccaagagtgagcgccaagtcctgagaaggggcacagaactccctggagggtggagatggagcacctgccccccatggcagggtacactctccccacagccttcctccccaccatcccgtggggactctcgggatttaagcactcgtctctctgggaggcccagaccccactccatttataggcacatctccttcatttcctaggtcactgcccctttgtttacagctcctgcctcctcccttgaccacagcctggtttacaaattccatcagctcccagccccacctgccaaagtcccaggtttacaagccacgcttacttgctgtgtctgcgtggaattctctcctctgtcccctccagtctcctcattggagtgacctgaaggtgtggcttcctccactttttctcagtattactttgccttagttttccccaagagggaaggctggaactcttaactctgtaccccttgatagttatttaattctgtttctcctagtggttcacaattgaactgaattgagatggtgtcgggtggctaaggagacacctcacctctccttccccattgtgccgcctttatcaattgcctgttttgttttgtttgttttttaactttccataataaaatggagttctcttcaa

SEQ ID NO: 171048 - DNA, 2853 bp, Homo sapiens
  Payload ID: 13653
  Gene Symbol: PPP1R18
  Gene Name: protein phosphatase 1, regulatory subunit 18
  ENST ID: ENST00000435929
  CDS Start-End: 132-1973
cctccctccagtctccggatctccctcggtccctctctcctcctcttcctctctctggacgcccggctcctccgcaccccctcccccgggggtcccgcggccttgctccctaccctcacctcaagacgaccatggccaccatcccagactggaagctacagctgctagcccggcgccggcaggaggaggcgtccgttcgaggccgagagaaagcagaacgggagcgcctgtcccagatgccagcctggaaacgagggctcctggagcgccgccgggccaagcttgggctgtcccctggggagcctagccctgtgctagggactgtagaggctggacctccagacccggatgagtctgcggtccttctggaggccatcgggccagtgcaccagaaccgattcatccggcaggagcggcagcagcagcagcagcaacaacaacggagtgaagagctgctagcagagagaaagcctgggcctctggaggcccgggagcggagacccagccctggggagatgcgggatcagagccccaagggaagagagtcaagagaagagagactaagtccgagggagaccagagagaggaggctggggatagggggagcccaagagttgagcctgaggcctctggaggctcgggactggaggcaaagcccaggagaggtgggagacaggagctcccgactgtcagaggcatggaaatggaggctgagtcctggagaaactccagagcggagtctgagactagcagagtctcgagagcaaagccccaggagaaaagaggtggaaagtagactgagcccaggggaatctgcctaccagaagttgggcctgacagaggcccataaatggagacctgactccagagagtctcaggaacagagtttggtacaactggaggcaacagagtggaggctgaggtcaggagaagaaagacaagactactcggaagaatgtgggagaaaagaagagtggccagttccaggggtagctccaaaagagactgcagagctgtccgagaccctgacaagggaggcccaaggcaacagttccgcaggagtggaggcagcagagcagaggcctgtggaagatggcgagaggggcatgaagccaacagaagggtggaaatggaccctgaactccaggaaggctcgagaatggacacccagggacatagaggctcaaactcagaaaccagaacctccagagtcagcagagaagcttctggaatctcccggtgtggaggctggagaaggggaggctgagaaggaggaggcgggggctcagggcaggcctctgagagccctgcagaactgctgctctgtgccctcccccctcccaccagaggacgctgggactggaggcctgagacagcaggaagaggaagcagtggagctccagcccccaccaccagcccctctgtctcccccacccccagccccaactgccccccaacctcctggggatcccctcatgagccgcctgttctatggggtgaaggcagggccaggggtgggggccccccgccgcagtggacacaccttcaccgtcaacccccggcggtctgtgccccctgcgaccccagccaccccaacctctccagccacagttgatgctgcagtcccgggggctgggaagaagcggtacccaactgccgaggagatcttggttctggggggctacctccgtctcagccgcagctgccttgccaaggggtcccccgaaagacaccacaaacagcttaagatctccttcagcgagacagccctggagaccacgtaccaatacccctccgagagttcggtactggaggagctgggcccggagcctgaggtccccagtgcccccaaccctccagcagcccaacccgacgacgaagaggatgaggaagagctgctgctgctgcagccagagctccagggcgggctgcgcaccaaggccctgattgtggatgagtcctgccggcggtgaccatcttccaacatagggatatacctccctccttcttataactgaagatcctggagcccggaagattcagggcagacagaccctgataatgagcctggcagggaagggcaaccaacatcttgtaacttgctttccccaccctgtttctgggggcagagccaattgcccaatttctaccctaatccaaagtccctggtgtgggtggggttaaacgtgctggtgcatcctaggtcatccaagagtgagcgccaagtcctgagaaggggcacagaactccctggagggtggagatggagcacctgccccccatggcagggtacactctccccacagccttcctccccaccatcccgtggggactctcgggatttaagcactcgtctctctgggaggcccagaccccactccatttataggcacatctccttcatttcctaggtcactgcccctttgtttacagctcctgcctcctcccttgaccacagcctggtttacaaattccatcagctcccagccccacctgccaaagtcccaggtttacaagccacgcttacttgctgtgtctgcgtggaattctctcctctgtcccctccagtctcctcattggagtgacctgaaggtgtggcttcctccactttttctcagtattactttgccttagttttccccaagagggaaggctggaactcttaactctgtaccccttgatagttatttaattctgtttctcctagtggttcacaattgaactgaattgagatggtgtcgggtggctaaggagacacctcacctctccttccccattgtgccgcctttatcaattgcctgttttgttttgtttgttttttaactttccataataaaatggagttctcttcaa

SEQ ID NO: 171049 - DNA, 2853 bp, Homo sapiens; identical to SEQ ID NO: 171046
  Payload ID: 13653
  Gene Symbol: PPP1R18
  Gene Name: protein phosphatase 1, regulatory subunit 18
  Uniprot ID: Q6NYC8
  ENST ID: ENST00000449705
  CDS Start-End: 132-1973

SEQ ID NO: 171050 - DNA, 4599 bp, Homo sapiens
  Payload ID: 13653
  Gene Symbol: PPP1R18
  Gene Name: protein phosphatase 1, regulatory subunit 18
  ENST ID: ENST00000412189
  CDS Start-End: 1878-3719
actttgccagagcggccgggtccccattcccattccttcaaatcccctttttcccggcagccgacctgtagacccaagggagacaggttgaagctagaaagagtcggggcagcagctctggtaggggagggagcatccaaaacctctggcttctgagcgcctctcctgccgcccatccacaaagccccccacagcctggcggctgccctcgaccccgcaaaacaaaggacttcagaggctggacctacagacccagatgagaaggcaaaagcgtagggaggagcggcaggagatgggaagggcgggccccgctcggagcagctgccgcttcctcccaaagtcccacgaggggcctgagtcacgggccaccgccctgggtcggcgagctgggggaagggatctggacacctggcgtgtccgggcgggaagctggtgagggcccctggggacagagcggaggaccagtggttggggcgagaagagggcagtcccgcagcgagtcccacgcggggtgggagggatctaggccccgccctctcctcggctccgccctgcgcccccttccctctcctcattgtccttagacaaagcggtcgccgcccccgcccggccccctggtctctgtctccgtccctcctcctttgctgcctctttccctcctcctctccctccctcctcccctccctccagtctccggatctccctcggtccctctctcctcctcttcctctctctggacgcccggctcctccgcaccccctcccccgggggtcccgcggcctgtgagttgactgaggggctcagacttggggagtgggtgtctcctcgcccctgtccttgctcccgtccctggcccggaccttggctgtctcctctttgtgccgagattgtcagtctgtgcggctacagcggggtggagacggccggctctgtcacggcttcatgagagcggggacggggcgcaggacttgcaggcgccggggagaagagacatggagccggcccttggcactctggggtcgcgtggggcagtcggtgggggaggcaggcggtggtgacaggacagggtgggggtggacgccagggttctgggaacgcgctggcagccctgacgcccgggttccgaaagtctcgggggtgggtatttcccccgacccgcctcgggggcggagtgcggggcagaggggtgggggctggggagaggcgtggcccgagcggtgctggaagcggagccgggacctttggggcccgcgctgagacgcgcccggctgctgccgccgccctcctttcccctcttccctggtttcccttctcctctagacctgttcgctctccgcccctccttgcctccccaacaccccctcaggtcccgttgcctcctggtcctttcagggattcctggtccttccttcccacactagcctccctggggtatcgctgaggcagcctggcctgcacccaggttcccctcacccctgccacatttctctcttctccctcacgccaactttccttttcgcccttctctctctttctcacatcctagagacggtctttaatacgcattaaccctgtgctgccacatctggctcctgccctcattgcctccaatccggactcttcctctcacatcacccccaccacccccaacttgggctcacaacttctcttcactttttccatttccccagttctctgccttccgtctttccctctgtcctcatccttagcccctctgccctgctttgtgtcccacctctccccctccacttcctctcctcccaccctcagtctcacccccgggctgtctcactctctggagcctctccttcctgttctctgtccccagtgctccctaccctcacctcaagacgaccatggccaccatcccagactggaagctacagctgctagcccggcgccggcaggaggaggcgtccgttcgaggccgagagaaagcagaacgggagcgcctgtcccagatgccagcctggaaacgagggctcctggagcgccgccgggccaagcttgggctgtcccctggggagcctagccctgtgctagggactgtagaggctggacctccagacccggatgagtctgcggtccttctggaggccatcgggccagtgcaccagaaccgattcatccggcaggagcggcagcagcagcagcagcaacaacaacggagtgaagagctgctagcagagagaaagcctgggcctctggaggcccgggagcggagacccagccctggggagatgcgggatcagagccccaagggaagagagtcaagagaagagagactaagtccgagggagaccagagagaggaggctggggatagggggagcccaagagttgagcctgaggcctctggaggctcgggactggaggcaaagcccaggagaggtgggagacaggagctcccgactgtcagaggcatggaaatggaggctgagtcctggagaaactccagagcggagtctgagactagcagagtctcgagagcaaagccccaggagaaaagaggtggaaagtagactgagcccaggggaatctgcctaccagaagttgggcctgacagaggcccataaatggagacctgactccagagagtctcaggaacagagtttggtacaactggaggcaacagagtggaggctgaggtcaggagaagaaagacaagactactcggaagaatgtgggagaaaagaagagtggccagttccaggggtagctccaaaagagactgcagagctgtccgagaccctgacaagggaggcccaaggcaacagttccgcaggagtggaggcagcagagcagaggcctgtggaagatggcgagaggggcatgaagccaacagaagggtggaaatggaccctgaactccaggaaggctcgagaatggacacccagggacatagaggctcaaactcagaaaccagaacctccagagtcagcagagaagcttctggaatctcccggtgtggaggctggagaaggggaggctgagaaggaggaggcgggggctcagggcaggcctctgagagccctgcagaactgctgctctgtgccctcccccctcccaccagaggacgctgggactggaggcctgagacagcaggaagaggaagcagtggagctccagcccccaccaccagcccctctgtctcccccacccccagccccaactgccccccaacctcctggggatcccctcatgagccgcctgttctatggggtgaaggcagggccaggggtgggggccccccgccgcagtggacacaccttcaccgtcaacccccggcggtctgtgccccctgcgaccccagccaccccaacctctccagccacagttgatgctgcagtcccgggggctgggaagaagcggtacccaactgccgaggagatcttggttctggggggctacctccgtctcagccgcagctgccttgccaaggggtcccccgaaagacaccacaaacagcttaagatctccttcagcgagacagccctggagaccacgtaccaatacccctccgagagttcggtactggaggagctgggcccggagcctgaggtccccagtgcccccaaccctccagcagcccaacccgacgacgaagaggatgaggaagagctgctgctgctgcagccagagctccagggcgggctgcgcaccaaggccctgattgtggatgagtcctgccggcggtgaccatcttccaacatagggatatacctccctccttcttataactgaagatcctggagcccggaagattcagggcagacagaccctgataatgagcctggcagggaagggcaaccaacatcttgtaacttgctttccccaccctgtttctgggggcagagccaattgcccaatttctaccctaatccaaagtccctggtgtgggtggggttaaacgtgctggtgcatcctaggtcatccaagagtgagcgccaagtcctgagaaggggcacagaactccctggagggtggagatggagcacctgccccccatggcagggtacactctccccacagccttcctccccaccatcccgtggggactctcgggatttaagcactcgtctctctgggaggcccagaccccactccatttataggcacatctccttcatttcctaggtcactgcccctttgtttacagctcctgcctcctcccttgaccacagcctggtttacaaattccatcagctcccagccccacctgccaaagtcccaggtttacaagccacgcttacttgctgtgtctgcgtggaattctctcctctgtcccctccagtctcctcattggagtgacctgaaggtgtggcttcctccactttttctcagtattactttgccttagttttccccaagagggaaggctggaactcttaactctgtaccccttgatagttatttaattctgtttctcctagtggttcacaattgaactgaattgagatggtgtcgggtggctaaggagacacctcacctctccttccccattgtgccgcctttatcaattgcctgttttgttttgtttgttttttaactttccataataaaatggagttctcttcaa

SEQ ID NO: 171051 - DNA, 2853 bp, Homo sapiens; identical to SEQ ID NO: 171046
  Payload ID: 13653
  Gene Symbol: PPP1R18
  Gene Name: protein phosphatase 1, regulatory subunit 18
  Uniprot ID: Q6NYC8
  ENST ID: ENST00000451544
  CDS Start-End: 132-1973

SEQ ID NO: 171052 - DNA, 2853 bp, Homo sapiens
  Payload ID: 13653
  Gene Symbol: PPP1R18
  Gene Name: protein phosphatase 1, regulatory subunit 18
  Uniprot ID: Q6NYC8
  ENST ID: ENST00000438945
  CDS Start-End: 132-1973
cctccctccagtctccggatctccctcggtccctctctcctcctcttcctctctctggacgcccggctcctccgcaccccctcccccgggggtcccgcggccttgctccctaccctcacctcaagacgaccatggccaccatcccagactggaagctacagctgctagcccggcgccggcaggaggaggcgtccgttcgaggccgagagaaagcagaacgggagcgcctgtcccagatgccagcctggaaacgagggctcctggagcgccgccgggccaagcttgggctgtcccctggggagcctagccctgtgctagggactgtagaggctggacctccagacccggatgagtctgcggtccttctggaggccatcgggccagtgcaccagaaccgattcatccggcaggagcggcagcagcagcagcagcaacaacaacggagtgaagagctgctagcagagagaaagcctgggcctctggaggcccgggagcggagacccagccctggggagatgcgggatcagagccccaagggaagagagtcaagagaagagagactaagtccgagggagaccagagagaggaggctggggatagggggagcccaagagttgagcctgaggcctctggaggctcgggactggaggcaaagcccaggagaggtgggagacaggagctcccgactgtcagaggcatggaaatggaggctgagtcctggagaaactccagagcggagtctgagactagcagagtctcgagagcaaagccccaggagaaaagaggtggaaagtagactgagcccaggggaatctgcctaccagaagttgggcctgacagaggcccataaatggagacctgactccagagagtctcaggaacagagtttggtacaactggaggcaacagagtggaggctgaggtcaggagaagaaagacaagactactcggaagaatgtgggagaaaagaagagtggccagttccaggggtagctccaaaagagactgcagagctgtccgagaccctgacaagggaggcccaaggcaacagttccgcaggagtggaggcagcagagcagaggcctgtggaagatggcgagaggggcatgaagccaacagaagggtggaaatggaccctgaactccgggaaggctcgagaatggacacccagggacatagaggctcaaactcagaaaccagaacctccagagtcagcagagaagcttctggaatctcccggtgtggaggctggagaaggggaggctgagaaggaggaggcgggggctcagggcaggcctctgagagccctgcagaactgctgctctgtgccctcccccctcccaccagaggacgctgggactggaggcctgagacagcaggaagaggaagcagtggagctccagcccccaccaccagcccctctgtctcccccacccccagccccaactgccccccaacctcctggggatcccctcatgagccgcctgttctatggggtgaaggcagggccaggggtgggggccccccgccgcagtggacacaccttcaccgtcaacccccggcggtctgtgccccctgcgaccccagccaccccaacctctccagccacagttgatgctgcagtcccgggggctgggaagaagcggtacccaactgccgaggagatcttggttctggggggctacctccgtctcagccgcagctgccttgccaaggggtcccccgaaagacaccacaaacagcttaagatctccttcagcgagacagccctggagaccacgtaccaatacccctccgagagttcggtactggaggagctgggcccggagcctgaggtccccagtgcccccaaccctccagcagcccaacccgacgacgaagaggatgaggaagagctgctgctcctgcagccagagctccagggcgggctgcgcaccaaggccctgattgtggatgagtcctgccggcggtgaccatcttccaacatagggatatacctccctccttcttataactgaagatcctggagcccggaagattcagggcagacagaccctgataatgagcctggcagggaagggcaaccaacatcttgtaacttgctttccccaccctgtttctgggggcagagccaattgcccaatttctaccctaatccaaagtccctggtgtgggtggggttaaacgtgctggtgcatcctaggtcatccaagagtgagcgccaagtcctgagaaggggcacagaactccctggagggtggagatggagcacctgccccccatggcagggtacactctccccacagccttcctccccaccatcccgtggggactctcgggatttaagcactcgtctctctgggaggcccagaccccactccatttataggcacatctccttcatttcctaggtcactgcccctttgtttacagctcctgcctcctcccttgaccacagcctggtttacaaattccatcagctcccagccccacctgccaaagtcccaggtttacaagccacgcttacttgctgtgtctgcgtggaattctctcctctgtcccctccagtctcctcattggagtgacctgaaggtgtggcttcctccactttttctcagtattactttgccttagttttccccaagagggaaggctggaactcttaactctgtaccccttgatagttatttaattctgtttctcctagtggttcacaattgaactgaattgagatggtgtcgggtggctaaggagacacctcacctctccttccccattgtgccgcctttatcaattgcctgttttgttttgtttgttttttaactttccataataaaatggagttctcttcaa

SEQ ID NO: 171053 - DNA, 4599 bp, Homo sapiens; identical to SEQ ID NO: 171044
  Payload ID: 13653
  Gene Symbol: PPP1R18
  Gene Name: protein phosphatase 1, regulatory subunit 18
  Uniprot ID: Q6NYC8
  ENST ID: ENST00000443517
  CDS Start-End: 1878-3719

SEQ ID NO: 171054 - DNA, 4599 bp, Homo sapiens; identical to SEQ ID NO: 171044
  Payload ID: 13653
  Gene Symbol: PPP1R18
  Gene Name: protein phosphatase 1, regulatory subunit 18
  Uniprot ID: Q6NYC8
  ENST ID: ENST00000437121
  CDS Start-End: 1878-3719

SEQ ID NO: 171055 - DNA, 1111 bp, Homo sapiens
  Payload ID: 13653
  Gene Symbol: PPP1R18
  Gene Name: protein phosphatase 1, regulatory subunit 18
  ENST ID: ENST00000435006
  CDS Start-End: 1-231
cttaagatctccttcagcgagacagccctggagaccacgtaccaatacccctccgagagttcggtactggaggagctgggcccggagcctgaggtccccagtgcccccaaccctccagcagcccaacccgacgacgaagaggatgaggaagagctgctgctgctgcagccagagctccagggcgggctgcgcaccaaggccctgattgtggatgagtcctgccggcggtgaccatcttccaacatagggatatacctccctccttcttataactgaagatcctggagcccggaagattcagggcagacagaccctgataatgagcctggcagggaagggcaaccaacatcttgtaacttgctttccccaccctgtttctgggggcagagccaattgcccaatttctaccctaatccaaagtccctggtgtgggtggggttaaacgtgctggtgcatcctaggtcatccaagagtgagcgccaagtcctgagaaggggcacagaactccctggagggtggagatggagcacctgccccccatggcagggtacactctccccacagccttcctccccaccatcccgtggggactctcgggatttaagcactcgtctctctgggaggcccagaccccactccatttataggcacatctccttcatttcctaggtcactgcccctttgtttacagctcctgcctcctcccttgaccacagcctggtttacaaattccatcagctcccagccccacctgccaaagtcccaggtttacaagccacgcttacttgctgtgtctgcgtggaattctctcctctgtcccctccagtctcctcattggagtgacctgaaggtgtggcttcctccactttttctcagtattactttgccttagttttccccaagagggaaggctggaactcttaactctgtaccccttgatagttatttaattctgtttctcctagtggttcacaattgaactgaattgagatggtgtcgggtggctaaggagacacctcacctctccttccccattgtgccgcctttatcaattgcctgttttgttttgtttgttttttaactttccataataaaatggagttctcttcaa

SEQ ID NO: 171056 - DNA, 4599 bp, Homo sapiens
  Payload ID: 13653
  Gene Symbol: PPP1R18
  Gene Name: protein phosphatase 1, regulatory subunit 18
  Uniprot ID: Q6NYC8
  ENST ID: ENST00000455935
  CDS Start-End: 1878-3719
actttgccagagcggccgggtccccattcccattccttcaaatcccctttttcccggcagccgacctgtagacccaagggagacaggttgaagctagaaagagtcggggcagcagctctggtaggggagggagcatccaaaacctctggcttctgagcgcctctcctgccgcccatccacaaagccccccacagcctggcggctgccctcgaccccgcaaaacaaaggacttcagaggctggacctacagacccagatgagaaggcaaaagcgtagggaggagcggcaggagatgggaagggcgggccccgctcggagcagctgccgcttcctcccaaagtcccacgaggggcctgagtcacgggccaccgccctgggtcggcgagctgggggaagggatctggacacctggcgtgtccgggcgggaagctggtgagggcccctggggacagagcggaggaccagtggttggggcgagaagagggcagtcccgcagcgagtcccacgcggggtgggagggatctaggccccgccctctcctcggctccgccctgcgcccccttccctctcctcattgtccttagacaaagcggtcgccgcccccgcccggccccctggtctctgtctccgtccctcctcctttgctgcctctttccctcctcctctccctccctcctcccctccctccagtctccggatctccctcggtccctctctcctcctcttcctctctctggacgcccggctcctccgcaccccctcccccgggggtcccgcggcctgtgagttgactgaggggctcagacttggggagtgggtgtctcctcgcccctgtccttgctcccgtccctggcccggaccttggctgtctcctctttgtgccgagattgtcagtctgtgcggctacagcggggtggagacggccggctctgtcacggcttcatgagagcggggacggggcgcaggacttgcaggcgccggggagaagagacatggagccggcccttggcactctggggtcgcgtggggcagtcggtgggggaggcaggcggtggtgacaggacagggtgggggtggacgccagggttctgggaacgcgctggcagccctgacgcccgggttccgaaagtctcgggggtgggtatttcccccgacccgcctcgggggcggagtgcggggcagaggggtgggggctggggagaggcgtggcccgagcggtgctggaagcggagccgggacctttggggcccgcgctgagacgcgcccggctgctgccgccgccctcctttcccctcttccctggtttcccttctcctctagacctgttcgctctccgcccctccttgcctccccaacaccccctcaggtcccgttgcctcctggtcctttcagggattcctggtccttccttcccacactagcctccctggggtatcgctgaggcagcctggcctgcacccaggttcccctcacccctgccacatttctctcttctccctcacgccaactttccttttcgcccttctctctctttctcacatcctagagacggtctttaatacgcattaaccctgtgctgccacatctggctcctgccctcattgcctccaatccggactcttcctctcacatcacccccaccacccccaacttgggctcacaacttctcttcactttttccatttccccagttctctgccttccgtctttccctctgtcctcatccttagcccctctgccctgctttgtgtcccacctctccccctccacttcctctcctcccaccctcagtctcacccccgggctgtctcactctctggagcctctccttcctgttctctgtccccagtgctccctaccctcacctcaagacgaccatggccaccatcccagactggaagctacagctgctagcccggcgccggcaggaggaggcgtccgttcgaggccgagagaaagcagaacgggagcgcctgtcccagatgccagcctggaaacgagggctcctggagcgccgccgggccaagcttgggctgtcccctggggagcctagccctgtgctagggactgtagaggctggacctccagacccggatgagtctgcggtccttctggaggccatcgggccagtgcaccagaaccgattcatccggcaggagcggcagcagcagcagcagcaacaacaacggagtgaagagctgctagcagagagaaagcctgggcctctggaggcccgggagcggagacccagccctggggagatgcgggatcagagccccaagggaagagagtcaagagaagagagactaagtccgagggagaccagagagaggaggctggggatagggggagcccaagagttgagcctgaggcctctggaggctcgggactggaggcaaagcccaggagaggtgggagacaggagctcccgactgtcagaggcatggaaatggaggctgagtcctggagaaactccagagcggagtctgagactagcagagtctcgagagcaaagccccaggagaaaagaggtggaaagtagactgagcccaggggaatctgcctaccagaagttgggcctgacagaggcccataaatggagacctgactccagagagtctcaggaacagagtttggtacaactggaggcaacagagtggaggctgaggtcaggagaagaaagacaagactactcggaagaatgtgggagaaaagaagagtggccagttccaggggtagctccaaaagagactgcagagctgtccgagaccctgacaagggaggcccaaggcaacagttccgcaggagtggaggcagcagagcagaggcctgtggaagatggcgagaggggcatgaagccaacagaagggtggaaatggaccctgaactccgggaaggctcgagaatggacacccagggacatagaggctcaaactcagaaaccagaacctccagagtcagcagagaagcttctggaatctcccggtgtggaggctggagaaggggaggctgagaaggaggaggcgggggctcagggcaggcctctgagagccctgcagaactgctgctctgtgccctcccccctcccaccagaggacgctgggactggaggcctgagacagcaggaagaggaagcagtggagctccagcccccaccaccagcccctctgtctcccccacccccagccccaactgccccccaacctcctggggatcccctcatgagccgcctgttctatggggtgaaggcagggccaggggtgggggccccccgccgcagtggacacaccttcaccgtcaacccccggcggtctgtgccccctgcgaccccagccaccccaacctctccagccacagttgatgctgcagtcccgggggctgggaagaagcggtacccaactgccgaggagatcttggttctggggggctacctccgtctcagccgcagctgccttgccaaggggtcccccgaaagacaccacaaacagcttaagatctccttcagcgagacagccctggagaccacgtaccaatacccctccgagagttcggtactggaggagctgggcccggagcctgaggtccccagtgcccccaaccctccagcagcccaacccgacgacgaagaggatgaggaagagctgctgctcctgcagccagagctccagggcgggctgcgcaccaaggccctgattgtggatgagtcctgccggcggtgaccatcttccaacatagggatatacctccctccttcttataactgaagatcctggagcccggaagattcagggcagacagaccctgataatgagcctggcagggaagggcaaccaacatcttgtaacttgctttccccaccctgtttctgggggcagagccaattgcccaatttctaccctaatccaaagtccctggtgtgggtggggttaaacgtgctggtgcatcctaggtcatccaagagtgagcgccaagtcctgagaaggggcacagaactccctggagggtggagatggagcacctgccccccatggcagggtacactctccccacagccttcctccccaccatcccgtggggactctcgggatttaagcactcgtctctctgggaggcccagaccccactccatttataggcacatctccttcatttcctaggtcactgcccctttgtttacagctcctgcctcctcccttgaccacagcctggtttacaaattccatcagctcccagccccacctgccaaagtcccaggtttacaagccacgcttacttgctgtgtctgcgtggaattctctcctctgtcccctccagtctcctcattggagtgacctgaaggtgtggcttcctccactttttctcagtattactttgccttagttttccccaagagggaaggctggaactcttaactctgtaccccttgatagttatttaattctgtttctcctagtggttcacaattgaactgaattgagatggtgtcgggtggctaaggagacacctcacctctccttccccattgtgccgcctttatcaattgcctgttttgttttgtttgttttttaactttccataataaaatggagttctcttcaa

SEQ ID NO: 171057 - DNA, 4599 bp, Homo sapiens; identical to SEQ ID NO: 171056
  Payload ID: 13653
  Gene Symbol: PPP1R18
  Gene Name: protein phosphatase 1, regulatory subunit 18
  Uniprot ID: Q6NYC8
  ENST ID: ENST00000438815
  CDS Start-End: 1878-3719

SEQ ID NO: 171058 - DNA, 1111 bp, Homo sapiens; identical to SEQ ID NO: 171055
  Payload ID: 13653
  Gene Symbol: PPP1R18
  Gene Name: protein phosphatase 1, regulatory subunit 18
  ENST ID: ENST00000455026
  CDS Start-End: 1-231

SEQ ID NO: 171059 - DNA, 2853 bp, Homo sapiens; identical to SEQ ID NO: 171052
  Payload ID: 13653
  Gene Symbol: PPP1R18
  Gene Name: protein phosphatase 1, regulatory subunit 18
  Uniprot ID: Q6NYC8
  ENST ID: ENST00000444206
  CDS Start-End: 132-1973

SEQ ID NO: 171060 - DNA, 4597 bp, Homo sapiens
  Payload ID: 13653
  Gene Symbol: PPP1R18
  Gene Name: protein phosphatase 1, regulatory subunit 18
  Uniprot ID: Q6NYC8
  ENST ID: ENST00000615527
  CDS Start-End: 1878-3719
actttgccagagcggccgggtccccattcccattccttcaaatcccctttttcccggcagccgacctgtagacccaagggagacaggttgaagctagaaagagtcggggcagcagctctggtaggggagggagcatccaaaacctctggcttctgagcgcctctcctgccgcccatccacaaagccccccacagcctggcggctgccctcgaccccgcaaaacaaaggacttcagaggctggacctacagacccagatgagaaggcaaaagcgtagggaggagcggcaggagatgggaagggcgggccccgctcggagcagctgccgcttcctcccaaagtcccacgaggggcctgagtcacgggccaccgccctgggtcggcgagctgggggaagggatctggacacctggcgtgtccgggcgggaagctggtgagggcccctggggacagagcggaggaccagtggttggggcgagaagagggcagtcccgcagcgagtcccacgcggggtgggagggatctaggccccgccctctcctcggctccgccctgcgcccccttccctctcctcattgtccttagacaaagcggtcgccgcccccgcccggccccctggtctctgtctccgtccctcctcctttgctgcctctttccctcctcctctccctccctcctcccctccctccagtctccggatctccctcggtccctctctcctcctcttcctctctctggacgcccggctcctccgcaccccctcccccgggggtcccgcggcctgtgagttgactgaggggctcagacttggggagtgggtgtctcctcgcccctgtccttgctcccgtccctggcccggaccttggctgtctcctctttgtgccgagattgtcagtctgtgcggctacagcggggtggagacggccggctctgtcacggcttcatgagagcggggacggggcgcaggacttgcaggcgccggggagaagagacatggagccggcccttggcactctggggtcgcgtggggcagtcggtgggggaggcaggcggtggtgacaggacagggtgggggtggacgccagggttctgggaacgcgctggcagccctgacgcccgggttccgaaagtctcgggggtggctatttcccccgacccgcctcgggggcggagtgcggggcagaggggtgggggctggggagaggcgtggcccgagcggtgctggaagcggagccgggacctttggggcccgcgctgagacgcgcccggctgctgccgccgccctcctttcccctcttccctggtttcccttctcctctagacctgttcgctctccgcccctccttgcctccccaacaccccctcaggtcccgttgcctcctggtcctttcagggattcctggtccttccttcccacactagcctccctggggtatcgctgaggcagcctggcctgcacccaggttcccctcacccctgccacatttctctcttctccctcacgccaactttccttttcgcccttctctctctttctcacatcctagagacggtctttaatacgcattaaccctgtgctgccacatctggctcctgccctcattgcctccaatccggactcttcctctcacatcacccccaccacccccaacttgggctcacaacttctcttcactttttccatttccccagttctctgccttccgtctttccctctgtcctcatccttagcccctctgccctgctttgtgtcccacctctccccctccacttcctctcctcccaccctcagtctcacccccgggctgtctcactctctggagcctctccttcctgttctctgtccccagtgctccctaccctcacctcaagacgaccatggccaccatcccagactggaagctacagctgctagcccggcgccggcaggaggaggcgtccgttcgaggccgagagaaagcagaacgggagcgcctgtcccagatgccagcctggaaacgagggctcctggagcgccgccgggccaagcttgggctgtcccctggggagcctagccctgtgctagggactgtagaggctggacctccagacccggatgagtctgcggtccttctggaggccatcgggccagtgcaccagaaccgattcatccggcaggagcggcagcagcagcagcagcaacaacaacggagtgaagagctgctagcagagagaaagcctgggcctctggaggcccgggagcggagacccagccctggggagatgcgggatcagagccccaagggaagagagtcaagagaagagagactaagtccgagggagaccagagagaggaggctggggatagggggagcccaagagttgagcctgaggcctctggaggctcgggactggaggcaaagcccaggagaggtgggagacaggagctcccgactgtcagaggcatggaaatggaggctgagtcctggagaaactccagagcggagtctgagactagcagagtctcgagagcaaagccccaggagaaaagaggtggaaagtagactgagcccaggggaatctgcctaccagaagttgggcctgacagaggcccataaatggagacctgactccagagagtctcaggaacagagtttggtacaactggaggcaacagagtggaggctgaggtcaggagaagaaagacaagactactcggaagaatgtgggagaaaagaagagtggccagttccaggggtagctccaaaagagactgcagagctgtccgagaccctgacaagggaggcccaaggcaacagttccgcaggagtggaggcagcagagcagaggcctgtggaagatggcgagaggggcatgaagccaacagaagggtggaaatggaccctgaactccgggaaggctcgagaatggacacccagggacatagaggctcaaactcagaaaccagaacctccagagtcagcagagaagcttctggaatctcccggtgtggaggctggagaaggggaggctgagaaggaggaggcgggggctcagggcaggcctctgagagccctgcagaactgctgctctgtgccctcccccctcccaccagaggacgctgggactggaggcctgagacagcaggaagaggaagcagtggagctccagcccccaccaccagcccctctgtctcccccacccccagccccaactgccccccaacctcctggggatcccctcatgagccgcctgttctatggggtgaaggcagggccaggggtgggggccccccgccgcagtggacacaccttcaccgtcaacccccggcggtctgtgccccctgcgaccccagccaccccaacctctccagccacagttgatgctgcagtcccgggggctgggaagaagcggtacccaactgccgaggagatcttggttctggggggctacctccgtctcagccgcagctgccttgccaaggggtcccccgaaagacaccacaaacagcttaagatctccttcagcgagacagccctggagaccacgtaccaatacccctccgagagttcggtactggaggagctgggcccggagcctgaggtccccagtgcccccaaccctccagcagcccaacccgacgacgaagaggatgaggaagagctgctgctgctgcagccagagctccagggcgggctgcgcaccaaggccctgattgtggatgagtcctgccggcggtgaccatcttccaacatagggatatacctccctccttcttataactgaagatcctggagcccggaagattcagggcagacagaccctgataatgagcctggcagggaagggcaaccaacatcttgtaacttgctttccccaccctgtttctgggggcagagccaattgcccaatttctaccctaatccaaagtccctggtgtgggtggggttaaacgtgctggtgcatcctaggtcatccaagagtgagcgccaagtcctgagaaggggcacagaactccctggagggtggagatggagcacctgccccccatggcagggtacactctccccacagccttcctccccaccatcccgtggggactctcgggatttaagcactcgtctctctgggaggcccagaccccactccatttataggcacatctccttcatttcctaggtcactgcccctttgtttacagctcctgcctcctcccttgaccacagcctggtttacaaattccatcagctcccagccccacctgccaaagtcccaggtttacaagccacgcttacttgctgtgtctgcgtggaattctctcctctgtcccctccagtctcctcattggagtgacctgaaggtgtggcttcctccactttttctcagtattactttgccttagttttccccaagagggaaggctggaactcttaactctgtaccccttgatagttatttaattctgtttctcctagtggttcacaattgaactgaattgagatggtgtcgggtggctaaggagacacctcacctctccttccccattgtgccgcctttatcaattgcctgttttgttttgtttgttttttaactttccataataaaatggagttctcttc

SEQ ID NO: 171061 - DNA, 1448 bp, Homo sapiens
  Payload ID: 13653
  Gene Symbol: PPP1R18
  Gene Name: protein phosphatase 1, regulatory subunit 18
  Uniprot ID: Q6NYC8
  ENST ID: ENST00000615892
  CDS Start-End: 71-568
cccaccaccagcccctctgtctcccccacccccagccccaactgccccccaacctcctggggatcccctcatgagccgcctgttctatggggtgaaggcagggccaggggtgggggccccccgccgcagtggacacaccttcaccgtcaacccccggcggtctgtgccccctgcgaccccagccaccccaacctctccagccacagttgatgctgcagtcccgggggctgggaagaagcggtacccaactgccgaggagatcttggttctggggggctacctccgtctcagccgcagctgccttgccaaggggtcccccgaaagacaccacaaacagcttaagatctccttcagcgagacagccctggagaccacgtaccaatacccctccgagagttcggtactggaggagctgggcccggagcctgaggtccccagtgcccccaaccctccagcagcccaacccgacgacgaagaggatgaggaagagctgctgctgctgcagccagagctccagggcgggctgcgcaccaaggccctgattgtggatgagtcctgccggcggtgaccatcttccaacatagggatatacctccctccttcttataactgaagatcctggagcccggaagattcagggcagacagaccctgataatgagcctggcagggaagggcaaccaacatcttgtaacttgctttccccaccctgtttctgggggcagagccaattgcccaatttctaccctaatccaaagtccctggtgtgggtggggttaaacgtgctggtgcatcctaggtcatccaagagtgagcgccaagtcctgagaaggggcacagaactccctggagggtggagatggagcacctgccccccatggcagggtacactctccccacagccttcctccccaccatcccgtggggactctcgggatttaagcactcgtctctctgggaggcccagaccccactccatttataggcacatctccttcatttcctaggtcactgcccctttgtttacagctcctgcctcctcccttgaccacagcctggtttacaaattccatcagctcccagccccacctgccaaagtcccaggtttacaagccacgcttacttgctgtgtctgcgtggaattctctcctctgtcccctccagtctcctcattggagtgacctgaaggtgtggcttcctccactttttctcagtattactttgccttagttttccccaagagggaaggctggaactcttaactctgtaccccttgatagttatttaattctgtttctcctagtggttcacaattgaactgaattgagatggtgtcgggtggctaaggagacacctcacctctccttccccattgtgccgcctttatcaattgcctgttttgttttgtttgttttttaactttccataataaaatggagttctcttcaa

SEQ ID NO: 171062 - DNA, 3137 bp, Homo sapiens
  Payload ID: 13654
  Gene Symbol: PPP1R21
  Gene Name: protein phosphatase 1, regulatory subunit 21
  Uniprot ID: Q6ZMI0
  ENST ID: ENST00000281394
  CDS Start-End: 186-2495
ccaccttcctcccaccccgggaacccggaagtggaggaggaggcgcggcggcggcggcggcggcggctgcggtggccaagcaggcagatactgcctgacccgttcccgggagcgtgtctgggtttgggggcgggagacaggctgagccgcctgggcggcctggcctgtacggggcgggggaggccatggcctcggctgagttgcaggggaagtaccagaagctggctcaggagtactcgaagcttcgggctcagaatcaggttctgaaaaaaggtgttgtggatgaacaagcaaattctgcagctttaaaggagcaactgaaaatgaaggatcagtcattgagaaaactacaacaggaaatggacagtttgacatttcgaaatctgcagcttgccaagagggtagaactacttcaagatgaactagctctaagtgaaccacgaggcaagaaaaacaagaaaagtggagaatcttcttctcagttgagtcaagagcagaagagtgtctttgatgaagatctgcaaaagaagatagaagagaatgaacggttgcatatacaattttttgaagctgatgagcagcacaagcatgtggaagcagagctgaggagtcgactggccactctggagacagaagcagcccagcaccaagctgtggttgacggtctcacccggaagtacatggaaaccattgagaagctgcagaacgacaaggctaaactagaagtgaaatctcagactctagaaaaggaagccaaggaatgtcgacttcgaacggaagaatgtcaattacagttaaagactcttcatgaagatttgtcaggtagattagaggaatccttatcaatcatcaatgaaaaagtaccttttaatgatacaaaatatagtcagtacaacgctctgaacgttccactccacaataggagacaccagctgaagatgcgagatattgctgggcaggccctggcttttgttcaggatcttgtgacggctcttctaaactttcatacctacacagaacagaggattcaaatttttcctgttgattctgccattgacactatatctccattgaatcagaagttctcacaataccttcatgaaaatgcgtcctatgtccgccctcttgaggaaggaatgcttcatttatttgaaagtatcactgaggatactgtgactgtcttggagacaactgtgaaattgaaaactttttcagaacacttaacctcctacatatgttttcttaggaagattcttccctatcagttaaaaagtttagaagaagaatgtgaatcctctctttgcacatctgcgttaagagccaggaatctagagctgtcccaggacatgaaaaaaatgacagctgtgtttgagaagctgcagacttacatagctcttcttgccttgccaagtacagagccagatggactccttcggacaaactacagttctgtgttaacaaatgttggtgctgctctgcatggatttcatgacgttatgaaagatatttccaaacattatagtcaaaaagctgcaatagagcatgaacttccaacagcaacacagaagctgataacaactaatgactgtatcctgtcatcagtagtggcattaacaaatggagcaggaaagattgcatccttcttcagcaacaatttggactacttcattgcttcactgagctatggacctaaggcagcgagtggattcattagtcctctttcagctgaatgcatgctacagtataagaaaaaagctgctgcctatatgaagtctttgagaaagcccctcttggagtctgtgccttatgaagaagcactggcaaaccgccgcatccttctcagctctactgaaagtcgagaaggccttgcacagcaagttcaacagagtttggaaaagatttctaaactggagcaggaaaaagaacattggatgttggaagcacaattagccaaaatcaagctagagaaagaaaaccagcgaattgcagataagctgaagaatacaggtagtgcccagctggttgggctggcccaggaaaatgctgctgtgtcaaatactgctggccaggatgaagccacagctaaggctgtgttggagcccattcagagcaccagtctagttccagatgtggaatctcgtgaagacttaattaaaaatcactacatggcaaggatagtggaacttacgtctcagttgcagctggctgacagtaagtcagtgcatttttatgccgagtgccgagcactgtctaaaagactggccttggctgaaaagtctaaggaagcattgacagaagaaatgaaacttgccagtcagaacatcagcagacttcaggatgagctgacaactaccaagaggagttacgaggatcagttaagtatgatgagtgaccacctgtgcagcatgaatgagacattatctaaacagagagaagagattgacacactaaagatgtccagtaaggggaattctaaaaagaacaagagtcgatagttttgaaatagctggttggcgactgttctttccagacctgctcctgctgcacagagccgcagggctgagaccacgtccatgctggctgccttcaggaagctaaagtattgttggacctagtaaactagtcagtgttggaaacggccttgaaatatttaaaacatatttgtaaccagtgaggcaaatacagaagttgatgtcggcagtaaatggaaaacaatacgtatgtcatggatattgtaggtttccttatgctgtttttactgtgcactttttaaaattaggttttaatttcagtatgtaagaacaaatattttgtatactttcaaactcaattatatggtaatcgatttggtatctatggaatagatatatgtttctggaaaaaaatgcttaaattgtcaaactgtcattacttcttattatagttgaaggcattctccagattctttttaaaagatttgttcatatttctctctctctctctctctctctctctctcttctttctctctgagggagagggagccctccaaacttcagatcctgtgggtttagtatcattatcttcagctctttgataccctgtgttagagtaatagctaaaggaagttcatgtcaataaattcatacttatatcaca

SEQ ID NO: 171063 - DNA, 3142 bp, Homo sapiens
  Payload ID: 13654
  Gene Symbol: PPP1R21
  Gene Name: protein phosphatase 1, regulatory subunit 21
  Uniprot ID: Q6ZMI0
  ENST ID: ENST00000294952
  CDS Start-End: 158-2500
aagtggaggaggaggcgcggcggcggcggcggcggcggctgcggtggccaagcaggcagatactgcctgacccgttcccgggagcgtgtctgggtttgggggcgggagacaggctgagccgcctgggcggcctggcctgtacggggcgggggaggccatggcctcggctgagttgcaggggaagtaccagaagctggctcaggagtactcgaagcttcgggctcagaatcaggttctgaaaaaaggtgttgtggatgaacaagcaaattctgcagctttaaaggagcaactgaaaatgaaggatcagtcattgagaaaactacaacaggaaatggacagtttgacatttcgaaatctgcagcttgccaagagggtagaactacttcaagatgaactagctctaagtgaaccacgaggcaagaaaaacaagaaaagtggagaatcttcttctcagttgagtcaagagcagaagagtgtctttgatgaagatctgcaaaagaagatagaagagaatgaacggttgcatatacaattttttgaagctgatgagcagcacaagcatgtggaagcagagctgaggagtcgactggccactctggagacagaagcagcccagcaccaagctgtggttgacggtctcacccggaagtacatggaaaccattgagaagctgcagaacgacaaggctaaactagaagtgaaatctcagactctagaaaaggaagccaaggaatgtcgacttcgaacggaagaatgtcaattacagttaaagactcttcatgaagatttgtcaggtagattagaggaatccttatcaatcatcaatgaaaaagtaccttttaatgatacaaaatatagtcagtacaacgctctgaacgttccactccacaataggagacaccagctgaagatgcgagatattgctgggcaggccctggcttttgttcaggatcttgtgacggctcttctaaactttcatacctacacagaacagaggattcaaatttttcctgttgattctgccattgacactatatctccattgaatcagaagttctcacaataccttcatgaaaatgcgtcctatgtccgccctcttgaggaaggaatgcttcatttatttgaaagtatcactgaggatactgtgactgtcttggagacaactgtgaaattgaaaactttttcagaacacttaacctcctacatatgttttcttaggaagattcttccctatcagttaaaaagtttagaagaagaatgtgaatcctctctttgcacatctgcgttaagagccaggaatctagagctgtcccaggacatgaaaaaaatgacagctgtgtttgagaagctgcagacttacatagctcttcttgccttgccaagtacagagccagatggactccttcggacaaactacagttctgtgttaacaaatgttggtgctgctctgcatggatttcatgacgttatgaaagatatttccaaacattatagtcaaaaagctgcaatagagcatgaacttccaacagcaacacagaagctgataacaactaatgactgtatcctgtcatcagtagtggcattaacaaatggagcaggaaagattgcatccttcttcagcaacaatttggactacttcattgcttcactgagctatggacctaaggcagcgagtggattcattagtcctctttcagctgaatgcatgctacagtataagaaaaaagctgctgcctatatgaagtctttgagaaagcccctcttggagtctgtgccttatgaagaagcactggcaaaccgccgcatccttctcagctctactgaaagtcgagaaggccttgcacagcaagttcaacagagtttggaaaagatttctaaactggagcaggaaaaagaacattggatgttggaagcacaattagccaaaatcaagctagagaaagaaaaccagcgaattgcagataagctgaagaatacaggtagtgcccagctggttgggctggcccaggaaaatgctgctgtgtcaaatactgctggccaggatgaagccacagctaaggctgtgttggagcccattcagagcaccagtctaattgggactttaaccaggacatctgacagtgaggttccagatgtggaatctcgtgaagacttaattaaaaatcactacatggcaaggatagtggaacttacgtctcagttgcagctggctgacagtaagtcagtgcatttttatgccgagtgccgagcactgtctaaaagactggccttggctgaaaagtctaaggaagcattgacagaagaaatgaaacttgccagtcagaacatcagcagacttcaggatgagctgacaactaccaagaggagttacgaggatcagttaagtatgatgagtgaccacctgtgcagcatgaatgagacattatctaaacagagagaagagattgacacactaaagatgtccagtaaggggaattctaaaaagaacaagagtcgatagttttgaaatagctggttggcgactgttctttccagacctgctcctgctgcacagagccgcagggctgagaccacgtccatgctggctgccttcaggaagctaaagtattgttggacctagtaaactagtcagtgttggaaacggccttgaaatatttaaaacatatttgtaaccagtgaggcaaatacagaagttgatgtcggcagtaaatggaaaacaatacgtatgtcatggatattgtaggtttccttatgctgtttttactgtgcactttttaaaattaggttttaatttcagtatgtaagaacaaatattttgtatactttcaaactcaattatatggtaatcgatttggtatctatggaatagatatatgtttctggaaaaaaatgcttaaattgtcaaactgtcattacttcttattatagttgaaggcattctccagattctttttaaaagatttgttcatatttctctctctctctctctctctctctctctcttctttctctctgagggagagggagccctccaaacttcagatcctgtgggtttagtatcattatcttcagctctttgataccctgtgttagagtaatagctaaaggaagttcatgtcaataaattcatacttatatcaca

SEQ ID NO: 171064 - DNA, 743 bp, Homo sapiens
  Payload ID: 13654
  Gene Symbol: PPP1R21
  Gene Name: protein phosphatase 1, regulatory subunit 21
  ENST ID: ENST00000455978
  CDS Start-End: 1-349
acacttaacctcctacatatgttttcttaggaagattcttccctatcagttaaaaagtttagaagaagaatgtgaatcctctctttgcacatctgcgttaagagccaggaatctagagctgtcccaggacatgaaaaaaatgacagctgtgtttgagaagctgcagacttacatagctcttcttgccttgccaattttgcagagggcaagcaggtccacagagctcctcacgctgacatggcagaagcagaactctgtgatatttgggtacagagccagatggactccttcggacaaactacagttctgtgttaacaaatgttggtgctgctctgcatggatttcatgacgttatgaaagatatttccaaacattatagtcaaaaagctgcaatagagcatgaacttccaacagcaacacagaagctgataacaactaatgactgtatcctgtcatcagtagtggcattaacaaatggagcaggaaagattgcatccttcttcagcaacaatttggactacttcattgcttcactgagctatggacctaaggcagcgagtggattcattagtcctctttcagctgaatgcatgctacagtataagaaaaaagctgctgcctatatgaagtctttgagaaagcccctcttggagtctgtgccttatgaagaagcactggcaaaccgccgcatccttctcagctctactgaaagtcgagaaggccttgcacagcaagttcaacag

SEQ ID NO: 171065 - DNA, 2481 bp, Homo sapiens
  Payload ID: 13654
  Gene Symbol: PPP1R21
  Gene Name: protein phosphatase 1, regulatory subunit 21
  ENST ID: ENST00000431614
  CDS Start-End: 183-344
cgttccaggtcgccatcttggaccatgagtcaagatggcgccccctggtcccaggggcacagcccaggcacgctagcgaggctacgcacgcacgtattcggcttcgggctcagaatcaggttctgaaaaaaggtgttgtggatgaacaagcaaattctgcagctttaaaggagcaactgaaaatgaaggatcagtcattgagaaaactacaacaggaaatggacagtttgacatttcgaaatctgcagcttgccaagagggtagaactacttcaagatgaactagctctaagtgaaccacgaggcaagaaaaacaaggattgtttgagaatggtgaacacatagaagagacaagcttctaagatgatagagaatctgtgtaccttaggatgtttctctaaaggatgaaagttatgtggacataacttattctttccatcagaaaagtggagaatcttcttctcagttgagtcaagagcagaagagtgtctttgatgaagatctgcaaaagaagatagaagagaatgaacggttgcatatacaattttttgaagctgatgagcagcacaagcatgtggaagcagagctgaggagtcgactggccactctggagacagaagcagcccagcaccaagctgtggttgacggtctcacccggaagtacatggaaaccattgagaagctgcagaacgacaaggctaaactagaagtgaaatctcagactctagaaaaggaagccaaggaatgtcgacttcgaacggaagaatgtcaattacagttaaagactcttcatgaagatttgtcaggtagattagaggaatccttatcaatcatcaatgaaaaagtaccttttaatgatacaaaatatagtcagtacaacgctctgaacgttccactccacaataggagacaccagctgaagatgcgagatattgctgggcaggccctggcttttgttcaggatcttgtgacggctcttctaaactttcatacctacacagaacagaggattcaaatttttcctgttgattctgccattgacactatatctccattgaatcagaagttctcacaataccttcatgaaaatgcgtcctatgtccgccctcttgaggaaggaatgcttcatttatttgaaagtatcactgaggatactgtgactgtcttggagacaactgtgaaattgaaaactttttcagaacacttaacctcctacatatgttttcttaggaagattcttccctatcagttaaaaagtttagaagaagaatgtgaatcctctctttgcacatctgcgttaagagccaggaatctagagctgtcccaggacatgaaaaaaatgacagctgtgtttgagaagctgcagacttacatagctcttcttgccttgccaagtacagagccagatggactccttcggacaaactacagttctgtgttaacaaatgttggtgctgctctgcatggatttcatgacgttatgaaagatatttccaaacattatagtcaaaaagctgcaatagagcatgaacttccaacagcaacacagaagctgataacaactaatgactgtatcctgtcatcagtagtggcattaacaaatggagcaggaaagattgcatccttcttcagcaacaatttggactacttcattgcttcactgagctatggacctaaggcagcgagtggattcattagtcctctttcagctgaatgcatgctacagtataagaaaaaagctgctgcctatatgaagtctttgagaaagcccctcttggagtctgtgccttatgaagaagcactggcaaaccgccgcatccttctcagctctactgaaagtcgagaaggccttgcacagcaagttcaacagagtttggaaaagatttctaaactggagcaggaaaaagaacattggatgttggaagcacaattagccaaaatcaagctagagaaagaaaaccagcgaattgcagataagctgaagaatacaggtagtgcccagctggttgggctggcccaggaaaatgctgctgtgtcaaatactgctggccaggatgaagccacagctaaggctgtgttggagcccattcagagcaccagtctaattgggactttaaccaggacatctgacagtgaggttccagatgtggaatctcgtgaagacttaattaaaaatcactacatggcaaggatagtggaacttacgtctcagttgcagctggctgacagtaagtcagtgcatttttatgccgagtgccgagcactgtctaaaagactggccttggctgaaaagtctaaggaagcattgacagaagaaatgaaacttgccagtcagaacatcagcagacttcaggatgagctgacaactaccaagaggagttacgaggatcagttaagtatgatgagtgaccacctgtgcagcatgaatgagacattatctaaacagagagaagagattgacacactaaagatgtccagtaag

SEQ ID NO: 171066 - DNA, 545 bp, Homo sapiens
  Payload ID: 13654
  Gene Symbol: PPP1R21
  Gene Name: protein phosphatase 1, regulatory subunit 21
  ENST ID: ENST00000421486
  CDS Start-End: 424-545
tcccctcagccgtctccgtccaccattacggtgcctccacctgcagctcccaggagatggggccgggcggtgtctgcgtccgtgagcgtttttgcagggagaagctggagtttgattcttccttttcactgaagtagcgggcttgggactgggatgtcagaaattctggcttcttgcctctaatgctggctgagaagggaagggaaaggtgtggaccactcctcacctcgctgcttcctcaattttctcagcctagggatggggaagatcaacccttctcccctcccacagggatgatatgaggttaaagagatttatcttcccccgaatcaattcgagaggcttcgggctcagaatcaggttctgaaaaaaggtgttgtggatgaacaagcaaattctgcagctttaaaggagcaactgaaaatgaaggatcagtcattgagaaaactacaacaggaaatggacagtttgacatttcgaaatctgcagcttgccaagagggtagaactacttcaagatgaactagctctaagtgaaccacgagg

SEQ ID NO: 171067 - DNA, 3208 bp, Homo sapiens
  Payload ID: 13654
  Gene Symbol: PPP1R21
  Gene Name: protein phosphatase 1, regulatory subunit 21
  ENST ID: ENST00000416913
  CDS Start-End: 186-350
ccaccttcctcccaccccgggaacccggaagtggaggaggaggcgcggcggcggcggcggcggcggctgcggtggccaagcaggcagatactgcctgacccgttcccgggagcgtgtctgggtttgggggcgggagacaggctgagccgcctgggcggcctggcctgtacggggcgggggaggccatggcctcggctgagttgcaggggaagtaccagaagctggctcaggagtactcgaagcttcgggctcagaatcaggttctgaaaaaaggtgttgtggatgaacaagcaaattctgcagctttaaagctaaactgtgaggaccaatctgttttcactttgatataggagcaactgaaaatgaaggatcagtcattgagaaaactacaacaggaaatggacagtttgacatttcgaaatctgcagcttgccaagagggtagaactacttcaagatgaactagctctaagtgaaccacgaggcaagaaaaacaagaaaagtggagaatcttcttctcagttgagtcaagagcagaagagtgtctttgatgaagatctgcaaaagaagatagaagagaatgaacggttgcatatacaattttttgaagctgatgagcagcacaagcatgtggaagcagagctgaggagtcgactggccactctggagacagaagcagcccagcaccaagctgtggttgacggtctcacccggaagtacatggaaaccattgagaagctgcagaacgacaaggctaaactagaagtgaaatctcagactctagaaaaggaagccaaggaatgtcgacttcgaacggaagaatgtcaattacagttaaagactcttcatgaagatttgtcaggtagattagaggaatccttatcaatcatcaatgaaaaagtaccttttaatgatacaaaatatagtcagtacaacgctctgaacgttccactccacaataggagacaccagctgaagatgcgagatattgctgggcaggccctggcttttgttcaggatcttgtgacggctcttctaaactttcatacctacacagaacagaggattcaaatttttcctgttgattctgccattgacactatatctccattgaatcagaagttctcacaataccttcatgaaaatgcgtcctatgtccgccctcttgaggaaggaatgcttcatttatttgaaagtatcactgaggatactgtgactgtcttggagacaactgtgaaattgaaaactttttcagaacacttaacctcctacatatgttttcttaggaagattcttccctatcagttaaaaagtttagaagaagaatgtgaatcctctctttgcacatctgcgttaagagccaggaatctagagctgtcccaggacatgaaaaaaatgacagctgtgtttgagaagctgcagacttacatagctcttcttgccttgccaagtacagagccagatggactccttcggacaaactacagttctgtgttaacaaatgttggtgctgctctgcatggatttcatgacgttatgaaagatatttccaaacattatagtcaaaaagctgcaatagagcatgaacttccaacagcaacacagaagctgataacaactaatgactgtatcctgtcatcagtagtggcattaacaaatggagcaggaaagattgcatccttcttcagcaacaatttggactacttcattgcttcactgagctatggacctaaggcagcgagtggattcattagtcctctttcagctgaatgcatgctacagtataagaaaaaagctgctgcctatatgaagtctttgagaaagcccctcttggagtctgtgccttatgaagaagcactggcaaaccgccgcatccttctcagctctactgaaagtcgagaaggccttgcacagcaagttcaacagagtttggaaaagatttctaaactggagcaggaaaaagaacattggatgttggaagcacaattagccaaaatcaagctagagaaagaaaaccagcgaattgcagataagctgaagaatacaggtagtgcccagctggttgggctggcccaggaaaatgctgctgtgtcaaatactgctggccaggatgaagccacagctaaggctgtgttggagcccattcagagcaccagtctaattgggactttaaccaggacatctgacagtgaggttccagatgtggaatctcgtgaagacttaattaaaaatcactacatggcaaggatagtggaacttacgtctcagttgcagctggctgacagtaagtcagtgcatttttatgccgagtgccgagcactgtctaaaagactggccttggctgaaaagtctaaggaagcattgacagaagaaatgaaacttgccagtcagaacatcagcagacttcaggatgagctgacaactaccaagaggagttacgaggatcagttaagtatgatgagtgaccacctgtgcagcatgaatgagacattatctaaacagagagaagagattgacacactaaagatgtccagtaaggggaattctaaaaagaacaagagtcgatagttttgaaatagctggttggcgactgttctttccagacctgctcctgctgcacagagccgcagggctgagaccacgtccatgctggctgccttcaggaagctaaagtattgttggacctagtaaactagtcagtgttggaaacggccttgaaatatttaaaacatatttgtaaccagtgaggcaaatacagaagttgatgtcggcagtaaatggaaaacaatacgtatgtcatggatattgtaggtttccttatgctgtttttactgtgcactttttaaaattaggttttaatttcagtatgtaagaacaaatattttgtatactttcaaactcaattatatggtaatcgatttggtatctatggaatagatatatgtttctggaaaaaaatgcttaaattgtcaaactgtcattacttcttattatagttgaaggcattctccagattctttttaaaagatttgttcatatttctctctctctctctctctctctctctctcttctttctctctgagggagagggagccctccaaacttcagatcctgtgggtttagtatcattatcttcagctctttgataccctgtgttagagtaatagctaaaggaagttcatgtcaataaattcatacttatatcac

SEQ ID NO: 171068 - DNA, 3049 bp, Homo sapiens
  Payload ID: 13654
  Gene Symbol: PPP1R21
  Gene Name: protein phosphatase 1, regulatory subunit 21
  Uniprot ID: Q6ZMI0
  ENST ID: ENST00000449090
  CDS Start-End: 186-2402
ccaccttcctcccaccccgggaacccggaagtggaggaggaggcgcggcggcggcggcggcggcggctgcggtggccaagcaggcagatactgcctgacccgttcccgggagcgtgtctgggtttgggggcgggagacaggctgagccgcctgggcggcctggcctgtacggggcgggggaggccatggcctcggctgagttgcaggggaagtaccagaagctggctcaggagtactcgaagcttcgggctcagaatcaggttctgaaaaaaggtgttgtggatgaacaagcaaattctgcagctttaaaggagcaactgaaaatgaaggatcagtcattgagaaaactacaacaggaaatggacagtttgacatttcgaaatctgcagcttgccaagagggtagaactacttcaagatgaactagctctaagtgaaccacgaggcaagaaaaacaagaaaagtggagaatcttcttctcagttgagtcaagagcagaagagtgtctttgatgaagatctgcaaaagaagatagaagagaatgaacggttgcatatacaattttttgaagctgatgagcagcacaagcatgtggaagcagagctgaggagtcgactggccactctggagacagaagcagcccagcaccaagctgtggttgacggtctcacccggaagtacatggaaaccattgagaagctgcagaacgacaaggctaaactagaagtgaaatctcagactctagaaaaggaagccaaggaatgtcgacttcgaacggaagaatgtcaattacagttaaagactcttcatgaagatttgtcaggtagattagaggaatccttatcaatcatcaatgaaaaagtaccttttaatgatacaaaatatagtcagtacaacgctctgaacgttccactccacaataggagacaccagctgaagatgcgagatattgctgggcaggccctggcttttgttcaggatcttgtgacggctcttctaaactttcatacctacacagaacagaggattcaaatttttcctgttgattctgccattgacactatatctccattgaatcagaagttctcacaataccttcatgaaaatgcgtcctatgtccgccctcttgaggaaggaatgcttcatttatttgaaagtatcactgaggatactgtgactgtcttggagacaactgtgaaattgaaaactttttcagaacacttaacctcctacatatgttttcttaggaagattcttccctatcagttaaaaagtttagaagaagaatgtgaatcctctctttgcacatctgcgttaagagccaggaatctagagctgtcccaggacatgaaaaaaatgacagctgtgtttgagaagctgcagacttacatagctcttcttgccttgccaagtacagagccagatggactccttcggacaaactacagttctgtgttaacaaatgttggtgctgctctgcatggatttcatgacgttatgaaagatatttccaaacattatagtcaaaaagctgcaatagagcatgaacttccaacagcaacacagaagctgataacaactaatgactgtatcctgtcatcagtagtggcattaacaaatggagcaggaaagattgcatccttcttcagcaacaatttggactacttcattgcttcactgagctatggacctaaggcagcgagtggattcattagtcctctttcagctgaatgcatgctacagtataagaaaaaagctgctgcctatatgaagtctttgagaaaggttcaacagagtttggaaaagatttctaaactggagcaggaaaaagaacattggatgttggaagcacaattagccaaaatcaagctagagaaagaaaaccagcgaattgcagataagctgaagaatacaggtagtgcccagctggttgggctggcccaggaaaatgctgctgtgtcaaatactgctggccaggatgaagccacagctaaggctgtgttggagcccattcagagcaccagtctagttccagatgtggaatctcgtgaagacttaattaaaaatcactacatggcaaggatagtggaacttacgtctcagttgcagctggctgacagtaagtcagtgcatttttatgccgagtgccgagcactgtctaaaagactggccttggctgaaaagtctaaggaagcattgacagaagaaatgaaacttgccagtcagaacatcagcagacttcaggatgagctgacaactaccaagaggagttacgaggatcagttaagtatgatgagtgaccacctgtgcagcatgaatgagacattatctaaacagagagaagagattgacacactaaagatgtccagtaaggggaattctaaaaagaacaagagtcgatagttttgaaatagctggttggcgactgttctttccagacctgctcctgctgcacagagccgcagggctgagaccacgtccatgctggctgccttcaggaagctaaagtattgttggacctagtaaactagtcagtgttggaaacggccttgaaatatttaaaacatatttgtaaccagtgaggcaaatacagaagttgatgtcggcagtaaatggaaaacaatacgtatgtcatggatattgtaggtttccttatgctgtttttactgtgcactttttaaaattaggttttaatttcagtatgtaagaacaaatattttgtatactttcaaactcaattatatggtaatcgatttggtatctatggaatagatatatgtttctggaaaaaaatgcttaaattgtcaaactgtcattacttcttattatagttgaaggcattctccagattctttttaaaagatttgttcatatttctctctctctctctctctctctctctctcttctttctctctgagggagagggagccctccaaacttcagatcctgtgggtttagtatcattatcttcagctctttgataccctgtgttagagtaatagctaaaggaagttcatgtcaataaattcatacttatatcacactttc

SEQ ID NO: 171069 - DNA, 4932 bp, Homo sapiens
  Payload ID: 13655
  Gene Symbol: PPP1R26
  Gene Name: protein phosphatase 1, regulatory subunit 26
  Uniprot ID: Q5T8A7
  ENST ID: ENST00000356818
  CDS Start-End: 550-4179
gcgcggcccgggcgcggggcggcggcagcggcggcgcgcggggaggcggggaggcggggggcccggccggacgcccctgcgccccctccccgcgccccggccgagggcggagcgcgctggccctgcagcctccggcccgcccccggcccgccgcctcccccgggacgtgggacgcgggcgcaggcggggtccgcgcggcgggcggcgggggacgggcggagtcaaaagtctattgaaaaagcagagagagaatgcctcggtgtgtaagtggagtgatgaggacctgatctctgggccgtgtgggaacactggctgccatttcatcacagtcaacctggactcacagaatttcaagagcttgtcggttgggtcaagaatgaacctacgcatgacggcgtgctgatcctgggtttctagtcatcctttttaagctgcaaagaagcatttgcagacgttgtctcatgggtaccgcttgccaactttggaggatgtgaagccggtagagaaataaagcatcgcccctctgcgcgcccctccccgtctgctagaatgtttctcatgaacgcttctccagtggttgctctccagtccaaatgggaggcctttggcccgccagggagctgtaggttccccaggtgcttctcggaggctgacgagggcgtggagagcgcgtcggtgagcgcccgggtgcagatgcttatcagcactctgcagcgcgacggggctgctcggggcaccagcgatgagcgcgccgcacagaggggccacagggcagagggatgccacgacgccaggccggctgccaagcccaccgtgcacaaggagccacccgcgttggctgtctgtggtctcgttgctgactttgaccccatgggggaggaggaaactacagactttggcccgttggtgctagattcagacagtgatgattccgtggacagggacattgaggaggccatccaggagtacctgaaggcaaagagtggagccgcacagcccggggccggcggggcccagccaggtgcagcccagccttccagggccgcaggcggaggcagtagatgtaagccggaaccggctcacggcagtgccccgactgccctgtgtcccccaaaacttgtacctggatcaggtggtggccccggcagccaggtgggatccagcaaggaccagggctccgcctccccggtcagtgtgagcagcgatgactccttcgagcagagcatcagggcggaaatagaacagtttctgaatgagaagagacagcatgagacccaaaaatgtgatgggtcagtggagaagaaaccagacacaaatgaaaattccgccaagtcactcttgaaatcccaccaagagccgcctacaaaggtggtgcatcggcagggcctgctgggcgtccagaaggagtttgccttccgcaaacctccccggttagcgaagatgaacgtccagcccagaagcctcaggtccaaggtcacaaccacgcaggagaacgagggcagcacgaagccggcaaccccctgccgcccttcagaagcagcacagaataaaggtgggatcaaaaggagcgccagcgctgcaaggaggggaaagcgagtcatgagtgcggcacaggcgtccgaggcgtccgactccagcagcgacgatggcattgaggaggccatccagctgtaccagctgcagaaaacacgcaaggaggccgacggggacctgccccagagggtccaactccgagaggagagagcgcctgaccctcccgcacacagcacaagcagtgccacaaaaagtgccttgcccgagacccacaggaaaacacccagcaagaagaagctagtggccaccaagaccatggaccctggtccagggggcctggacactgaccatgcccccaagctcctgaaggaaaccaaagctccacctccagcgagccctgcttccaggagtgagtttgtggaacggtcctcgtgccgggcggacacatctgctgagctgatgtgtgcagaagcaatcctggacatctccaagacgatcctgccggcccctgtagagggcagtgacgggtccctgtccgcaagcccactcttctactccccgaacgtgccttcccgctctgacggcgacagtagctccgtggacagcgatgacagcatcgagcaggaaatccggacatttttggccctaaaggcgcagtcagggagtttgctggccagaggtgagagctgcccgcaggctgcccagggtccacttttgccgcctggcctcaacagccagaccggcggccacaagacccctctctctaaaacaccagacccactgctgggctgcaaaaggaagcgtagaggtggtggccatgtgaggccatccacgcccaagaaaatgcaggaggtggtgaaagacggtagccaggatgccgaccacagccaggggagagctgagcccggccatgagaggcgagacctgcccatccagggcaaagccagtgaggccctgggaggggagggcaccgccaggggccctggcgacactcgcatgtcacagggccagggtaagacagacgaggcaaggcgcctagacgagaaagagagctctgaagacaaaagcagctccctggacagtgacgaggacctggacacagccatcaaggacttgttaaggtccaagcgaaagctcaagaagaggtgcagggagcccagggctgcgtgcaggaagaaggtcaggttcagcacagcccagacgcacttcttggagcagctgggcgggctccggagagactggaaagacaggggcccgccagtgctgaagagctgcctctccaagtccaagagagacagtggcgagggtcctgggaagaaaccccccagtgtctttggcagcacggcagagaggatgaggcaggagggtgccgcgagccaggacgcggccctggccttccgggtgaggagacccgcctccgcctctgcctccgaagggaatccattccccagggagtcccagggcccagctcccagccccggctccctgtctgatgacagcagttcagtggacagcaacgacagcatcgaactggagattaggaagtttttggcggaaaaggccaaggagtcagtgagcagttcagaagttcaggcagagggccccaccgctcttgggacagggggcccagccaggccagaggtgctgtgcaggaaggagcctgccccaccgcctggcgtgtgcacacgcagccagagggccaggggggtcccacatctggccgaagggcttcgaggcacagagagcgcaggagcacagggcacagctggtctgttcagccagggcgggaaggggctccctgctgctcctgcccgaggggatccggtgccgcccaggagcaccagcggcggtgtctccgccaaggggctctcagtgagcaggagaaatgtttacgttcacaaagaccagagcccacgaggggctgagcctgctgccaaaagtgcttttggtcagctgcccagctgtgccacagcgggcaccgaggcaggaggcgccagaggaacctttcacatgggctgcgggagcccgagcttcctgacccccagcccgggagcggagagggacgctggagcccaggccgaccgcacaccgccctggagcgacttcgcccaccagagtcggctgcccagcccgtgggtgctgcgctccgaaggcagagatgcagtgtggagggggggcgtcgggagcgagagagacaaggggtccgagggccccgcccggggcctgcccagcctgccccttgcgggcttctcgccgctgctgtccacccagctcttccactttggaaagggtgtctcctgggggggcaggcaggctggcctcttcagcccccacctggggctgcctctgcagggcccctccttctcggccttcagggaggcccaggccggacccagccctgtctttggaagcccacacttgctggcaaagaaggacggcggcccctggccaaccaggaaggcacaggcagggctgagtttgcatgacaggaggagctcgggctcggaggaaagcattttagacctgaggtatcgacgaagggtcaacagggatgaccaggagcaggacgccttgggcagtgacgccagtgacttcagcgacacctccacggaggacagtggcggcagctcagtagtgaaggtctaagccctcgagctgtgggttcgcgtcctgggttgcgtgcattcgtggaaagcggcgtagccgtgcgtgtgtgtgatggttccgtggctgcaaggaagggaaacagtctattatacatagccctgtatatatgtacaccaacatgaaacttttatttaacagacgtgtcctggtaaatatgatttttgtagctttttgtaaattatttaaagtgatgtaaaagatatttttggaaaatactgttgttcaattttgtagggtgttcctaactgcagttttctgtgttctgcatacaagtcttagcttaggaaacatttggttcttaccatcacagccaggttcacagaggctctgatgctttttggttgattgctggtgagaatggccggcggtggctgcagtggtagcctgaggaaggccaagctgccctccctgggaatcactcagatgccccaagatgtccgttgggaagctcccaggacagcactttttatacagaggacaccgcctcggccccacgtccttagaggccagagcacatctgaaaactgcaatcacagccgtccgctggaaaaacgtttcgaagcacagtggccagcgagcgagcacgtggctactccctgttgcatgtcaaatccacacagatgtcagcggcagctgctcggcagcccagccctgggcctgggtgggttcatgtccaatcttgttcgatcactagatgattctaacatcgaaataaacctctttttatatggc

SEQ ID NO: 171070 - DNA, 4769 bp, Homo sapiens
  Payload ID: 13655
  Gene Symbol: PPP1R26
  Gene Name: protein phosphatase 1, regulatory subunit 26
  Uniprot ID: Q5T8A7
  ENST ID: ENST00000401470
  CDS Start-End: 387-4016
ctggttaaccggagaaagctcctggtaaagaagaatccataacagaggcaaaacatactggccagttttcgcccactgctgaggtcctgagggcagccacagcctctgagccaaggggagttcagtgtccataagccttggaggcttgcttgcacaagaaccgctttgcactgcaattttggggtaggcaggagcttgtcggttgggtcaagaatgaacctacgcatgacggcgtgctgatcctgggtttctagtcatcctttttaagctgcaaagaagcatttgcagacgttgtctcatgggtaccgcttgccaactttggaggatgtgaagccggtagagaaataaagcatcgcccctctgcgcgcccctccccgtctgctagaatgtttctcatgaacgcttctccagtggttgctctccagtccaaatgggaggcctttggcccgccagggagctgtaggttccccaggtgcttctcggaggctgacgagggcgtggagagcgcgtcggtgagcgcccgggtgcagatgcttatcagcactctgcagcgcgacggggctgctcggggcaccagcgatgagcgcgccgcacagaggggccacagggcagagggatgccacgacgccaggccggctgccaagcccaccgtgcacaaggagccacccgcgttggctgtctgtggtctcgttgctgactttgaccccatgggggaggaggaaactacagactttggcccgttggtgctagattcagacagtgatgattccgtggacagggacattgaggaggccatccaggagtacctgaaggcaaagagtggagccgcacagcccggggccggcggggcccagccaggtgcagcccagccttccagggccgcaggcggaggcagtagatgtaagccggaaccggctcacggcagtgccccgactgccctgtgtcccccaaaacttgtacctggatcaggtggtggccccggcagccaggtgggatccagcaaggaccagggctccgcctccccggtcagtgtgagcagcgatgactccttcgagcagagcatcagggcggaaatagaacagtttctgaatgagaagagacagcatgagacccaaaaatgtgatgggtcagtggagaagaaaccagacacaaatgaaaattccgccaagtcactcttgaaatcccaccaagagccgcctacaaaggtggtgcatcggcagggcctgctgggcgtccagaaggagtttgccttccgcaaacctccccggttagcgaagatgaacgtccagcccagaagcctcaggtccaaggtcacaaccacgcaggagaacgagggcagcacgaagccggcaaccccctgccgcccttcagaagcagcacagaataaaggtgggatcaaaaggagcgccagcgctgcaaggaggggaaagcgagtcatgagtgcggcacaggcgtccgaggcgtccgactccagcagcgacgatggcattgaggaggccatccagctgtaccagctgcagaaaacacgcaaggaggccgacggggacctgccccagagggtccaactccgagaggagagagcgcctgaccctcccgcacacagcacaagcagtgccacaaaaagtgccttgcccgagacccacaggaaaacacccagcaagaagaagctagtggccaccaagaccatggaccctggtccagggggcctggacactgaccatgcccccaagctcctgaaggaaaccaaagctccacctccagcgagccctgcttccaggagtgagtttgtggaacggtcctcgtgccgggcggacacatctgctgagctgatgtgtgcagaagcaatcctggacatctccaagacgatcctgccggcccctgtagagggcagtgacgggtccctgtccgcaagcccactcttctactccccgaacgtgccttcccgctctgacggcgacagtagctccgtggacagcgatgacagcatcgagcaggaaatccggacatttttggccctaaaggcgcagtcagggagtttgctggccagaggtgagagctgcccgcaggctgcccagggtccacttttgccgcctggcctcaacagccagaccggcggccacaagacccctctctctaaaacaccagacccactgctgggctgcaaaaggaagcgtagaggtggtggccatgtgaggccatccacgcccaagaaaatgcaggaggtggtgaaagacggtagccaggatgccgaccacagccaggggagagctgagcccggccatgagaggcgagacctgcccatccagggcaaagccagtgaggccctgggaggggagggcaccgccaggggccctggcgacactcgcatgtcacagggccagggtaagacagacgaggcaaggcgcctagacgagaaagagagctctgaagacaaaagcagctccctggacagtgacgaggacctggacacagccatcaaggacttgttaaggtccaagcgaaagctcaagaagaggtgcagggagcccagggctgcgtgcaggaagaaggtcaggttcagcacagcccagacgcacttcttggagcagctgggcgggctccggagagactggaaagacaggggcccgccagtgctgaagagctgcctctccaagtccaagagagacagtggcgagggtcctgggaagaaaccccccagtgtctttggcagcacggcagagaggatgaggcaggagggtgccgcgagccaggacgcggccctggccttccgggtgaggagacccgcctccgcctctgcctccgaagggaatccattccccagggagtcccagggcccagctcccagccccggctccctgtctgatgacagcagttcagtggacagcaacgacagcatcgaactggagattaggaagtttttggcggaaaaggccaaggagtcagtgagcagttcagaagttcaggcagagggccccaccgctcttgggacagggggcccagccaggccagaggtgctgtgcaggaaggagcctgccccaccgcctggcgtgtgcacacgcagccagagggccaggggggtcccacatctggccgaagggcttcgaggcacagagagcgcaggagcacagggcacagctggtctgttcagccagggcgggaaggggctccctgctgctcctgcccgaggggatccggtgccgcccaggagcaccagcggcggtgtctccgccaaggggctctcagtgagcaggagaaatgtttacgttcacaaagaccagagcccacgaggggctgagcctgctgccaaaagtgcttttggtcagctgcccagctgtgccacagcgggcaccgaggcaggaggcgccagaggaacctttcacatgggctgcgggagcccgagcttcctgacccccagcccgggagcggagagggacgctggagcccaggccgaccgcacaccgccctggagcgacttcgcccaccagagtcggctgcccagcccgtgggtgctgcgctccgaaggcagagatgcagtgtggagggggggcgtcgggagcgagagagacaaggggtccgagggccccgcccggggcctgcccagcctgccccttgcgggcttctcgccgctgctgtccacccagctcttccactttggaaagggtgtctcctgggggggcaggcaggctggcctcttcagcccccacctggggctgcctctgcagggcccctccttctcggccttcagggaggcccaggccggacccagccctgtctttggaagcccacacttgctggcaaagaaggacggcggcccctggccaaccaggaaggcacaggcagggctgagtttgcatgacaggaggagctcgggctcggaggaaagcattttagacctgaggtatcgacgaagggtcaacagggatgaccaggagcaggacgccttgggcagtgacgccagtgacttcagcgacacctccacggaggacagtggcggcagctcagtagtgaaggtctaagccctcgagctgtgggttcgcgtcctgggttgcgtgcattcgtggaaagcggcgtagccgtgcgtgtgtgtgatggttccgtggctgcaaggaagggaaacagtctattatacatagccctgtatatatgtacaccaacatgaaacttttatttaacagacgtgtcctggtaaatatgatttttgtagctttttgtaaattatttaaagtgatgtaaaagatatttttggaaaatactgttgttcaattttgtagggtgttcctaactgcagttttctgtgttctgcatacaagtcttagcttaggaaacatttggttcttaccatcacagccaggttcacagaggctctgatgctttttggttgattgctggtgagaatggccggcggtggctgcagtggtagcctgaggaaggccaagctgccctccctgggaatcactcagatgccccaagatgtccgttgggaagctcccaggacagcactttttatacagaggacaccgcctcggccccacgtccttagaggccagagcacatctgaaaactgcaatcacagccgtccgctggaaaaacgtttcgaagcacagtggccagcgagcgagcacgtggctactccctgttgcatgtcaaatccacacagatgtcagcggcagctgctcggcagcccagccctgggcctgggtgggttcatgtccaatcttgttcgatcactagatgattctaacatcgaaataaacctctttttatatggc

SEQ ID NO: 171071 - DNA, 4640 bp, Homo sapiens
  Payload ID: 13655
  Gene Symbol: PPP1R26
  Gene Name: protein phosphatase 1, regulatory subunit 26
  Uniprot ID: Q5T8A7
  ENST ID: ENST00000604351
  CDS Start-End: 258-3887
attcccatgatgcccagccacgggcacggcttccggagtgcggccgccgccgccaccgtccggagcttgtcggttgggtcaagaatgaacctacgcatgacggcgtgctgatcctgggtttctagtcatcctttttaagctgcaaagaagcatttgcagacgttgtctcatgggtaccgcttgccaactttggaggatgtgaagccggtagagaaataaagcatcgcccctctgcgcgcccctccccgtctgctagaatgtttctcatgaacgcttctccagtggttgctctccagtccaaatgggaggcctttggcccgccagggagctgtaggttccccaggtgcttctcggaggctgacgagggcgtggagagcgcgtcggtgagcgcccgggtgcagatgcttatcagcactctgcagcgcgacggggctgctcggggcaccagcgatgagcgcgccgcacagaggggccacagggcagagggatgccacgacgccaggccggctgccaagcccaccgtgcacaaggagccacccgcgttggctgtctgtggtctcgttgctgactttgaccccatgggggaggaggaaactacagactttggcccgttggtgctagattcagacagtgatgattccgtggacagggacattgaggaggccatccaggagtacctgaaggcaaagagtggagccgcacagcccggggccggcggggcccagccaggtgcagcccagccttccagggccgcaggcggaggcagtagatgtaagccggaaccggctcacggcagtgccccgactgccctgtgtcccccaaaacttgtacctggatcaggtggtggccccggcagccaggtgggatccagcaaggaccagggctccgcctccccggtcagtgtgagcagcgatgactccttcgagcagagcatcagggcggaaatagaacagtttctgaatgagaagagacagcatgagacccaaaaatgtgatgggtcagtggagaagaaaccagacacaaatgaaaattccgccaagtcactcttgaaatcccaccaagagccgcctacaaaggtggtgcatcggcagggcctgctgggcgtccagaaggagtttgccttccgcaaacctccccggttagcgaagatgaacgtccagcccagaagcctcaggtccaaggtcacaaccacgcaggagaacgagggcagcacgaagccggcaaccccctgccgcccttcagaagcagcacagaataaaggtgggatcaaaaggagcgccagcgctgcaaggaggggaaagcgagtcatgagtgcggcacaggcgtccgaggcgtccgactccagcagcgacgatggcattgaggaggccatccagctgtaccagctgcagaaaacacgcaaggaggccgacggggacctgccccagagggtccaactccgagaggagagagcgcctgaccctcccgcacacagcacaagcagtgccacaaaaagtgccttgcccgagacccacaggaaaacacccagcaagaagaagctagtggccaccaagaccatggaccctggtccagggggcctggacactgaccatgcccccaagctcctgaaggaaaccaaagctccacctccagcgagccctgcttccaggagtgagtttgtggaacggtcctcgtgccgggcggacacatctgctgagctgatgtgtgcagaagcaatcctggacatctccaagacgatcctgccggcccctgtagagggcagtgacgggtccctgtccgcaagcccactcttctactccccgaacgtgccttcccgctctgacggcgacagtagctccgtggacagcgatgacagcatcgagcaggaaatccggacatttttggccctaaaggcgcagtcagggagtttgctggccagaggtgagagctgcccgcaggctgcccagggtccacttttgccgcctggcctcaacagccagaccggcggccacaagacccctctctctaaaacaccagacccactgctgggctgcaaaaggaagcgtagaggtggtggccatgtgaggccatccacgcccaagaaaatgcaggaggtggtgaaagacggtagccaggatgccgaccacagccaggggagagctgagcccggccatgagaggcgagacctgcccatccagggcaaagccagtgaggccctgggaggggagggcaccgccaggggccctggcgacactcgcatgtcacagggccagggtaagacagacgaggcaaggcgcctagacgagaaagagagctctgaagacaaaagcagctccctggacagtgacgaggacctggacacagccatcaaggacttgttaaggtccaagcgaaagctcaagaagaggtgcagggagcccagggctgcgtgcaggaagaaggtcaggttcagcacagcccagacgcacttcttggagcagctgggcgggctccggagagactggaaagacaggggcccgccagtgctgaagagctgcctctccaagtccaagagagacagtggcgagggtcctgggaagaaaccccccagtgtctttggcagcacggcagagaggatgaggcaggagggtgccgcgagccaggacgcggccctggccttccgggtgaggagacccgcctccgcctctgcctccgaagggaatccattccccagggagtcccagggcccagctcccagccccggctccctgtctgatgacagcagttcagtggacagcaacgacagcatcgaactggagattaggaagtttttggcggaaaaggccaaggagtcagtgagcagttcagaagttcaggcagagggccccaccgctcttgggacagggggcccagccaggccagaggtgctgtgcaggaaggagcctgccccaccgcctggcgtgtgcacacgcagccagagggccaggggggtcccacatctggccgaagggcttcgaggcacagagagcgcaggagcacagggcacagctggtctgttcagccagggcgggaaggggctccctgctgctcctgcccgaggggatccggtgccgcccaggagcaccagcggcggtgtctccgccaaggggctctcagtgagcaggagaaatgtttacgttcacaaagaccagagcccacgaggggctgagcctgctgccaaaagtgcttttggtcagctgcccagctgtgccacagcgggcaccgaggcaggaggcgccagaggaacctttcacatgggctgcgggagcccgagcttcctgacccccagcccgggagcggagagggacgctggagcccaggccgaccgcacaccgccctggagcgacttcgcccaccagagtcggctgcccagcccgtgggtgctgcgctccgaaggcagagatgcagtgtggagggggggcgtcgggagcgagagagacaaggggtccgagggccccgcccggggcctgcccagcctgccccttgcgggcttctcgccgctgctgtccacccagctcttccactttggaaagggtgtctcctgggggggcaggcaggctggcctcttcagcccccacctggggctgcctctgcagggcccctccttctcggccttcagggaggcccaggccggacccagccctgtctttggaagcccacacttgctggcaaagaaggacggcggcccctggccaaccaggaaggcacaggcagggctgagtttgcatgacaggaggagctcgggctcggaggaaagcattttagacctgaggtatcgacgaagggtcaacagggatgaccaggagcaggacgccttgggcagtgacgccagtgacttcagcgacacctccacggaggacagtggcggcagctcagtagtgaaggtctaagccctcgagctgtgggttcgcgtcctgggttgcgtgcattcgtggaaagcggcgtagccgtgcgtgtgtgtgatggttccgtggctgcaaggaagggaaacagtctattatacatagccctgtatatatgtacaccaacatgaaacttttatttaacagacgtgtcctggtaaatatgatttttgtagctttttgtaaattatttaaagtgatgtaaaagatatttttggaaaatactgttgttcaattttgtagggtgttcctaactgcagttttctgtgttctgcatacaagtcttagcttaggaaacatttggttcttaccatcacagccaggttcacagaggctctgatgctttttggttgattgctggtgagaatggccggcggtggctgcagtggtagcctgaggaaggccaagctgccctccctgggaatcactcagatgccccaagatgtccgttgggaagctcccaggacagcactttttatacagaggacaccgcctcggccccacgtccttagaggccagagcacatctgaaaactgcaatcacagccgtccgctggaaaaacgtttcgaagcacagtggccagcgagcgagcacgtggctactccctgttgcatgtcaaatccacacagatgtcagcggcagctgctcggcagcccagccctgggcctgggtgggttcatgtccaatcttgttcgatcactagatgattctaacatcgaaataaacctctttttatatggc

SEQ ID NO: 171072 - DNA, 4502 bp, Homo sapiens
  Payload ID: 13655
  Gene Symbol: PPP1R26
  Gene Name: protein phosphatase 1, regulatory subunit 26
  Uniprot ID: Q5T8A7
  ENST ID: ENST00000605660
  CDS Start-End: 120-3749
ttggcagctatcgctgtttgtagctgcatcatgcccatgtgctttctttccgcccaggatgtgaagccggtagagaaataaagcatcgcccctctgcgcgcccctccccgtctgctagaatgtttctcatgaacgcttctccagtggttgctctccagtccaaatgggaggcctttggcccgccagggagctgtaggttccccaggtgcttctcggaggctgacgagggcgtggagagcgcgtcggtgagcgcccgggtgcagatgcttatcagcactctgcagcgcgacggggctgctcggggcaccagcgatgagcgcgccgcacagaggggccacagggcagagggatgccacgacgccaggccggctgccaagcccaccgtgcacaaggagccacccgcgttggctgtctgtggtctcgttgctgactttgaccccatgggggaggaggaaactacagactttggcccgttggtgctagattcagacagtgatgattccgtggacagggacattgaggaggccatccaggagtacctgaaggcaaagagtggagccgcacagcccggggccggcggggcccagccaggtgcagcccagccttccagggccgcaggcggaggcagtagatgtaagccggaaccggctcacggcagtgccccgactgccctgtgtcccccaaaacttgtacctggatcaggtggtggccccggcagccaggtgggatccagcaaggaccagggctccgcctccccggtcagtgtgagcagcgatgactccttcgagcagagcatcagggcggaaatagaacagtttctgaatgagaagagacagcatgagacccaaaaatgtgatgggtcagtggagaagaaaccagacacaaatgaaaattccgccaagtcactcttgaaatcccaccaagagccgcctacaaaggtggtgcatcggcagggcctgctgggcgtccagaaggagtttgccttccgcaaacctccccggttagcgaagatgaacgtccagcccagaagcctcaggtccaaggtcacaaccacgcaggagaacgagggcagcacgaagccggcaaccccctgccgcccttcagaagcagcacagaataaaggtgggatcaaaaggagcgccagcgctgcaaggaggggaaagcgagtcatgagtgcggcacaggcgtccgaggcgtccgactccagcagcgacgatggcattgaggaggccatccagctgtaccagctgcagaaaacacgcaaggaggccgacggggacctgccccagagggtccaactccgagaggagagagcgcctgaccctcccgcacacagcacaagcagtgccacaaaaagtgccttgcccgagacccacaggaaaacacccagcaagaagaagctagtggccaccaagaccatggaccctggtccagggggcctggacactgaccatgcccccaagctcctgaaggaaaccaaagctccacctccagcgagccctgcttccaggagtgagtttgtggaacggtcctcgtgccgggcggacacatctgctgagctgatgtgtgcagaagcaatcctggacatctccaagacgatcctgccggcccctgtagagggcagtgacgggtccctgtccgcaagcccactcttctactccccgaacgtgccttcccgctctgacggcgacagtagctccgtggacagcgatgacagcatcgagcaggaaatccggacatttttggccctaaaggcgcagtcagggagtttgctggccagaggtgagagctgcccgcaggctgcccagggtccacttttgccgcctggcctcaacagccagaccggcggccacaagacccctctctctaaaacaccagacccactgctgggctgcaaaaggaagcgtagaggtggtggccatgtgaggccatccacgcccaagaaaatgcaggaggtggtgaaagacggtagccaggatgccgaccacagccaggggagagctgagcccggccatgagaggcgagacctgcccatccagggcaaagccagtgaggccctgggaggggagggcaccgccaggggccctggcgacactcgcatgtcacagggccagggtaagacagacgaggcaaggcgcctagacgagaaagagagctctgaagacaaaagcagctccctggacagtgacgaggacctggacacagccatcaaggacttgttaaggtccaagcgaaagctcaagaagaggtgcagggagcccagggctgcgtgcaggaagaaggtcaggttcagcacagcccagacgcacttcttggagcagctgggcgggctccggagagactggaaagacaggggcccgccagtgctgaagagctgcctctccaagtccaagagagacagtggcgagggtcctgggaagaaaccccccagtgtctttggcagcacggcagagaggatgaggcaggagggtgccgcgagccaggacgcggccctggccttccgggtgaggagacccgcctccgcctctgcctccgaagggaatccattccccagggagtcccagggcccagctcccagccccggctccctgtctgatgacagcagttcagtggacagcaacgacagcatcgaactggagattaggaagtttttggcggaaaaggccaaggagtcagtgagcagttcagaagttcaggcagagggccccaccgctcttgggacagggggcccagccaggccagaggtgctgtgcaggaaggagcctgccccaccgcctggcgtgtgcacacgcagccagagggccaggggggtcccacatctggccgaagggcttcgaggcacagagagcgcaggagcacagggcacagctggtctgttcagccagggcgggaaggggctccctgctgctcctgcccgaggggatccggtgccgcccaggagcaccagcggcggtgtctccgccaaggggctctcagtgagcaggagaaatgtttacgttcacaaagaccagagcccacgaggggctgagcctgctgccaaaagtgcttttggtcagctgcccagctgtgccacagcgggcaccgaggcaggaggcgccagaggaacctttcacatgggctgcgggagcccgagcttcctgacccccagcccgggagcggagagggacgctggagcccaggccgaccgcacaccgccctggagcgacttcgcccaccagagtcggctgcccagcccgtgggtgctgcgctccgaaggcagagatgcagtgtggagggggggcgtcgggagcgagagagacaaggggtccgagggccccgcccggggcctgcccagcctgccccttgcgggcttctcgccgctgctgtccacccagctcttccactttggaaagggtgtctcctgggggggcaggcaggctggcctcttcagcccccacctggggctgcctctgcagggcccctccttctcggccttcagggaggcccaggccggacccagccctgtctttggaagcccacacttgctggcaaagaaggacggcggcccctggccaaccaggaaggcacaggcagggctgagtttgcatgacaggaggagctcgggctcggaggaaagcattttagacctgaggtatcgacgaagggtcaacagggatgaccaggagcaggacgccttgggcagtgacgccagtgacttcagcgacacctccacggaggacagtggcggcagctcagtagtgaaggtctaagccctcgagctgtgggttcgcgtcctgggttgcgtgcattcgtggaaagcggcgtagccgtgcgtgtgtgtgatggttccgtggctgcaaggaagggaaacagtctattatacatagccctgtatatatgtacaccaacatgaaacttttatttaacagacgtgtcctggtaaatatgatttttgtagctttttgtaaattatttaaagtgatgtaaaagatatttttggaaaatactgttgttcaattttgtagggtgttcctaactgcagttttctgtgttctgcatacaagtcttagcttaggaaacatttggttcttaccatcacagccaggttcacagaggctctgatgctttttggttgattgctggtgagaatggccggcggtggctgcagtggtagcctgaggaaggccaagctgccctccctgggaatcactcagatgccccaagatgtccgttgggaagctcccaggacagcactttttatacagaggacaccgcctcggccccacgtccttagaggccagagcacatctgaaaactgcaatcacagccgtccgctggaaaaacgtttcgaagcacagtggccagcgagcgagcacgtggctactccctgttgcatgtcaaatccacacagatgtcagcggcagctgctcggcagcccagccctgggcctgggtgggttcatgtccaatcttgttcgatcactagatgattctaacatcgaaataaacctctttttatatggc

SEQ ID NO: 171073 - DNA, 4744 bp, Homo sapiens
  Payload ID: 13655
  Gene Symbol: PPP1R26
  Gene Name: protein phosphatase 1, regulatory subunit 26
  Uniprot ID: Q5T8A7
  ENST ID: ENST00000605286
  CDS Start-End: 362-3991
cacagcagaagcagaaacagcagcggcctcaagtcaaaagtctattgaaaaagcagagagagaatgcctcggtgtgtaagtggagtgatgaggacctgatctctgggccgtgtgggaacactggctgccatttcatcacagtcaacctggactcacagaatttcaagagcttgtcggttgggtcaagaatgaacctacgcatgacggcgtgctgatcctgggtttctagtcatcctttttaagctgcaaagaagcatttgcagacgttgtctcatgggtaccgcttgccaactttggaggatgtgaagccggtagagaaataaagcatcgcccctctgcgcgcccctccccgtctgctagaatgtttctcatgaacgcttctccagtggttgctctccagtccaaatgggaggcctttggcccgccagggagctgtaggttccccaggtgcttctcggaggctgacgagggcgtggagagcgcgtcggtgagcgcccgggtgcagatgcttatcagcactctgcagcgcgacggggctgctcggggcaccagcgatgagcgcgccgcacagaggggccacagggcagagggatgccacgacgccaggccggctgccaagcccaccgtgcacaaggagccacccgcgttggctgtctgtggtctcgttgctgactttgaccccatgggggaggaggaaactacagactttggcccgttggtgctagattcagacagtgatgattccgtggacagggacattgaggaggccatccaggagtacctgaaggcaaagagtggagccgcacagcccggggccggcggggcccagccaggtgcagcccagccttccagggccgcaggcggaggcagtagatgtaagccggaaccggctcacggcagtgccccgactgccctgtgtcccccaaaacttgtacctggatcaggtggtggccccggcagccaggtgggatccagcaaggaccagggctccgcctccccggtcagtgtgagcagcgatgactccttcgagcagagcatcagggcggaaatagaacagtttctgaatgagaagagacagcatgagacccaaaaatgtgatgggtcagtggagaagaaaccagacacaaatgaaaattccgccaagtcactcttgaaatcccaccaagagccgcctacaaaggtggtgcatcggcagggcctgctgggcgtccagaaggagtttgccttccgcaaacctccccggttagcgaagatgaacgtccagcccagaagcctcaggtccaaggtcacaaccacgcaggagaacgagggcagcacgaagccggcaaccccctgccgcccttcagaagcagcacagaataaaggtgggatcaaaaggagcgccagcgctgcaaggaggggaaagcgagtcatgagtgcggcacaggcgtccgaggcgtccgactccagcagcgacgatggcattgaggaggccatccagctgtaccagctgcagaaaacacgcaaggaggccgacggggacctgccccagagggtccaactccgagaggagagagcgcctgaccctcccgcacacagcacaagcagtgccacaaaaagtgccttgcccgagacccacaggaaaacacccagcaagaagaagctagtggccaccaagaccatggaccctggtccagggggcctggacactgaccatgcccccaagctcctgaaggaaaccaaagctccacctccagcgagccctgcttccaggagtgagtttgtggaacggtcctcgtgccgggcggacacatctgctgagctgatgtgtgcagaagcaatcctggacatctccaagacgatcctgccggcccctgtagagggcagtgacgggtccctgtccgcaagcccactcttctactccccgaacgtgccttcccgctctgacggcgacagtagctccgtggacagcgatgacagcatcgagcaggaaatccggacatttttggccctaaaggcgcagtcagggagtttgctggccagaggtgagagctgcccgcaggctgcccagggtccacttttgccgcctggcctcaacagccagaccggcggccacaagacccctctctctaaaacaccagacccactgctgggctgcaaaaggaagcgtagaggtggtggccatgtgaggccatccacgcccaagaaaatgcaggaggtggtgaaagacggtagccaggatgccgaccacagccaggggagagctgagcccggccatgagaggcgagacctgcccatccagggcaaagccagtgaggccctgggaggggagggcaccgccaggggccctggcgacactcgcatgtcacagggccagggtaagacagacgaggcaaggcgcctagacgagaaagagagctctgaagacaaaagcagctccctggacagtgacgaggacctggacacagccatcaaggacttgttaaggtccaagcgaaagctcaagaagaggtgcagggagcccagggctgcgtgcaggaagaaggtcaggttcagcacagcccagacgcacttcttggagcagctgggcgggctccggagagactggaaagacaggggcccgccagtgctgaagagctgcctctccaagtccaagagagacagtggcgagggtcctgggaagaaaccccccagtgtctttggcagcacggcagagaggatgaggcaggagggtgccgcgagccaggacgcggccctggccttccgggtgaggagacccgcctccgcctctgcctccgaagggaatccattccccagggagtcccagggcccagctcccagccccggctccctgtctgatgacagcagttcagtggacagcaacgacagcatcgaactggagattaggaagtttttggcggaaaaggccaaggagtcagtgagcagttcagaagttcaggcagagggccccaccgctcttgggacagggggcccagccaggccagaggtgctgtgcaggaaggagcctgccccaccgcctggcgtgtgcacacgcagccagagggccaggggggtcccacatctggccgaagggcttcgaggcacagagagcgcaggagcacagggcacagctggtctgttcagccagggcgggaaggggctccctgctgctcctgcccgaggggatccggtgccgcccaggagcaccagcggcggtgtctccgccaaggggctctcagtgagcaggagaaatgtttacgttcacaaagaccagagcccacgaggggctgagcctgctgccaaaagtgcttttggtcagctgcccagctgtgccacagcgggcaccgaggcaggaggcgccagaggaacctttcacatgggctgcgggagcccgagcttcctgacccccagcccgggagcggagagggacgctggagcccaggccgaccgcacaccgccctggagcgacttcgcccaccagagtcggctgcccagcccgtgggtgctgcgctccgaaggcagagatgcagtgtggagggggggcgtcgggagcgagagagacaaggggtccgagggccccgcccggggcctgcccagcctgccccttgcgggcttctcgccgctgctgtccacccagctcttccactttggaaagggtgtctcctgggggggcaggcaggctggcctcttcagcccccacctggggctgcctctgcagggcccctccttctcggccttcagggaggcccaggccggacccagccctgtctttggaagcccacacttgctggcaaagaaggacggcggcccctggccaaccaggaaggcacaggcagggctgagtttgcatgacaggaggagctcgggctcggaggaaagcattttagacctgaggtatcgacgaagggtcaacagggatgaccaggagcaggacgccttgggcagtgacgccagtgacttcagcgacacctccacggaggacagtggcggcagctcagtagtgaaggtctaagccctcgagctgtgggttcgcgtcctgggttgcgtgcattcgtggaaagcggcgtagccgtgcgtgtgtgtgatggttccgtggctgcaaggaagggaaacagtctattatacatagccctgtatatatgtacaccaacatgaaacttttatttaacagacgtgtcctggtaaatatgatttttgtagctttttgtaaattatttaaagtgatgtaaaagatatttttggaaaatactgttgttcaattttgtagggtgttcctaactgcagttttctgtgttctgcatacaagtcttagcttaggaaacatttggttcttaccatcacagccaggttcacagaggctctgatgctttttggttgattgctggtgagaatggccggcggtggctgcagtggtagcctgaggaaggccaagctgccctccctgggaatcactcagatgccccaagatgtccgttgggaagctcccaggacagcactttttatacagaggacaccgcctcggccccacgtccttagaggccagagcacatctgaaaactgcaatcacagccgtccgctggaaaaacgtttcgaagcacagtggccagcgagcgagcacgtggctactccctgttgcatgtcaaatccacacagatgtcagcggcagctgctcggcagcccagccctgggcctgggtgggttcatgtccaatcttgttcgatcactagatgattctaacatcgaaataaacctctttttatatggc

SEQ ID NO: 171074 - DNA, 782 bp, Homo sapiens
  Payload ID: 13656
  Gene Symbol: PPP1R27
  Gene Name: protein phosphatase 1, regulatory subunit 27
  Uniprot ID: Q86WC6
  ENST ID: ENST00000330261
  CDS Start-End: 81-545
ctgatctggtcgggaccggatacattattaaccccagtgcagtagggtccccaggggcaacctgccccacagcgcccaagatgcctagcagaactgcccgctatgcccgctacagcccacggcagcggcggcggcggatgctggctgatcgcagcgtgcgtttccctaatgatgtcctgttcttggaccacatccggcagggtgacctggagcaggtggggcgcttcatccggactcggaaagtctccctggccaccatccacccctcaggcctggccgccttgcatgaagccgtgctctctggaaacctggaatgcgtgaagctgctggtcaaatacggggctgacattcaccagcgagatgaggcgggctggacacccctgcacattgcctgcagcgatgggtaccctgacatagccaggtaccttatctccctgggagcggacagggatgcaaccaacgacgatggcgacctgccctccgacctcatcgacccggactacaaggagctggtggagctcttcaaagggaccacgatggactgagccagctttgcccgcccgcccccgcgcccagggccgcctccctggagaagccgcgcgtcgcccatgggccagcacgtgccccacccgtgggccaggggcggccggacccgtccctccacgaccccgccacccctcctaggcctggctttgtccccaggtgaattttttactgtgacactttttactttttcaataaacgtgactcccaggtgagggggcctgggtctacacacgtgg

SEQ ID NO: 171075 - DNA, 1443 bp, Homo sapiens
  Payload ID: 13656
  Gene Symbol: PPP1R27
  Gene Name: protein phosphatase 1, regulatory subunit 27
  ENST ID: ENST00000570394
  CDS Start-End: 98-442
cgacaggagccctcaagctgatctggtcgggaccggatacattattaaccccagtgcagtagggtccccaggggcaacctgccccacagcgcccaagatgcctagcagaactgcccgctatgcccgctacagcccacggcagcggcggcggcggatgctggctgatcgcagcgtgcgtttccctaatgatgtcctgttcttggaccacatccggcagggtgacctggagcaggtggggcgcttcatccggactcggaaagtctccctggccaccatccacccctcaggcctggccgccttgcatgaagccgtgctctctggaaacctggaatgcgtgaagctgctggtcaaatacggggctgacattcaccagcgagatgaggcgggctggacacccctgcacattgcctgcagcgatgggtaccctgacatagccaggtgagggggccctgggtctacacaggcttgaacccgacccctccgggcctcagtgggtccccaggatgggagccccaaaatgtagcccgggtggtgtcggcaagaaccctagaggctgggggcggtggctcacgcctgcgcctgtaatcccagcactttgggaggccgaggtgggcggatcacctgaggtcaggagttcgtgacaagaaccctctcactactaaaaatacaaaattagccacgcgtggtggcgcgcgcctgtaatcccagctactcaaggctgaggcaggagaatcacttgaacccgggaagtggaggttgccgtgagtcgagatcatgccattgcactccagcctgggtgataagagcgaaattctgtctcaaaaaacaaaaaaaacaaaaaaagaaccctgcaaaccctagaggcttctggaatcctgtttctgcctttgtcctcaatagaaccaacttgaaaagctggccacagcttccaaagggtcaggtttcttcctcctcaccctacccggaccttaggaccccaaggtgggggacacacaggtgaccccaggactctggccctctgacccgggttggggcgagcactctcctggctcctccccgcttcagccagagcgacctttacaccccaggtaccttatctccctgggagcggacagggatgcaaccaacgacgatggcgacctgccctccgacctcatcgacccggactacaaggagctggtggagctcttcaaagggaccacgatggactgagccagctttgcccgcccgcccccgcgcccagggccgcctccctggagaagccgcgcgtcgcccatgggccagcacgtgccccacccgtgggccaggggcggccggacccgtccctccacgaccccgccacccctcctaggcctggctttgtccccaggtgaattttttactgtgacactttttactttttcaataaacgtgactcccaggtgagggggcctgggtctacac

SEQ ID NO: 171076 - DNA, 1535 bp, Homo sapiens
  Payload ID: 13657
  Gene Symbol: PPP1R32
  Gene Name: protein phosphatase 1, regulatory subunit 32
  Uniprot ID: Q7Z5V6
  ENST ID: ENST00000338608
  CDS Start-End: 126-1403
gtttctcctgcttggcctcctccaggagggctggcttctctgcagagctctgcttcctgcagcctctccccgacctcagagcctctgcagaggaaaggccccctggggccctgccccacagcatcatgatggggaaactccccctgggggtcgtctccccttatgtgaagatgagttcggggggctacacggaccccctgaaattctacgccaccagctactgcaccgcctacggtcgggaggatttcaagccccgtgtgggcagtcacgtaggcaccggctacaaatcaaatttccagcccgtggtctcatgccaagccagtctggaggccttagacaacccggccaggggggaacaagcccaggaccatttccagtctgtggccagccagagctaccgccccctggaggtgcctgacggcaagcatcccctgccctggagcatgcgccagaccagctcaggctatgggcgggagaagcccagtgcgggtccccccaccaaggaggtccggaaggtccatttcgacacccaggagcacgggcctcaggccatcacggggctggagcccagggaagtgcctctgctccaccagcagcagggccaggacccgctggagcgggagaacttccgacatggcccacgcttcatgacgtcggagtacaattccaagtatctcagggaccctctagaccagccagatttcttgcagaagaaatcgatcggcgcaaaggaggggagtggcttcaccaaacagtcccaccagagccccattgtcttccaaccgccctcacaggccctccctggggaccctgccctcctcccaggccagagtgtcaccaagtcagacttcctccccaagactcacctacatggagatgagttcctacctgtgttggccagaggctccaagcgggaaacagccttcagccgagggaatgaaaggattctgaaccccagagtgccccctccctgcccagaacccagcagcgtgagtcaccagcagtttcagccacttcatcggatgcaacagacaaacgttgccctgcttggccgggagactgtggggaaaaaggagcccacagggttcagccttaacaaccccatgtatgtccggagcccctgtgatcctgacagggatcagcgatacctgaccacctacaaccaagggtactttgagaacatccccaagggtctagaccaggaaggctggactcgaggtggcatccagccccagatgccaggaggctacgccctcagccagccggtcagctgcatggaggccacccccaaccccatggagagcctgcggcacctgcatccccacgtgggaagaaccctgacctcagctgaccccttctaccagaacacacctcacagcagccgctgcgtggcacacagctgagccctgagcccttggtttgtcaatcctaggggacaggagccaggctactgtctgtacccccactccatcccccaggggaacacccctgcccagctactttcctaatgaaataaagagcattgaagcagagaa

SEQ ID NO: 171077 - DNA, 1472 bp, Homo sapiens
  Payload ID: 13657
  Gene Symbol: PPP1R32
  Gene Name: protein phosphatase 1, regulatory subunit 32
  Uniprot ID: Q7Z5V6
  ENST ID: ENST00000432063
  CDS Start-End: 126-1343
gtttctcctgcttggcctcctccaggagggctggcttctctgcagagctctgcttcctgcagcctctccccgacctcagagcctctgcagaggaaaggccccctggggccctgccccacagcatcatgatggggaaactccccctgggggtcgtctccccttatgtgaagatgagttcggggggctacacggaccccctgaaattctacgccaccagctactgcaccgcctacggtcgggaggatttcaagccccgtgtgggcagtcacgtaggcaccggctacaaatcaaatttccagcccgtggtctcatgccaagccagtctggaggccttagacaacccggccaggggggaacaagcccaggaccatttccagtctgtggccagccagagctaccgccccctggaggtgcctgacggcaagcatcccctgccctggagcatgcgccagaccagctcaggctatgggcgggagaagcccagtgcgggtccccccaccaaggaggtccggaaggtccatttcgacacccaggagcacgggcctcaggccatcacggggctggagcccagggaagtgcctctgctccaccagcagcagggccaggacccgctggagcgggagaacttccgacatggcccacgcttcatgacgtcggagtacaattccaagtatctcagggaccctctagaccagccagatttcttgcagaagaaatcgatcggcgcaaaggaggggagtggcttcaccaaacagtcccaccagagccccattgtcttccaaccgccctcacaggccctccctggggaccctggagatgagttcctacctgtgttggccagaggctccaagcgggaaacagccttcagccgagggaatgaaaggattctgaaccccagagtgccccctccctgcccagaacccagcagcgtgagtcaccagcagtttcagccacttcatcggatgcaacagacaaacgttgccctgcttggccgggagactgtggggaaaaaggagcccacagggttcagccttaacaaccccatgtatgtccggagcccctgtgatcctgacagggatcagcgatacctgaccacctacaaccaagggtactttgagaacatccccaagggtctagaccaggaaggctggactcgaggtggcatccagccccagatgccaggaggctacgccctcagccagccggtcagctgcatggaggccacccccaaccccatggagagcctgcggcacctgcatccccacgtgggaagaaccctgacctcagctgaccccttctaccagaacacacctcacagcagccgctgcgtggcacacagctgagccctgagcccttggtttgtcaatcctaggggacaggagccaggctactgtctgtacccccactccatcccccaggggaacacccctgcccagctactttcctaatgaaataaagagcattgaagcaga

SEQ ID NO: 171078 - DNA, 533 bp, Homo sapiens
  Payload ID: 13657
  Gene Symbol: PPP1R32
  Gene Name: protein phosphatase 1, regulatory subunit 32
  ENST ID: ENST00000535545
  CDS Start-End: 1-414
ggccagagtgtcaccaagtcagacttcctccccaagactcacctacatggagatgagttcctacctgtgttggccagaggctccaagcgggaaacagccttcagccgagggaatgaaaggattctgaaccccagagtgccccctccctgcccagaacccagcagcgtgagtcaccagcagtttcagccacttcatcggatgcaacagacaaacgttgccctgcttggccgggagactgtggggaaaaaggagcccacagggttcagccttaacaaccccatgtatgtccggagcccctgtgatcctgacagggatcagcgatacctgaccacctacaaccaaggaaccctgacctcagctgaccccttctaccagaacacacctcacagcagccgctgcgtggcacacagctgagccctgagcccttggtttgtcaatcctaggggacaggagccaggctactgtctgtacccccactccatcccccaggggaacacccctgcccagctactttcctaatgaaataaagagca

SEQ ID NO: 171079 - DNA, 488 bp, Homo sapiens
  Payload ID: 13657
  Gene Symbol: PPP1R32
  Gene Name: protein phosphatase 1, regulatory subunit 32
  ENST ID: ENST00000366212
  CDS Start-End: 189-356
gaggagacatgcatgtggctgcagccagttagcgagagctgttaggtaatgcgcaaagagaaagggatcgcgagggctgcagtgcgcacgggtcggatttgaaatcggtggccttgagcaggtactttgagaacatccccaagggtctagaccaggaaggctggactcgaggtggcatccagccccagatgccaggaggctacgccctcagccagccggtcagctgcatggaggccacccccaaccccatggagagcctgcggcacctgcatccccacgtgggaagaaccctgacctcagctgaccccttctaccagaacacacctcacagcagccgctgcgtggcacacagctgagccctgagcccttggtttgtcaatcctaggggacaggagccaggctactgtctgtacccccactccatcccccaggggaacacccctgcccagctactttcctaatgaaataaagagcattgaagcagagaa

SEQ ID NO: 171080 - DNA, 594 bp, Homo sapiens
  Payload ID: 13657
  Gene Symbol: PPP1R32
  Gene Name: protein phosphatase 1, regulatory subunit 32
  ENST ID: ENST00000542951
  CDS Start-End: 1-531
ccctcacaggccctccctggggaccctgccctcctcccaggccagagtgtcaccaagtcagacttcctccccaagactcacctacatgtgccccctccctgcccagaacccagcagcgtgagtcaccagcagtttcagccacttcatcggatgcaacagacaaacgttgccctgcttggccgggagactgtggggaaaaaggagcccacagggttcagccttaacaaccccatgtatgtccggagcccctgtgatcctgacagggatcagcgatacctgaccacctacaaccaagggtactttgagaacatccccaagggtctagaccaggaaggctggactcgaggtggcatccagccccagatgccaggaggctacgccctcagccagccggtcagctgcatggaggccacccccaaccccatggagagcctgcggcacctgcatccccacgtgggaagaaccctgacctcagctgaccccttctaccagaacacacctcacagcagccgctgcgtggcacacagctgagccctgagcccttggtttgtcaatcctaggggacaggagccaggctactgtctgtacccccac

SEQ ID NO: 171081 - DNA, 1107 bp, Homo sapiens
  Payload ID: 13657
  Gene Symbol: PPP1R32
  Gene Name: protein phosphatase 1, regulatory subunit 32
  ENST ID: ENST00000538185
  CDS Start-End: 671-979
gccgtttgttgtcctctggcctaaaccctgaggctcagaggggaggagcagagcttccgcccgcacagcagactcagcacagtggccgctccagttcccacggaggtgggggaggggcaacgatgttctgaccccttcttaggcaaacacctcctcctgtggctctggcagagaccagctccagtcctgtctgctgggtccttccagcctgtcgtgtcctgttgtgtcctgagctcctgctggctgtcaggcacgcttgctggtgcttcctggtgcgcgcagagccccgggattgtcatcactgattcctgcattgatctgtctgcaccccctcttcataagttcaagggtgggacccccttcttacttgtctttgcaccctctggacctggctgtgctcagtgaaatggaaggaaatggaaatgaaatggaaggaaagttaagtgcctagagaagtggatgagacggggtccccaccccaaggtactggcaggccagggacaggggcatcactgaaactgtcctttaacactccaaagagtgtttcagcgtcaggtggaggggagggcaggctttttgagtaagagttcccccagtggacgtgggcttagggagagctagacgaggacagcatgagcaaaggtggggaggctgggcgatctgagggtcgatggagaagggcagcaggggttgcagaggtgggcagagtccagcttccagccaaggacccctcctctcctccaggtactttgagaacatccccaagggtctagaccaggaaggctggactcgaggtggcatccagccccagatgccaggaggctacgccctcagccagccggtcagctgcatggaggccacccccaaccccatggagagcctgcggcacctgcatccccacgtgggaagaaccctgacctcagctgaccccttctaccagaacacacctcacagcagccgctgcgtggcacacagctgagccctgagcccttggtttgtcaatcctaggggacaggagccaggctactgtctgtacccccactccatcccccaggggaacacccctgcccagctactttcctaatgaaataaagagcattgaagcag

SEQ ID NO: 171082 - DNA, 1031 bp, Homo sapiens
  Payload ID: 13658
  Gene Symbol: PPP1R35
  Gene Name: protein phosphatase 1, regulatory subunit 35
  Uniprot ID: Q8TAP8
  ENST ID: ENST00000292330
  CDS Start-End: 192-953
ggaaatgacgcctgggagcgacaacagggtgggtggggctgctgactccgcccccgaaggaaagggttaacggtttccggtagcggcgtctaggaggggcgggggaaaggaggcggcagccaggctgtgtcccctgaccgttggagcgtctgcgacccccgcatccccgcaccctcaaggcacctccaaagatgatgatgggttgtggggagtcagagctgaagtcggcggacggggaagaagccgcggcggtcccggggccacccccggagccccaagtcccgcaactccgagccccagtgcccgagcccggcctggacttgagcctgagcccgcggcccgacagccctcagccgcggcacggcagccccgggcggcggaaggggcgggcggagcggcggggcgcggctcggcagcggcggcaggtccgcttccgcctgacgccgccctccccggtgcggtccgagccgcagcctgcggtgccgcaggagctggagatgcccgtgctgaagagcagcctggccttgggcctggagctgcgggccgcagccgggagccactttgatgctgcgaaggccgtggaggaacagctgagaaagtcgttccagatccgctgcggcctggaggagagcgtgtccgaggggctgaacgtgccgcgctccaagcggctcttccgggacctggtgagcctgcaggtgccggaggaacaggttctgaatgccgcgctcagggagaaattggctctcctgccgccacaggctcgagccccgcacccaaaggagccacctgggcctgggccagacatgaccatcttgtgtgacccagaaacgctattttatgaatctccacacctgaccctggacggtctgccccctctccgacttcaactccggccccgcccttcagaggacaccttcctcatgcaccggacactgaggcgatgggaagcgtagaccccaaagatccctggagggctagttcgtatttttgtgttaaactatttgttagaataaagtaattttgctaataaa

SEQ ID NO: 171083 - DNA, 1405 bp, Homo sapiens
  Payload ID: 13659
  Gene Symbol: PPP1R36
  Gene Name: protein phosphatase 1, regulatory subunit 36
  Uniprot ID: Q96LQ0
  ENST ID: ENST00000298705
  CDS Start-End: 97-1365
agcgacgccccgccccgctccgcgccccgggcagccgtgtgcaggcgcctgcgggcggtatcctcggcgacgccgtatggcttccagggcgaggccatgtaccgggtgcccgagttttatgcgaggaggaagcggttaggtgggcagaccccttacttgatggatcagttgggattacgattagggatgtggtactggaaagatgaaaccagaactcttgaattcagaaggtttgccgcagaagattctgtccagtggctcctgaaacatcaccctcattttacacctgcagcagaagtcaaggaaaaaggaaagaaaggcaaagcagttcactttgcagaaactgatggtccagcttcagacaggttgacagataaaagacttgctgcaaaagatgataagtcagctaaagctgtagagaaacgaggtcaacagggcaccattacactggatgatgttaaatttgttactttgcttttgctacaagatactgagatgcagcggatctgttcttttacaacatttatgaggaataagaatcttgataatttcctcatggcattattgtactacttatcccattacttggaaaaaaactcactggaaaagaaacccaaaagctatatggtaggccttgtagagaaaaaagaaatggaattggttttaagtgaattagaagcagcacagaggtacttggcgcagaagtactgtatccttgtgctgggcttggccgtgccggataagcatcacatgtgctgtggaaaggagaaaatatcagatacacagaaagactggaagttctttgagtccttttatactttctgtacatatgtggcttggattgtcttccgacgtcaacacttgacagagattgaagaagaagtagggagactctttcgtaccaatatgttcaacattcctcgcaggaggcgtgaagatgaggaatcaggaggggaaaagaaacgcatgacttttgttcagttcaggagaatgatggcaaaacgcccagcaattaaaaaagctatcaacatgcgttctccagtcatgtctactctgctgccatctctcagagaaaaagctcaaaacgtctttgagaaaaagtatcatcaagtagacgtcagattcccagccgagatgcaaaagcatgtgggaactctggactctgtgcccatgccggtagttggcatcttgggggagcctcgatgtctattcaacccacatacgcttcacccccttgatccagaagaaaacacaaaatcatttgggagatatccttccttgatggaaaacaataacatgaggattcaggatacactggacttggtcatgaaaacactgtcctctcatacatcatgccctaagtaacctggtacattccatatctcaagtaaactactttgacttt

SEQ ID NO: 171084 - DNA, 1400 bp, Homo sapiens
  Payload ID: 13659
  Gene Symbol: PPP1R36
  Gene Name: protein phosphatase 1, regulatory subunit 36
  ENST ID: ENST00000467261
  CDS Start-End: 59-196
gtgcaggcgcctgcgggcggtatcctcggcgacgccgtatggcttccagggcgaggccatgtaccgggtgcccgagttttatgcgaggaggaagcggttaggtgggcagaccccttacttgatggatcagttgggattacgattagggatgtggtactggaaagatgaaaccagaactcttgaattcagaagatgaagaaacaaggctcagggagattaagcaactgaaccaaagtcatacagccagtttgccgcagaagattctgtccagtggctcctgaaacatcaccctcattttacacctgcagcagaagtcaaggaaaaaggaaagaaaggcaaagcagttcactttgcagaaactgatggtccagcttcagacaggttgacagataaaagacttgctgcaaaagatgataagtcagctaaagctgtagagaaacgaggtcaacagggcaccattacactggatgatgttaaatttgttactttgcttttgctacaagatactgagatgcagcggatctgttcttttacaacatttatgaggaataagaatcttgataatttcctcatggcattattgtactacttatcccattacttggaaaaaaactcactggaaaagaaacccaaaagctatatggtaggccttgtagagaaaaaagaaatggaattggttttaagtgaattagaagcagcacagaggtacttggcgcagaagtactgtatccttgtgctgggcttggccgtgccggataagcatcacatgtgctgtggaaaggagaaaatatcagatacacagaaagactggaagttctttgagtccttttatactttctgtacatatgtggcttggattgtcttccgacgtcaacacttgacagagattgaagaagaagtagggagactctttcgtaccaatatgttcaacattcctcgcaggaggcgtgaagatgaggaatcaggaggggaaaagaaacgcatgacttttgttcagttcaggagaatgatggcaaaacgcccagcaattaaaaaagctatcaacatgcgttctccagtcatgtctactctgctgccatctctcagagaaaaagctcaaaacgtctttgagaaaaagtatcatcaagtagacgtcagattcccagccgagatgcaaaagcatgtgggaactctggactctgtgcccatgccggtagttggcatcttgggggagcctcgatgtctattcaacccacatacgcttcacccccttgatccagaagaaaacacaaaatcatttgggagatatccttccttgatggaaaacaataacatgaggattcaggatacactggacttggtcatgaaaacactgtcctctcatacatcatgccctaagtaacctggtacattccatatct

SEQ ID NO: 171085 - DNA, 576 bp, Homo sapiens
  Payload ID: 13659
  Gene Symbol: PPP1R36
  Gene Name: protein phosphatase 1, regulatory subunit 36
  ENST ID: ENST00000555645
  CDS Start-End: 79-303
tccgcgccccgggcagccgtgtgcaggcgcctgcgggcggtatcctcggcgacgccgtatggcttccagggcgaggccatgtaccgggtgcccgagttttatgcgaggaggaagcggttaggtgggcagaccccttacttgatggatcagttgggattacgattagggatgtggtactggaaagatgaaaccagaactcttgaattcagaaggtttgccgcagaagattctgtccagtggctcctgaaacatcaccctcatgcccctattccaaagctggcagagaaccagcagtctgcctgaatgtttgccaaggtcatggactcccctgaggacataaaaccaaggaaaccctactctttcgtcatggcctgagagaagactctctgagaaccatcaaagaggtctaacttgtgtggaagccaagagtggtccagccctctgcatttacgtgatggattctagagagaaaatatgaatttctttcctgtttacttcaagttttacacctgcagcagaagtcaaggaaaaaggaaagaaaggcaaagcagttcactttgcagaaactgatggtcc

SEQ ID NO: 171086 - DNA, 596 bp, Homo sapiens
  Payload ID: 13659
  Gene Symbol: PPP1R36
  Gene Name: protein phosphatase 1, regulatory subunit 36
  ENST ID: ENST00000557202
  CDS Start-End: 463-596
gccatatttgcctagaaaaaaaaaaaactctggtgtatttgacagatggtcagaattgaattctggctccctgcgcagcagttgggattacgattagggatgtggtactggaaagatgaaaccagaactcttgaattcagaagatgaagaaacaaggctcagggagattaagcaactgaaccaaagtcatacagccagtttgccgcagaagattctgtccagtggctcctgaaacatcaccctcattttacacctgcagcagaagtcaaggaaaaaggaaagaaaggcaaagcagttcactttgcagaaactgatggtccagcttcagacaggttgacagataaaagacttgctgcaaaagatgataagtcagctaaagctgtagagaaacgaggtcaacagggcaccattacactggatgatgttaaatttgttactttgcttttgctacaagatactgagatgcagcggatctgttcttttacaacatttatgaggaataagaatcttgataatttcctcatggcattattgtactacttatcccattacttggaaaaaaactcactggaaaagaaacccaaaagctatatggt

SEQ ID NO: 171087 - DNA, 3163 bp, Homo sapiens
  Payload ID: 13660
  Gene Symbol: PPP1R37
  Gene Name: protein phosphatase 1, regulatory subunit 37
  Uniprot ID: O75864
  ENST ID: ENST00000221462
  CDS Start-End: 365-2440
gcagattcgctgctcacgtttcttttttccgtggcccttcctgccctttgtttctctcttcatgtcacccgcgggacaactctacgtgcaagtcgctgaaatcgattttctgcttcttatagtaagcggcgggctcgccagcctcgagcgaaagtgtgactgcgaacgggcaggcgcgcgcggggctcggcggaggcgcgcttgggctcccggcggcgacgactacgaccactaggagagcggacggaggcggcgcctgaagcggcggcggagcccatgccccgggacggcgggcggacccggagagacaaatccggggcccggggcatgtccccggggcccccgtgaggaggcggcggcggctatggagatcgcgccgcaggaggcgccgcccgtgccgggcgcggacggcgacattgaagaggccccagctgaggccgggtctcccagccccgcgtcgccccccgccgatgggcgcctcaaggctgcagccaagcgcgtcacattcccgtccgacgaggatatcgtgtctggagcagtggagcccaaagacccctggagacatgcccagaatgtgaccgtggacgaggtcatcggcgcctacaagcaggcctgccagaagctgaactgcaggcagatccccaagctcctcaggcagctgcaggaattcacagacctcgggcaccgcctcgactgtctggacctgaaaggtgagaagcttgactacaagacctgtgaggccctggaagaggtcttcaagaggctgcagttcaaggtcgtggacctggagcagacaaacctggatgaagatggtgcctcggccctcttcgacatgatcgagtactacgagtcggccacccacctcaacatctccttcaacaagcacatcggcacccggggctggcaggcggccgcccacatgatgcgcaagacgagctgcctgcagtatctggacgcccgcaacacgcccctgctggaccactcggcgcccttcgtggcccgtgccctgcgcatccgcagcagcctggcagtgctgcacttggagaacgccagcctgtcggggcggcccctcatgctgctcgccacggccctgaagatgaacatgaacctgcgggagctgtacctggcggacaacaagctcaacggcctgcaggactcggcccagctgggtaacctgctcaagttcaactgctccctgcagatcctggacctccggaacaaccacgtgctagactcgggtctggcctacatctgcgagggcctcaaggagcagaggaaggggctggtgaccctggtgctgtggaacaaccagctcacgcacacaggcatggccttcctgggcatgacactgccgcacactcagagcctggagacgctgaacctgggccacaaccccatcgggaacgagggtgtgcggcacctcaagaacgggctcatcagcaaccgcagcgtgctgcgcctcgggctggcctccaccaagctcacgtgcgagggcgcggtggcggtggcggagttcatcgctgagagcccccgcctcctgagactggaccttcgggagaacgagatcaagacaggcgggctcatggcactgtcgttggccctcaaggtgaaccactcactgctgcgcctggacctcgaccgtgaacccaagaaagaggcggtgaagagcttcatcgagacgcagaaggcgctgctggccgagatccagaacggctgcaagcgcaacttggtgctggcgcgggagagggaggagaaggagcagccgccacagctgtcggcctccatgcctgagaccaccgccaccgagccccagcccgacgacgagcccgccgctggggtgcagaacggggcccccagccccgcacccagcccggactcagactcagactcggactcggatggggaggaagaggaggaagaggaaggggagagggacgagaccccctgtcctgccctggtgccccccacggactccctgggccctggggacaggagtcccccaggcagcccctccacacccaccgagcagcggatttccgtgtccagcccgggccggggccacaaggtgtttgtggtgacccgggtggagagcccgcccgagagggcagagccccctgcgtcccccacccctccctctcccccaccccctccctccccacccgcctcaccttccctaccaccagccggggccattgacacccgggacacagggtcctctgagcctcagccaccaccggagccgcctcggtcagggccaccactgcccaacggcctgaagcccgagttcgccctggcactgccccctgagccgcccccggggcctgaggtcaaggggggcagctgcggcctggagcacgaactgagctgctccaagaacgagaaggagctcgaggagctgcttctggaagccagtcaggaatccgggcaggagacactgtgacactttagttccctttttccggtcggtctgcgatgagctgaggccagagccatgagaatctgctcaccttccccccagccttcctgaggcccaggatgccaggggtgggggccattctggggcccccctccccccacagcaacactacaaggggtgcaggagctacagggagtggccctccgcgcgtgactcaagcacttctatttatgagcccagcactggaagactctgggggtgaatgggaggagggggagcaggaggaggaggaggtctccaaggacatcaggcgcctgttctggaggggccaggcttgccctgcggagggcaggcgtcctgggtggtggtgggatggtcccctgtggccccgggcacagggccgggcaggcagcctggtgccggagaggcggtgcgtgctggtggtggttgagatgcacagaacagccccagacagcgcaggccgggcagggtggggggatgggagcagaggatcagagctttctttttctcaagtgcaataaatctatcagggagctggggcgggagcagccggcactccgggaccctgctgtccaggccactggaggctgcgccctgagaggcactacagccctttgggggcgagtggcatgggtgtgggtgagggtgggcagagggctggggctactcctgtcggtgcaactctgttcacaccttttctaataaactggggctgggttcactttg

SEQ ID NO: 171088 - DNA, 712 bp, Homo sapiens
  Payload ID: 13660
  Gene Symbol: PPP1R37
  Gene Name: protein phosphatase 1, regulatory subunit 37
  ENST ID: ENST00000544069
  CDS Start-End: 153-712
gcggcgacgactacgaccactaggagagcggacggaggcggcgcctgaagcggcggcggagcccatgccccgggacggcgggcggacccggagagacaaatccggggcccggggcatgtccccggggcccccgtgaggaggcggcggcggctatggagatcgcgccgcaggaggcgccgcccgtgccgggcgcggacggcgacattgaagaggccccagctgaggccgggtctcccagccccgcgtcgccccccgccgatgggcgcctcaaggctgcagccaagcgcgtcacattcccgtccgacgaggatatcgtgtctggagcagtggagcccaaagacccctggagacatggtgagaagcttgactacaagacctgtgaggccctggaagaggtcttcaagaggctgcagttcaaggtcgtggacctggagcagacaaacctggatgaagatggtgcctcggccctcttcgacatgatcgagtactacgagtcggccacccacctcaacatctccttcaacaagcacatcggcacccggggctggcaggcggccgcccacatgatgcgcaagacgagctgcctgcagtatctggacgcccgcaacacgcccctgctggaccactcggcgcccttcgtggcccgtgccctgcgcatccgcagcagcctggcagtgctgcacttggagaacgccagcctgtcggggcggcc

SEQ ID NO: 171089 - DNA, 4384 bp, Homo sapiens
  Payload ID: 13661
  Gene Symbol: PPP1R3A
  Gene Name: protein phosphatase 1, regulatory subunit 3A
  Uniprot ID: Q16821
  ENST ID: ENST00000284601
  CDS Start-End: 70-3438
gcctcagtatctcaaatgtcagcctctactagtcgtacagttctctcttatttgatatcagagagcccaatggagccttctgaagtacctagtcagattagcaaagataattttttagaagttcctaatttatctgactctctttgtgaagatgaagaagttactttccaacctggtttctcccctcaaccaagtagacgaggttctgattcttctgaagacatatacctggataccccatcttcaggtactagaagagtttcatttgctgattcctttggattcaatcttgtgtctgttaaagaatttgattgctgggaattaccgagtgcttcaaccacttttgacttagggacggacattttccacacagaagaatatgttttagccccactgtttgacttgccttcttcaaaagaagatcttatgcaacaactccaaatacagaaagcaatactggagtcaactgagtctcttcttgggtctacaagtatcaagggtattattcgagttttgaatgtttcttttgagaagttagtatatgtaagaatgtctttagatgactggcagacacattatgacattttagcagaatatgttcctaattcatgtgatggtgaaactgaccagttctcctttaagattgtattggttcctccttatcaaaaagatggcagtaaagttgagttttgtatacgttatgaaacttctgttggtacattttggtcaaataataatggcacaaattatacattcatttgtcaaaagaaagaacaagagccggagcctgtaaaaccatggaaagaagttcctaacagacaaataaaaggctgcttaaaggtaaaatcaagtaaagaagaatcatcagtaacatcagaagaaaataactttgagaatccaaagaatacagatacctatatcccaacaatcatttgttctcatgaggacaaggaagatttggaagccagtaatcgaaatgtaaaagatgtaaacagggaacatgatgaacataatgaaaaagaattagagttgatgataaatcaacacttaataagaaccagaagtactgcttccagagatgaaaggaatacattttcaacagatccagtcaattttccaaataaagcagaggggttagagaagaagcaaatccatggtgaaatatgtactgacttgttccaaaggtctctgtctccaagttcatcagcagaaagctccgtaaagggagatttttactgcaatgaaaaatattcctcaggagatgactgtacacatcaaccttcagaggaaactacttcaaatatgggagaaatcaagccatcattgggagatactagtagtgatgaactagtgcaattacatactggcagcaaagaagtcctggatgataatgctaatccagcccatggcaatggcacagtgcaaataccttgcccctcttcagatcaactaatggcaggaaaccttaataaaaaacatgaaggaggagctaaaaatattgaagtaaaagatttgggatgtttacgaagagatttccattcagatacgtcggcatgtctcaaagaatcaacagaagaaggatcttctaaggaagattattatggcaatggtaaggatgatgaagaacaaagaatatatttaggtgttaatgaaaaacaaagaaaaaatttccaaacaatcttacatgaccaagaaaggaagatgggtaaccctaaaataagtgtggcagggattggagctagtaacagagacctggctactctgctgagcgaacataccgcaatccccacccgggcaatcacagcagatgtgtctcattcaccaaggacaaatttaagttgggaagaagctgtgttaaccccagagcatcatcatttgactagtgaaggcagcgctttaggagggataactggtcaagtttgttcatcaagaactggaaatgttttgaggaatgattatcttttccaagttgaagaaaaatcaggtgggattaattctgaagatcaggataatagcccacagcataaacaaagttggaatgttctggaaagtcagggaaaatcaagagagaataagacaaacataacagagcatatcaaaggacaaacagattgtgaagacgtgtggggaaaaagagataatacgaggagtttgaaagctactacagaagaattgtttacctgccaagaaacagtgtgctgtgaactgtcttctctagctgatcatggcattactgagaaagcagaagctggtacagcctatataattaagacaacatcagaaagtactccagaaagcatgtctgctagagaaaaagcaataattgctaagctacctcaagagacagcacgaagtgacaggcccatcgaggtaaaggaaacagcgtttgatccacatgaagggagaaatgatgattcacattataccctttgtcaacgagatacagtaggtgtaatctatgacaatgattttgaaaaggaatcacgtttaggtatttgtaatgtacgtgtagatgaaatggagaaggaagaaaccatgtctatgtacaatcctaggaagacacatgacagggagaaatgtggcactggaaatataacatctgtggaagaatcctcatgggtcattacagaatatcaaaaagcaacttcaaaactggatttacagttgggaatgttaccaacagacaaaactgtattttcagaaaacagagatcttaggcaggttcaagaattatcaaagaaaacagactcggatgccattgtgcattctgcttttaactcagacactaatagagctcctcagaatagctctcctttttccaaacatcatactgaaatttcagtgtcaactaatgagcaggcaattgctgtagagaatgcagttactaccatggctagccaacctatttctacgaaatcagaaaatatttgtaattcaacaagagaaatccagggtattgagaagcacccttatcctgagtctaaacctgaagaagtttccagaagttcaggaatagtgacatcaggtagtagaaaagaaagatgcataggccagattttccaaacagaagagtatagtgtggaaaaatctctagggccaatgattttaatcaacaaacctcttgagaatatggaagaagcaaggcatgaaaatgaaggattagtaagctctgggcaatcactatacacttcaggtgaaaaggaatctgacagctctgcttctactagtcttcctgttgaggaaagtcaagctcaaggcaacgaatctttgttttcaaaatataccaactctaaaataccttatttccttttgtttctgatatttcttataactgtctaccattatgacttaatgattggcttgacattctacgttttgtcattgtcctggctatcctgggaagagggtagacaaaaagagtctgtcaaaaagaagtaacctcagcactactattctctcttaaaagataagctatttaaccccaaacatttggattggtgaatgggactattcattgttcaaagatccagtgcagtttttctcttgaaggatcatttaaaaagggacgcgaataagtttgctccttcatataagtaattattctatataggaccattatgtttggatcattaaatacctatatgaatatgagatctgaagcacgtcaagttgaaattaggtacagctgttgctccttagcaggctatgaagttgcaatgcttcacatctcttcactacttaaagtgctatttcttgcattcatttctcttgcaataaagcttcatttttttttccccttgagagtatatattttcccctacggttttaaaaaacagataaaacatggacaatggcagaggacttttttggtcttttagtattgaacatgaaatttgttcaatttatcatttatcaggattcattgatcaaatatttcaacctttcatatttttaagaaaacacccatatatattgaaatgcaaacttaaacatattctgttcacttgagtgtaatacttgatgcatgcacacacacacacacataccttctttatagctacaaagtcagggcgttcataggcaaaatctgacaagactgaaacaattgggagattatctttcaattctgaaaaattctgtgggtggcctgtctttaagcaatgcttttctcttgtgagggaagactgtaacacagctgaactatttcagtgtcaactattcagaattgaaaatgtaaattaaaatttccacaagcattgcttcagaatgaatttgtacctataaagcataaggcattaaatgacaataaaaattccaaatggactatttgttccacattgtatttttgtcttcaaatattttctaagagaatgaattatccccc

SEQ ID NO: 171090 - DNA, 800 bp, Homo sapiens
  Payload ID: 13661
  Gene Symbol: PPP1R3A
  Gene Name: protein phosphatase 1, regulatory subunit 3A
  Uniprot ID: Q16821
  ENST ID: ENST00000284602
  CDS Start-End: 1-225
atggagccttctgaagtacctagtcagattagcaaagataattttttagaagttcctaatttatctgactctctttgtgaagatgaagaagttactttccaacctggtttctcccctcaaccaagtagacgaggttctgattcttctgaagacatatacctggataccccatcttcagaaagaacaagagccggagcctgtaaaaccatggaaagaagttcctaacagacaaataaaaggctgcttaaaggtaaaatcaagtaaagaagaatcatcagtaacatcagaagaaaataactttgagaatccaaagaatacagatacctatatcccaacaatcatttgttctcatgaggacaaggaagatttggaagccagtaatcgaaatgtaaaagatgtaaacagggaacatgatgaacataatgaaaaagaattagagttgatgataaatcaacacttaataagaaccagaagtactgcttccagagatgaaaggaatacattttcaacagatccagtcaattttccaaataaagcagaggggttagagaagaagcaaatccatggtgaaatatgtactgacttgttccaaaggtctctgtctccaagttcatcagcagaaagctccgtaaagggagatttttactgcaatgaaaaatattcctcaggagatgactgtacacatcaaccttcagaggaaactacttcaaatatgggagaaatcaagccatcattgggagatactagtagtgatgaactagtgcaattacatactggcagcaaagaagtcctggatgata

SEQ ID NO: 171091 - DNA, 1049 bp, Homo sapiens
  Payload ID: 13661
  Gene Symbol: PPP1R3A
  Gene Name: protein phosphatase 1, regulatory subunit 3A
  ENST ID: ENST00000449795
  CDS Start-End: 477-1049
gagtttaagttatgaaagatggtggctttcatttaggtctctggatctctctctctatcactttatctgccaagctgctgtgttttaagcagccctctagagagacttttatggtaaggaagtatagtattatactatctggccaatagccagagaagaattgagatctcccaacaaccatgtgactgaacttggaagcagacccttctttcccagctgaatcttcttgagatgtctggagccctggctaacagcttaataacctcaagagagaatctgggcaagaacgactcagtaaagaagaatcatcagtaacatcagaagaaaataactttgagaatccaaagaatacagatacctatatcccaacaatcatttgttctcatgaggacaaggaagatttggaagccagtaatcgaaatgtaaaagatgtaaacagggaacatgatgaacataatgaaaaagaattagagttgatgataaatcaacacttaataagaaccagaagtactgcttccagagatgaaaggaatacattttcaacagatccagtcaattttccaaataaagcagaggggttagagaagaagcaaatccatggtgaaatatgtactgacttgttccaaaggtctctgtctccaagttcatcagcagaaagctccgtaaagggagatttttactgcaatgaaaaatattcctcaggagatgactgtacacatcaaccttcagaggaaactacttcaaatatgggagaaatcaagccatcattgggagatactagtagtgatgaactagtgcaattacatactggcagcaaagaagtcctggatgataatgctaatccagcccatggcaatggcacagtgcaaataccttgcccctcttcagatcaactaatggcaggaaaccttaataaaaaacatgaaggaggagctaaaaatattgaagtaaaagatttgggatgtttacgaagagatttccattcagatacgtcggcatgtctcaaagaatcaacagaagaaggatcttctaaggaagattattatggc

SEQ ID NO: 171092 - DNA, 5548 bp, Homo sapiens
  Payload ID: 13662
  Gene Symbol: PPP1R3B
  Gene Name: protein phosphatase 1, regulatory subunit 3B
  Uniprot ID: Q86XI6
  ENST ID: ENST00000310455
  CDS Start-End: 152-1009
gacatctccgggaacccagcccaggccctgcctcccggacacaccgacgctcacgtagtcgcgcttgccacaaccctgcgggctctccgatgcggcgagcgagctggggagggggcttctccgcggcccaaaagcctgttcatctagccccatgatggctgtggacatcgagtacagatacaactgcatggctccttccttgcgccaagagaggtttgcctttaagatctcaccaaagcccagcaaaccactgaggccttgtattcagctgagcagcaagaatgaagccagtggaatggtggccccggctgtccaggagaagaaggtgaaaaagcgggtgtccttcgcagacaaccaggggctggccctgacaatggtcaaagtgttctcggaattcgatgacccgctagatatgccattcaacatcaccgagctcctagacaacattgtgagcttgacgacagcagagagcgagagctttgttctggatttttcccagccctctgcagattacttagactttagaaatcgacttcaggccgaccacgtctgccttgagaactgtgtgctcaaggacaaggccattgcaggcactgtgaaggttcagaacctcgcatttgagaagaccgtgaaaataaggatgacgttcgacacctggaagagctacacagactttccttgtcagtacgtgaaggacacttatgccggttcagacagggacacgttctccttcgacatcagcttgcccgagaagattcagtcttatgaaagaatggagtttgctgtgtactacgagtgcaatggacagacgtactgggacagcaacagaggcaagaactataggatcatccgggctgagttaaaatctacccagggaatgaccaagccccacagtggaccggatttgggaatatcctttgaccagttcggaagccctcggtgttcctatggtctgtttccagagtggccaagttacttaggatatgaaaagctagggccctactactagtgactgcaggtgacagggcgtggcggagctgccacagacaagcctagctctgctcactgtgcagtggagatggaaggccagggaggagcaacgtggaacttccatgaggccccgtttgggaaaataaaaggatcctcttcacttctttcttaaacagcaaatccagccaggttcagattacacaaccagtgtctcactcaaaggagcagtggtggctggcgcgctttcgcactgtggcagccacgagagtctgtgcacgtctgtgctggaaagggtatggatgggaatcaagcctatgccagtgctgatgaagctggaggagtctctcctctgctctccactcagatgtgggacatcagtcgccaaaagccactcagccccagccacctcgcgtgagaccctcactgttcattgtgttcatctttgggtgctctctgccagccaggcctttcctgcaagctgctgtgcttccccgtccacgtgtatctctgctgtgacacactgagctgacgcacatttccagtgcagctgcagaagagaaatgggattggctcttgttttctgcaagttcatgttttgcattttatgttcttccacaattgatctgatgttcaggaaaagataataaaggcaaattagttagtggttgagacaggcatttcctcctcccgcttcttgaccccacagatgtattccagcagagagcaacacaccagtcatcaaaacccactggctcctgtgcggtgtcacagattgcagggttctgacaaggcaggacagtcaagagtggggacactttcagcttctacttttgccttctagggggagctttctaagtccccacatttaccccgagtcaccggaaaaatctgatttttcccccgaaagctcaatgactttaacgtgcttggctggtttgtctcattctttatgaaagaattttggggccgggcgcggtggcttatgcctgtaatcccagcactttgggaggccgaggcaggtggatcacgaggtcaggagatcgagaccatcctggctaacacggtgaaaccctgtctctactaaaaatacaaaaaaattagccaggcgtggtggcgggcgcctgtagtcccagctacttgggaggctgaggcaggagaatggcgggaacctgggaggcggagcttacagtgaaccgagatcacaccactgcattcccgcctgggcagcagagcgagactccgtctcaaacagaaaaaaaaagagaattttgaatctcctttcccaaagagtcatcttttctgctgtgtttaggacatttgatttgcatatccaatatctcctcgaaaccttcagaaaatggttttatcgtgactgtgattcacactatctagaacactttaccagcacccagggacatggacttgggtgttcttatttatggtgtgtatgtaaagagataggggagaaaaacctcacccaagttcttatacgttattttaaacgtttgccaactctgaaatttcagagattcattgttcttaaccatattggactaaagtctgttggttagtgctgttgtaaaagagacctctggggccgagtgtggtggcttatgcctgtaatccctgcactttgggaagccaaggcgggcagctcacctgaggtcaggcgttcaagaccagcctggccaacatggtgaaacctcgtctgtactaaaaatacaaaatttagctgagtgtggtggcaggcgcctgtaatccagctactcgggaggctgaggcaggagaatcacttgaacccaggaggtggaggttgcagtgagccgagatcacgtcactgcatttcagcctgagcgacagagtgaaactgtctcaaaaaagagagacttccgggacagtcattatcagataggccccaaacctgtgatttttcttgggcaagattggtgtttacttaggggtgctttaaaaatatatttttacaagtatacttgtaggaagttggttttttattttctatttttgtttgtttttggagtttggttaaacgactcttttattttctgttttgccttatcttactaaagtgaagttttcctaaggcaagcaagaagaggagtggaagcacagttgcctggatttggaggcagagttgtcaggcttttcaagctaagagtcttgtgcttggattttccagattaatttgaaaagacctcccatttgtggctttgtacataaccaacaggcagatactgagtgccttggctcctagagttttgtggttgggttaggttgtttttgttgttgttttgttttggttttgttttcatttctgaagtttaagatgccttgactttttaaatgctcttaaggctattcgatgtaattcttactcctaaaactggctgttcttagcctgaaatctaatgctttgttttttgtacctctcccaggtgggtaacactctaggatgacatgatgttataattttaggggaaatcacatttttaccttatgctgttactgggcagaaccacgttttatgtaaacataccagacatcgggtaacagacagtactttaaatgttataaatttggtgatcagaactattaatagcataaatcgaactcaaatggaagcaaaactgatttcatgcaggtcctgaattttactttgccttaagaagtgccctccccacaatgcaggagaggcacagagtgcactgtcattgacatgttacccgactaaggatcactctgttcataagaaaaaggcctgaagtgactctgtttaataaagtcagtttaattttatctaataatgatcttaagacattcccatgtcaaaatttgaaatatggtaattcagtgataactatctcttctaaagcagccgtaaaccctccccactacccgtctttctcccagctcaccctggctttttttgctgggggtgctggatgcaagcccccagccagcacacctgggatgctcaccctgccgcacagttcagaaggcaagtcctcacctgctcgcaaagacccttcttctccaataaaagactctacttgcctgagtttcctcatcagggctgtcattcagtgatgtatgggggtctgaagaatactgccttctatctgtcttctgtttaccacttgctcctctgctaccctcctgccgcaaacagtcttcttccttttggcccagttctgtcccgtgaaattctcagaaggcctcgggagctgcgctgatgtattctctccttgtttgatagctcatcatcagtagataagcctacacacttcagagggtgacaggtttcttacttggagacttcactgcaccttgacttgtagatttgccttcagacagctcttggttatggttacaagtggcccccgagtcccagaatctttcccaggttgccccagaaagaccagccacctgtcacaggtgcagttgtccggcaatagggaagcaacttcatttttgttttatatttattccctcaagtgccctgaggagcatttgcaaactgggtacaataaataagctggattatacaaagatatttaataaataagctttcagtatctattggaagacatgaagcatttgagtgggtttctttatttaaaaaattattctactggagctggtgagaaataatgaagctgtacagttctccagaaattaaaacaatgtcagagtcaatgggagaatttaatttacctttaagatttcattttaatggtggcaaaattatacattcttagaagatgtaaatttggaactgttaggagattgctctgtggttttgatcttttcaaaccattttctttttgaaaaaaggcattagttgtagtcatggacattaaatgggccatatatgcttatcaatcaaaaaagtgttccttttttggaactgcccattttctggatcttccctctcaatggataggggatgaaaaccttggttgccttttatttgtttcctcttctaaaatttctcacctgaatgtagtcctgggagagtcccgatcacgtctctcctgacatgttcactgaaatcggagacaagaagttacatggatgatgggatcttatagggtcacacaaagacaatttggcagcttatcttaatttcctgcagtgagacaacacatgtggaactgggaaggacagctgttgttacgagcagtttttcctggtcatggttgtaaagctctgtaacccacattgtaaagccgtgaatgtttttagtcttgttgacgagtttttagagactgctggacctctgagggctttgagagtgcagctgtgatgatgtttcactattacttcagtgtgaatgtagaaccaaggactcatcttcattttatacctaaaagtgccttgtcaagaaatttttgcatgttttaaaagataaatatttttgtacacagagttcaaggggaaatgcactttaaaaatcccaagaatggatgttctttgtgtggtatgagaggttggtttgtatctcaaaagcaaaaatgtaataaaggaagacaaaacaaaa

SEQ ID NO: 171093 - DNA, 2334 bp, Homo sapiens
  Payload ID: 13662
  Gene Symbol: PPP1R3B
  Gene Name: protein phosphatase 1, regulatory subunit 3B
  Uniprot ID: Q86XI6
  ENST ID: ENST00000519699
  CDS Start-End: 246-1103
aaagttaaagggggcagcgcggccgcggggagctcgagtcccgggtgactgctggagggaggaggtgaccgcgcagctctcgtgcacggacggacttcgccgcccgcggggggcgcgaacccgagcccgggcccagctcctgccgtcacggcagctgtccctgttcccccagggcgtatgctgccgcgggctggcgcgtctgccctcgggacttatgagctgaacccgcctgttcatctagccccatgatggctgtggacatcgagtacagatacaactgcatggctccttccttgcgccaagagaggtttgcctttaagatctcaccaaagcccagcaaaccactgaggccttgtattcagctgagcagcaagaatgaagccagtggaatggtggccccggctgtccaggagaagaaggtgaaaaagcgggtgtccttcgcagacaaccaggggctggccctgacaatggtcaaagtgttctcggaattcgatgacccgctagatatgccattcaacatcaccgagctcctagacaacattgtgagcttgacgacagcagagagcgagagctttgttctggatttttcccagccctctgcagattacttagactttagaaatcgacttcaggccgaccacgtctgccttgagaactgtgtgctcaaggacaaggccattgcaggcactgtgaaggttcagaacctcgcatttgagaagaccgtgaaaataaggatgacgttcgacacctggaagagctacacagactttccttgtcagtacgtgaaggacacttatgccggttcagacagggacacgttctccttcgacatcagcttgcccgagaagattcagtcttatgaaagaatggagtttgctgtgtactacgagtgcaatggacagacgtactgggacagcaacagaggcaagaactataggatcatccgggctgagttaaaatctacccagggaatgaccaagccccacagtggaccggatttgggaatatcctttgaccagttcggaagccctcggtgttcctatggtctgtttccagagtggccaagttacttaggatatgaaaagctagggccctactactagtgactgcaggtgacagggcgtggcggagctgccacagacaagcctagctctgctcactgtgcagtggagatggaaggccagggaggagcaacgtggaacttccatgaggccccgtttgggaaaataaaaggatcctcttcacttctttcttaaacagcaaatccagccaggttcagattacacaaccagtgtctcactcaaaggagcagtggtggctggcgcgctttcgcactgtggcagccacgagagtctgtgcacgtctgtgctggaaagggtatggatgggaatcaagcctatgccagtgctgatgaagctggaggagtctctcctctgctctccactcagatgtgggacatcagtcgccaaaagccactcagccccagccacctcgcgtgagaccctcactgttcattgtgttcatctttgggtgctctctgccagccaggcctttcctgcaagctgctgtgcttccccgtccacgtgtatctctgctgtgacacactgagctgacgcacatttccagtgcagctgcagaagagaaatgggattggctcttgttttctgcaagttcatgttttgcattttatgttcttccacaattgatctgatgttcaggaaaagataataaaggcaaattagttagtggttgagacaggcatttcctcctcccgcttcttgaccccacagatgtattccagcagagagcaacacaccagtcatcaaaacccactggctcctgtgcggtgtcacagattgcagggttctgacaaggcaggacagtcaagagtggggacactttcagcttctacttttgccttctagggggagctttctaagtccccacatttaccccgagtcaccggaaaaatctgatttttcccccgaaagctcaatgactttaacgtgcttggctggtttgtctcattctttatgaaagaattttggggccgggcgcggtggcttatgcctgtaatcccagcactttgggaggccgaggcaggtggatcacgaggtcaggagatcgagaccatcctggctaacacggtgaaaccctgtctctactaaaaatacaaaaaaattagccaggcgtggtggcgggcgcctgtagtcccagctacttgggaggctgaggcaggagaatggcgggaacctgggaggcggagcttacagtgaaccgagatcacaccactgcattcccgcctgggcagcagagcgagactccgtctcaaac

SEQ ID NO: 171094 - DNA, 2524 bp, Homo sapiens
  Payload ID: 13663
  Gene Symbol: PPP1R3C
  Gene Name: protein phosphatase 1, regulatory subunit 3C
  Uniprot ID: Q9UQK1
  ENST ID: ENST00000238994
  CDS Start-End: 86-1039
gccgcgggggcaaggcctggagctgtggttcgaatttgtgcaggcagcgggtgctggcttttagggtccgccgcctctctgcctaatgagctgcaccagaatgatccaggttttagatccacgtcctttgacaagttcggtcatgcccgtggatgtggccatgaggctttgcttggcacattcaccacctgtgaagagtttcctgggcccgtacgatgaatttcaacgacgacattttgtgaataaattaaagcccctgaaatcatgtctcaatataaaacacaaagccaaatcacagaatgactggaagtgctcacacaaccaagccaagaagcgcgttgtgtttgctgactccaagggcctctctctcactgcgatccatgtcttctccgacctcccagaagaaccagcgtgggatctgcagtttgatctcttggaccttaatgatatctcctctgccttaaaacaccacgaggagaaaaacttgattttagatttccctcagccttcaaccgattacttaagtttccggagccactttcagaagaactttgtctgtctggagaactgctcgttgcaagagcgaacagtgacagggactgttaaagtcaaaaatgtgagttttgagaagaaagttcagatccgtatcactttcgattcttggaaaaactacactgacgtagactgtgtctatatgaaaaatgtgtatggtggcacagatagtgataccttctcatttgccattgacttaccccctgtcattccaactgagcagaaaattgagttctgcatttcttaccatgctaatgggcaagtcttttgggacaacaatgatggtcagaattatagaattgttcatgttcaatggaagcctgatggggtgcagacacagatggcaccccaggactgtgcattccaccagacgtctcctaagacagagttagagtcaacaatctttggcagtccgaggctggctagtgggctcttcccagagtggcagagctgggggagaatggagaacttggcctcttatcgatgaattaagcaacaatgtaactggtcttgacttgtcatattcccccatgcaatcctaggtctgtattgctcaattttaggaagcctttgctactccatcagtaggtttagatttgagcttttgagacctggctatggaaaagaaagacacttgagaatttagtgttggggtctgtacagatgatgctacccaatttggctttgaaggatcaagtaacaggttgaaaactatttttataaaggtaatactttttcagttcccttcttccttccctctcaatccactagctttcatgttgggcaaggaaaagttgaggaaggatggctgatggtgatggaaagctgtgttaatggtatgaggaatgtgtgaaaagtatacacaaagggctctgaagctcaagtcagaggagtgggaggtctgatcattgttggtggaaaaacgtaaggttattttgtgtttttaagttggttttacaattctttcctggggaaattatttctggaggggaaaaagatccattctacgtatccttgtggagaaaagctaaataacctttaagaatgtgggtggtattggagaaagaagatgaattatagctccggagaatcaagatcttaagtgaagcctttctgttcagatgtgatctataaaaaatcataatttggggaaagtttaagcaaatctggctttgtagtcctgatgttataagtgactttgtgatcaaactgtcaggcttgggttcttgttatagaatgcttggtatagaaaaaccatgccatcattaatggctaacaacacgtagggacttcatgtcatgtcaaagatagctctttgcaagtgccttgattaaaccagaaaactgtcatcgtttaacccaaatatctgaatggtcatctggtaactcatgggtttttggcctcataagatggtccactctgtacacaggcattcctcctgcaataatgttgtatctttgagaccgttgtcagtgtacacaactcacatccttcatattgaaggtgactcatttttctgcacacttttttgatgtgatgcttgacgtgaggcccgacactaggattctcaatgcaagaatccagtaccttgcacatagaagtagcaacccatcccttgcctattttcatcttgctgttttcttttttttaaaaaaatggatgtgacttgttttgaatgttttgtattatacttgtttttgtgtgtgcataaattcattctgtaggatcttaagaaaaagagtcccagaatgttgcttctattattgtgcacaaccattgagaggtgttacaagaatgcagttaattttaacatgtgtgatgtgccatggtggaaaagtactatcggaataactctgcagtgacagaatttgaagtttggctagcatccatacttttctactgtaaatatttcactctcctctagctatccttgatgagcttctcactttaagaataaatgtgtttgatataa

SEQ ID NO: 171095 - DNA, 3630 bp, Homo sapiens
  Payload ID: 13664
  Gene Symbol: PPP1R3D
  Gene Name: protein phosphatase 1, regulatory subunit 3D
  Uniprot ID: O95685
  ENST ID: ENST00000370996
  CDS Start-End: 367-1266
aagtaacgccgcggaccgggaaagtgggaggggccgctcccggaacgcagccttcttgtaagaacctccaaggaagcaagaagaaaaaagaggcgctaccctgcgctcccgggaggcctctgaaagcttccactagagaaaaactccccactcttacaatttctttaaccgcaagaagcggaggacctggacaaggactcgaggagcaaggtggcgaaccaagggtagggcgcaccgggcccgagaggtcccccgcaggttgcagatacggtggactctctgcggcttctgagcacggagggagctgtcgcggggtcgggaggtcgtctctcatccctgcctcatcttccgacggccggcggggccatgtccagaggcccgagctccgcggtcctgcctagcgccctgggatcccggaagctcggcccccggagcctcagctgcctgtcggacctggacggcggcgtggccctggagccgcgggcctgtaggccccctgggagcccgggccgcgcgccgccgccaacgccagcgccgtcgggctgcgacccccgcctgcggcccatcatcctgcggcgggcgcgctcactgcccagctcccccgagcgccgccagaaggccgcgggcgcgccgggcgctgcgtgtcggccgggctgcagccagaagctccgcgtgcgcttcgccgacgccctgggcttggagctggcacaggtcaaggtgttcaacgcgggagacgacccgtccgtgccgctgcacgtgctgtcgcggctcgcaatcaactcggacctgtgctgcagcagccaggacctggagttcaccctgcattgcctggtgcccgatttcccgccgcccgtcgaggccgccgactttggcgagcgcctgcagcggcagctcgtgtgcctggagcgtgtcacttgctcggaccttggcatcagcggtacggtgcgcgtgtgcaacgtggccttcgagaagcaggtggctgtgcgctacactttctcgggctggcgcagtacccacgaggcggtggcgcggtggcgcgggcccgcaggccccgagggcacggaggacgttttcaccttcggctttccagtaccgcccttcctgctggagctcggctcccgcgtgcacttcgcggtgcgctaccaagtggcgggtgccgagtactgggacaacaacgaccaccgagactacagcctcacatgtcgcaaccacgcgctgcacatgcctcgcggggagtgcgaagagagctggatccacttcatctgagccgcgcggggaccggccacctggagcctccacacctaagctgcgcctcctgtcatttccctgctgggctctcacatctatctggttgttcttcaccaccctccaagtcctctgacctaattttctgctgcaaggtcccctggcagtggcccatcctgtcttctacttgaaacgtctgagtcacttggtctaaaaagtagcctcaggtggccagaaggccgagttgtgtaatgagttggggcagggtggtggggtaggtgcatgggagggtgggccctctggggaggcccaagcagcttgttttgcaaaggcccaagtcctcctgctaggaaaagcttttgcatgtgtcctgaatgtgtctctgtaaacatagctgttatttattattgtgatgttgggacctttagcccatagcggatgcctcctcaggaatattctcgatttaataagctaaaaaaaaaaagttctgtgtttgtgcccacagtaaacagaatgtacagtgtgacccacatcgtggtccctccaggcattcctgccccaggataaggaaaacctgagcccacatctgattgccaacggctgtagccttctaacagtgggaaactattaataggcaagaaatttctgctttatcagtcatcacacaaccattcctgggcattgagactgtcctggttaggctgtgtgtctcctacattaacagctggggaggagggaaaagcttcagacttttaaactagcaaaacagttatttctctgcattcacaattctgatttcatgtatttctctgtacatgtttgatcattatcaggccattctgtttaagtttgaaactaagcattttaagaagtcttgcctcagttatttcagttttcaggtgactagagaatttcaggcaacagtgccctttgcaattacctttttgatgattaaggtgactatttttatttcttgttaagcatcagaagatgtcagcattcatcttttgggagtccagttacaaggtggaactagaaggtgttttcagcaatagccagagcactggaggaaaaataattgacaaatatttatacttttaaattgttttgaactgtatttacatacatcatgttttatcaggtacccaccaactttatactttctgccttcagatagagtttctaacattttctagtttgtcagttttaaaatataaaattcttttatgtttttaaaccgtcaaccaagaagtcaagaccactgtcccctgctgagttaggcaatcacttaaaactccaaagaactccaggctgaggagttcttttggtgctgaacagtggtctgacaacaggtgctagaattaaggtgtgggaaaaaaaaaaaaacagccaggaaggacaagatctccaatttgtgaagcttatgatacagctgaaaccagtctgatcaattttatgctacctgtcaccaagaaattaactctaaatttttgaatgcttgttggcatctgtcaaatcaatactgaaaggatgcatttcggcttttaaccagtttggttctgatcattgcaacctctgtgcttttataattcaaagaacaaggatagctttcttcggtatcttttaatataagaacactgaattttggcttgaaatattgtgactaaattgcacaatctctggctattagcactgttcactacattaacatgcaagagagagagaagccttgttacatttcctgctatttaacaaactgtccaattaggtcagcaagcctgttagggccttcactgctacgcccctggccccaaaacagagagcaagacagttgtccagagaatttagatatgagttaagagctgccagatttattttaaggcatgtagagaatctcataatctatgtgaaagtcacttgccaaaaaggttttggttatgaaagtgaatgttatatatttaatattaagtgaacctcccgtgccttttaaaaaataccaacattatgaaatttaaaagcttaaatatatttgcctagttgataaagaggctgtggaacaactgaaggagaactttcagaccctaaaacagttatattacttagatgttaaaattttctagtgggctgtgcaattgctgggttgtccccccaaacatattttaatatgttatttaaaatgattttacccaagcctaagtattaaagtatatgtgcaaaaacagttgtgagccattctattatgcttcagtatgtttttcttgtggcctaattacagaagaccaagctttagaaacttcttgtctaaatcatttcacatgcaagtcttatcctttctacaacactgataaacgtagagccttggcaaaaataaattttgtcattgtg

SEQ ID NO: 171096 - DNA, 4773 bp, Homo sapiens
  Payload ID: 13665
  Gene Symbol: PPP1R3E
  Gene Name: protein phosphatase 1, regulatory subunit 3E
  Uniprot ID: Q9H7J1
  ENST ID: ENST00000452015
  CDS Start-End: 273-1112
cacgctcagagcagaccgctagcaggaggcaggatgtgatagtctaagaccctggaagctgacggccagagggagggaagggtggtcacagaggagaggcaaagcaacgggaggtggaggatcctggaggtgtctgcaaggagaatacacagcagcgaggggctgcagaagcggacccagcgacttctgcgctgacgcggggcgggcgggagagaggaagagaggggagcgcggtggcgctgcgagctggccccgccggggaaggggctgccatgtcccgtgagcggcccccgggcaccgacattccccgcaacctgagcttcatcgccgcgctaacggagcgcgcctactaccgtagccagcggcccagcctcgaggaggagccggaggaggagccaggcgagggcgggacgcggttcggggcccgatcccgcgctcacgcaccgagtcggggccgccgggcccgatctgcaccagccggaggcggcggggcccgggcgccccgcagccgtagcccagacacccgcaagagagtgcgtttcgccgacgcactggggttggagctggctgtcgtgcgccgcttccgtcccggtgagctgccccgggtgccccgccacgtgcagatccaattgcagagggacgccctccgccacttcgcgccctgccagccccgcgcccgcggcctccaggaggcgcgcgccgccctggagccggccagcgagcccggcttcgccgcccgcttgctgacgcagcgcatctgcctggaacgcgccgaggcgggcccgctgggcgtggccgggagcgcgcgcgtggtggacctggcctacgagaagcgcgtgagcgtgcgctggagcgccgacggctggcggagccaacgcgaggcgccagccgcctacgccggtccggccccgcccccgccgcgcgccgaccgcttcgccttccgcctgcccgcgccgccgattgggggcgccctgctcttcgccttgcgctaccgtgtgacaggtcacgagttctgggacaacaacggcggccgtgactatgctctacgtgggcccgagcacccgggcagtggcggagctccggagccgcagggctggatccactttatctgagacgaggcgcctgcggccgacggcggaaaacaccaaaggcacccgggggcggggcgacccgatgtggcggggaggagtaggagagaccaggattggcgggagcggtccaagggagtcaagccggggagggcgaaaagggaacctggccactgctccttggtccttggcattatgacgggattcccttgtcacctctgacagttcctggctgcggtgtccgcggactggctggggagtgatgacagaagggatggaaaccctattttcttttctccaagaccatggttggtctgcttccctcactcgggctccttgacagtcttctagaagagagaaggaggaaaagaagcagttcctgatgttacaaatgaacaaggatctcccagccttagtctttgagaaaagatggctgaaagagaggaactctccaagtcattccgcaaacaaatgcccatttaaacatcatccttgtcttgtgaagaaaacaggaagaatgtcatgtaccatgtggatcaccttcagttcaaagttgcagcaaagtgaagaaagaaactactggaagccacccagcaatgcactgtttagtcatcaattaggagcccatgggaggataatagggagactgggtggaggctcagtgtgtaataatctcttgtctaatgtatgtgtgtcactgccatgttgtatgaacaatagtgagggctcacatttacttaacacttgtgtgcgcaaatctgggtttttcttcctttccagaactatgactcgatcataaaatctgttttgtttgcatgcatgcccaaaacaaccctgtaagtagaacattgtcattatctctgttttagagatgaggaaacaggctcagagaagctcagaaatttgttcaagatcgcacagctagtaaatggcagaagtaggattgtgaacccagggaatctccagagcctctgtgtaaccatgatgttatattttttttcctctttaaaaacaaaatttaaaaccttgctataatctcttattaggaaatgatcatagtttctgactgtgctctgccttcccatcctgccaatctcctggactggcttggagaagacagggggcccccgagcttcatctgtgactcgaaggagtttgctgctgtctcctgtgtcagtgtcccatctatgcaggatcagcacaggacccccctcaccttcccacttacactctagcctttccatacattggaattctctcctggccctagccagcgctccacacctgttggtgtgccacctccctccctcttcccccactggccttgaacaggcaaaccccctaatgtcgccactaggttgggtccgtgactaggacacctgctagagggtctgtgcttgggccttttctaggaatcccgatgttactgggtaagtgccaactctgtgggcagaatgctaatgataatcctgttccctgacctctttctcagaagtaccctggctcactctccccaatctcagctttatagaacaacattttggtcttgattattcccatatcaagctgccccagggcttcggtaagctgttagttgccccactgcctcaaggctgggtctggctgagctacttcttaggcacacaaatagtgggtgtctccttggaacctgacacaaaactatcagtgctaccaagccttgtaaaatagggaggaaactaatatttcttgagtggcttctgagtgcctggtgctttcgcggctctctggagagattccttgccctgatggctttggtgtgtactcctctcccaggacttcagcactgagattttcccaaccccctggcttttcctcaccttgggttgagttgatccggcactaccacaaaccccaccatctgcaaaccaaccaagattaggcagtatgccctttccgtcttgcactgctcttccaaaacttccatctgtatttctcacaccctcagtaagcaaagctgagtgtgcatggacagagctgcatccactgctttctcccagcgggtgcagtctaatctgacacggggaacactaggagtttagcggaatcttcagccaccctattaatgtgttacgcattaggcattgtagtggaaactcctctgatggctcatgactatatgaacaggagcaatttggaatataacatgtcagctgtggactgggaagtgccgtgagagaaaacactacctgggtcataggcttgggtccctgaggcaacccagcagggacactgttgcccattcctctcatccagactgcaggtgtcttcctacacctccctgtcccatagcctccgtcctgttttttgtttgtttgtttttctttgtgaatgtagaaaaacatttcatcatgagccctagctcctcagttttccacctaacacccacattcccttgtttctaactgccgtgtttttctggagcctgctgggatctttgcagtttgcaggtcatagaatcagacatgaaaaggcttctcttccgacgtcattggttcctggctcctttacagatgagaacacaggtccagaggtgagaaatgactctagcagggtcatagaatttgttagtgcagctcaagatgggacttaaactcaggcctcctgatcacccattcccaggctaggaaacaggtctctgctcggtgtggtggttcatacctgtaatcgcaacactttgggaggctgaggcaggagcattgcttgagcccaggagttcgagaccagtctgagcaacatagtgggaccctgtctctacaaaaacttttaaaattagctgggcatggtggcacacatctgtattcccagctactcaggaagctgagacaggaggatcgcttgagcccaggagttggaggttactgagctatgatcgcaccactgcactccagcttggtgacagtgagaccctcaaaaaaaaaaagaaaagaaagaggtctctacacaagcccgtgattcttcatggcaagggataacatcagaaatgtttcattttctgctattagtttccattcctttccccatccaggcataaagagaaacaaaagacaatgatggtattctctgtgtcctcagctttggcacttttgttgatgttgctaaggagcagtgaccttgctaaaaagactgaataatccacccactgaatagctaacctggggaggaaatgaaaatttcctttgtggatctccccaaatccattgttgtcaccaggccctcccagaacctcctcagttccttcacagtgcaaccctgtgtacttggcccgcaacccaatagtattgtgcctcacttcaccttccatgggcaactgccctcccttctggacataaaacctcatattttaaataaagttgaaatatgaaaagaaagtatgtcataagatattcagaagtattgtgtgttttgggctaagggcagcaagagactcagaggcaagattccctccttgactcaatttcttggtcaccttgttttttgtgtgtgtgtgtccagaaaaatttaataagtttgcttaaattattataaagttgaaccactgaaatgttcactgaaacattttgacttgcattaatgctttacttccccacctacatttacattaaaaattcacacacaaatgaaaattgaaaactgacaacacctg

SEQ ID NO: 171097 - DNA, 3222 bp, Homo sapiens
  Payload ID: 13665
  Gene Symbol: PPP1R3E
  Gene Name: protein phosphatase 1, regulatory subunit 3E
  ENST ID: ENST00000558058
  CDS Start-End: 1-148
gggcgccctgctcttcgccttgcgctaccgtgtgacaggtcacgagttctgggacaacaacggcggccgtgactatgctctacgtgggcccgagcacccgggcagtggcggagctccggagccgcagggctggatccactttatctgagacgaggcgcctgcggccgacggcggaaaacaccaaaggaacctggccactgctccttggtccttggcattatgacgggattcccttgtcacctctgacagttcctggctgcggtgtccgcggactggctggggagtgatgacagaagggatggaaaccctattttcttttctccaagaccatggttggtctgcttccctcactcgggctccttgacagtcttctagaagagagaaggaggaaaagaagcagttcctgatgttacaaatgaacaaggatctcccagaaaacaggaagaatgtcatgtaccatgtggatcaccttcagttcaaagttgcagcaaagtgaagaaagaaactactggaagccacccagcaatgcactgtttagtcatcaattaggagcccatgggaggataatagggagactgggtggaggctcagtgtgtaataatctcttgtctaatgtatgtgtgtcactgccatgttgtatgaacaatagtgagggctcacatttacttaacacttgtgtgcgcaaatctgggtttttcttcctttccagaactatgactcgatcataaaatctgttttgtttgcatgcatgcccaaaacaaccctgtaagtagaacattgtcattatctctgttttagagatgaggaaacaggctcagagaagctcagaaatttgttcaagatcgcacagctagtaaatggcagaagtaggattgtgaacccagggaatctccagagcctctgtgtaaccatgatgttatattttttttcctctttaaaaacaaaatttaaaaccttgctataatctcttattaggaaatgatcatagtttctgactgtgctctgccttcccatcctgccaatctcctggactggcttggagaagacagggggcccccgagcttcatctgtgactcgaaggagtttgctgctgtctcctgtgtcagtgtcccatctatgcaggatcagcacaggacccccctcaccttcccacttacactctagcctttccatacattggaattctctcctggccctagccagcgctccacacctgttggtgtgccacctccctccctcttcccccactggccttgaacaggcaaaccccctaatgtcgccactaggttgggtccgtgactaggacacctgctagagggtctgtgcttgggccttttctaggaatcccgatgttactgggtaagtgccaactctgtgggcagaatgctaatgataatcctgttccctgacctctttctcagaagtaccctggctcactctccccaatctcagctttatagaacaacattttggtcttgattattcccatatcaagctgccccagggcttcggtaagctgttagttgccccactgcctcaaggctgggtctggctgagctacttcttaggcacacaaatagtgggtgtctccttggaacctgacacaaaactatcagtgctaccaagccttgtaaaatagggaggaaactaatatttcttgagtggcttctgagtgcctggtgctttcgcggctctctggagagattccttgccctgatggctttggtgtgtactcctctcccaggacttcagcactgagattttcccaaccccctggcttttcctcaccttgggttgagttgatccggcactaccacaaaccccaccatctgcaaaccaaccaagattaggcagtatgccctttccgtcttgcactgctcttccaaaacttccatctgtatttctcacaccctcagtaagcaaagctgagtgtgcatggacagagctgcatccactgctttctcccagcgggtgcagtctaatctgacacggggaacactaggagtttagcggaatcttcagccaccctattaatgtgttacgcattaggcattgtagtggaaactcctctgatggctcatgactatatgaacaggagcaatttggaatataacatgtcagctgtggactgggaagtgccgtgagagaaaacactacctgggtcataggcttgggtccctgaggcaacccagcagggacactgttgcccattcctctcatccagactgcaggtgtcttcctacacctccctgtcccatagcctccgtcctgttttttgtttgtttgtttttctttgtgaatgtagaaaaacatttcatcatgagccctagctcctcagttttccacctaacacccacattcccttgtttctaactgccgtgtttttctggagcctgctgggatctttgcagtttgcaggtcatagaatcagacatgaaaaggcttctcttccgacgtcattggttcctggctcctttacagatgagaacacaggtccagaggtgagaaatgactctagcagggtcatagaatttgttagtgcagctcaagatgggacttaaactcaggcctcctgatcacccattcccaggctaggaaacaggtctctgctcggtgtggtggttcatacctgtaatcgcaacactttgggaggctgaggcaggagcattgcttgagcccaggagttcgagaccagtctgagcaacatagtgggaccctgtctctacaaaaacttttaaaattagctgggcatggtggcacacatctgtattcccagctactcaggaagctgagacaggaggatcgcttgagcccaggagttggaggttactgagctatgatcgcaccactgcactccagcttggtgacagtgagaccctcaaaaaaaaaaagaaaagaaagaggtctctacacaagcccgtgattcttcatggcaagggataacatcagaaatgtttcattttctgctattagtttccattcctttccccatccaggcataaagagaaacaaaagacaatgatggtattctctgtgtcctcagctttggcacttttgttgatgttgctaaggagcagtgaccttgctaaaaagactgaataatccacccactgaatagctaacctggggaggaaatgaaaatttcctttgtggatctccccaaatccattgttgtcaccaggccctcccagaacctcctcagttccttcacagtgcaaccct

SEQ ID NO: 171098 - DNA, 1187 bp, Homo sapiens
  Payload ID: 13665
  Gene Symbol: PPP1R3E
  Gene Name: protein phosphatase 1, regulatory subunit 3E
  ENST ID: ENST00000559942
  CDS Start-End: 1-57
gagcacccgggcagtggcggagctccggagccgcagggctggatccactttatctgagacgaggcgcctgcggccgacggcggaaaacaccaaaggaacctggccactgctccttggtccttggcattatgacgggattcccttgtcacctctgacagttcctggctgcggtgtccgcggactggctggggagtgatgacagaatacatagcaccccaagcgtctggctggagccgaggatgggtcctccagtttttggcacagatgttccggagcccaggaagcatcccataaccaaccttcagccccaccgccacccccagcgtattccagagccgcttccaaaccacagcctatcctctgctccatttcactcttgtcctcacagactttcagcctccatgctctgagacaactgtggaagggatggaaaccctattttcttttctccaagaccatggttggtctgcttccctcactcgggctccttgacagtcttctagaagagagaaggaggaaaagaagcagttcctgatgttacaaatgaacaaggatctcccagccttagtctttgagaaaagatggctgaaagagaggaactctccaagtcattccgcaaacaaatgcccatttaaacatcatccttgtcttgtgaagaaaacaggaagaatgtcatgtaccatgtggatcaccttcagttcaaagttgcagcaaagtgaagaaagaaactactggaagccacccagcaatgcactgtttagtcatcaattaggagcccatgggaggataatagggagactgggtggaggctcagtgtgtaataatctcttgtctaatgtatgtgtgtcactgccatgttgtatgaacaatagtgagggctcacatttacttaacacttgtgtgcgcaaatctgggtttttcttcctttccagaactatgactcgatcataaaatctgttttgtttgcatgcatgcccaaaacaaccctgtaagtagaacattgtcattatctctgttttagagatgaggaaacaggctcagagaagctcagaaatttgttcaagatcgcacagctagtaaatggcagaagtaggattgtgaacccagggaatctccagagcctctgtgtaaccatgatgttatattttttttcctctttaaaaacaaaatttaaaaccttgctataa

SEQ ID NO: 171099 - DNA, 932 bp, Homo sapiens
  Payload ID: 13665
  Gene Symbol: PPP1R3E
  Gene Name: protein phosphatase 1, regulatory subunit 3E
  ENST ID: ENST00000560913
  CDS Start-End: 1-90
aacggcggccgtgactatgctctacgtgggcccgagcacccgggcagtggcggagctccggagccgcagggctggatccactttatctgagacgaggcgcctgcggccgacggcggaaaacaccaaagggatggaaaccctattttcttttctccaagaccatggttggtctgcttccctcactcgggctccttgacagtcttctagaagagagaaggaggaaaagaagcagttcctgatgttacaaatgaacaaggatctcccagccttagtctttgagaaaagatggctgaaagagaggaactctccaagtcattccgcaaacaaatgcccatttaaacatcatccttgtcttgtgaagaaaacaggaagaatgtcatgtaccatgtggatcaccttcagttcaaagttgcagcaaagtgaagaaagaaactactggaagccacccagcaatgcactgtttagtcatcaattaggagcccatgggaggataatagggagactgggtggaggctcagtgtgtaataatctcttgtctaatgtatgtgtgtcactgccatgttgtatgaacaatagtgagggctcacatttacttaacacttgtgtgcgcaaatctgggtttttcttcctttccagaactatgactcgatcataaaatctgttttgtttgcatgcatgcccaaaacaaccctgtaagtagaacattgtcattatctctgttttagagatgaggaaacaggctcagagaagctcagaaatttgttcaagatcgcacagctagtaaatggcagaagtaggattgtgaacccagggaatctccagagcctctgtgtaaccatgatgttatattttttttcctctttaaaaacaaaatttaaaaccttgctataatctcttattaggaaatgatcatagtttctgactgtgctctg

SEQ ID NO: 171100 - DNA, 690 bp, Homo sapiens
  Payload ID: 13665
  Gene Symbol: PPP1R3E
  Gene Name: protein phosphatase 1, regulatory subunit 3E
  ENST ID: ENST00000561437
  CDS Start-End: 1-40
cggagctccggagccgcagggctggatccactttatctgagacgaggcgcctgcggccgacggcggaaaacaccaaaggaacctggccactgctccttggtccttggcattatgacgggattcccttgtcacctctgacagttcctggctgcggtgtccgcggactggctggggagtgatgacagactttcagcctccatgctctgagacaactgtggaagggatggaaaccctattttcttttctccaagaccatggttggtctgcttccctcactcgggctccttgacagtcttctagaagagagaaggaggaaaagaagcagttcctgatgttacaaatgaacaaggatctcccagccttagtctttgagaaaagatggctgaaagagaggaactctccaagtcattccgcaaacaaatgcccatttaaacatcatccttgtcttgtgaagaaaacaggaagaatgtcatgtaccatgtggatcaccttcagttcaaagttgcagcaaagtgaagaaagaaactactggaagccacccagcaatgcactgtttagtcatcaattaggagcccatgggaggataatagggagactgggtggaggctcagtgtgtaataatctcttgtctaatgtatgtgtgtcactgccatgttgtatgaacaatagtgagggctcacatttacttaa

SEQ ID NO: 171101 - DNA, 2351 bp, Homo sapiens
  Payload ID: 13665
  Gene Symbol: PPP1R3E
  Gene Name: protein phosphatase 1, regulatory subunit 3E
  ENST ID: ENST00000559314
  CDS Start-End: 1-104
agttctgggacaacaacggcggccgtgactatgctctacgtgggcccgagcacccgggcagtggcggagctccggagccgcagggctggatccactttatctgagacgaggcgcctgcggccgacggcggaaaacaccaaaggaacctggccactgctccttggtccttggcattatgacgggattcccttgtcacctctgacagttcctggctgcggtgtccgcggactggctggggagtgatgacagaagggatggaaaccctattttcttttctccaagaccatggttggtctgcttccctcactcgggctccttgacagtcttctagaagagagaaggaggaaaagaagcagttcctgatgttacaaatgaacaaggatctcccagaactatgactcgatcataaaatctgttttgtttgcatgcatgcccaaaacaaccctgaaatgatcatagtttctgactgtgctctgccttcccatcctgccaatctcctggactggcttggagaagacagggggcccccgagcttcatctgtgactcgaaggagtttgctgctgtctcctgtgtcagtgtcccatctatgcaggatcagcacaggacccccctcaccttcccacttacactctagcctttccatacattggaattctctcctggccctagccagcgctccacacctgttggtgtgccacctccctccctcttcccccactggccttgaacaggcaaaccccctaatgtcgccactaggttgggtccgtgactaggacacctgctagagggtctgtgcttgggccttttctaggaatcccgatgttactgggtaagtgccaactctgtgggcagaatgctaatgataatcctgttccctgacctctttctcagaagtaccctggctcactctccccaatctcagctttatagaacaacattttggtcttgattattcccatatcaagctgccccagggcttcggtaagctgttagttgccccactgcctcaaggctgggtctggctgagctacttcttaggcacacaaatagtgggtgtctccttggaacctgacacaaaactatcagtgctaccaagccttgtaaaatagggaggaaactaatatttcttgagtggcttctgagtgcctggtgctttcgcggctctctggagagattccttgccctgatggctttggtgtgtactcctctcccaggacttcagcactgagattttcccaaccccctggcttttcctcaccttgggttgagttgatccggcactaccacaaaccccaccatctgcaaaccaaccaagattaggcagtatgccctttccgtcttgcactgctcttccaaaacttccatctgtatttctcacaccctcagtaagcaaagctgagtgtgcatggacagagctgcatccactgctttctcccagcgggtgcagtctaatctgacacggggaacactaggagtttagcggaatcttcagccaccctattaatgtgttacgcattaggcattgtagtggaaactcctctgatggctcatgactatatgaacaggagcaatttggaatataacatgtcagctgtggactgggaagtgccgtgagagaaaacactacctgggtcataggcttgggtccctgaggcaacccagcagggacactgttgcccattcctctcatccagactgcaggtgtcttcctacacctccctgtcccatagcctccgtcctgttttttgtttgtttgtttttctttgtgaatgtagaaaaacatttcatcatgagccctagctcctcagttttccacctaacacccacattcccttgtttctaactgccgtgtttttctggagcctgctgggatctttgcagtttgcaggtcatagaatcagacatgaaaaggcttctcttccgacgtcattggttcctggctcctttacagatgagaacacaggtccagaggtgagaaatgactctagcagggtcatagaatttgttagtgcagctcaagatgggacttaaactcaggcctcctgatcacccattcccaggctaggaaacaggtctctgctcggtgtggtggttcatacctgtaatcgcaacactttgggaggctgaggcaggagcattgcttgagcccaggagttcgagaccagtctgagcaacatagtgggaccctgtctctacaaaaacttttaaaattagctgggcatggtggcacacatctgtattcccagctactcaggaagctgagacaggaggatcgcttgagcccaggagttggaggttactgagctatgatcgcaccactgcactccagcttggtgacagtgagaccctc

SEQ ID NO: 171102 - DNA, 3421 bp, Homo sapiens
  Payload ID: 13666
  Gene Symbol: PPP1R3F
  Gene Name: protein phosphatase 1, regulatory subunit 3F
  Uniprot ID: Q6ZSY5
  ENST ID: ENST00000055335
  CDS Start-End: 17-2416
cgccgccgccgccgatatggcgcgtacggcccctgtggagcccccgctgcggcattccgcgcccccctcgccggccgcgggtgagccccgcacctcggtcgaggcggcggtggccccgcggagggtgctgttcgccgacgaggccttggggctgccgctggcgcagttgcgccgctaccggccgtggggcgggcccggggcgggcaagatggcggcggcggccgggcaagatggcggcggcggcggcggggccgacgaggacgacgatggcgaggatggggatgaaggggaggaggaagaggaggcttgccccgagccctcaccgctgtgccccgtccccgctggcggggggttttacctggtccccacattttcgctgccgcccgcgccgggccgtctggagcgcttggggcgcgtcatggtggagctggaggcgctgctgccgcctcccggagcggtccccgggggtgccggggtgtgggtgcctgggggccgcccgccggtgctgcgcgggttggtacgcgtgctgaaccgctccttcgagaaggcggtgcacgtgcgggcctcacacgacggctgggcttccttttgcgaccacccagcgcgctacgtcccgcgcagcccgccgtgggcaggagcgggaggaacaggagcaggagatcccatcctggatccggggctcggcctgggtcccggccaggcatccgcctcctcgcccgacgacggcggccgcaccgaccgctttgccttccagctgccctttgctgagggcgcgggcgatggggcgcgcctcgacttcgtggtgcgctatgagacccctgagggcactttctgggccaacaaccacggccgcaactacacagtcctgctccggatcgcacccgctcccacacccactgatgccgaagggctgccccagcagcagcagctgccgcagctggagccacagcccgagtgccagggtcccgtggaggctgaggccaggcagctgaagagctgcatgaagccggtgaggcgcaggcctgccgaggaggaactgaagacgaagaacatggatgataacacctttgccatggcagagcatcctgatgtccaggagtcagtgggtccactggtagcccccacccctctccgtccatggccccagatgacacttcaggtttctgacgttccgatgactggcaaccccgcagaagaaggtgatgtccccagaagcagtccacctgtggcttttacagaggtcctccaggcaccggccatcaggattcccccctcctcccctctctgtggcctgggtggctcccccagagaccaggcctcagggcccgatgcgagcgagggggccaccgggcctttcctggagcccagtcagcagcaggcagaggccacatggggagtatcgagtgagaatggaggggggctggaggctgtgagtgggtcagaggagctgctcggtgaggacaccatcgaccaggagctggagcagctctacctgtctcacctgagccgcctacgggctgctgtggctgcgggtggggcagggggtggtggggagggctccacagatggagggatgtcccccagccatcccctgggcatactgacggaccgcgacctgatcttgaagtggcctggccctgagcgggccctgaacagcgccctggctgaggagatcacgctgcactatgcccggctggggcgtggcgtggagctcatcaaggacaccgaagaccctgatgatgaaggggagggtgaagaggggctctctgtcacaccctccagcccagaaggggacagccccaaggaatcgcctccagaaatcctctccggggcccgttctgtggtagccacgatgggagatgtgtggctcccatgggcagagggctcaggatgtgacggccctgtggttctgggtacagagggtcagttcattggggatcctgagaaagggatgggcaaggacaccagctctttgcacatgaatagggtgatagctggggtgactgagtccctgggggaggccgggacagaagcccagatagaggtcaccagtgagtgggcaggcagcttggatcccatatctggcaaggagccagcctctcccgtccttctgcaggggcaaaatcccaccctcctcagtcccttgggggccgaagtctgtctctctagtgtagccaggcctcatgtgagctcccaggatgaaaaggatgcaggcccaagccttgaacccccaaagaagtctcccaccctagcagtccctgcagaatgtgtgtgtgcactgcctcctcagctccgggggcccttgacccagactctgggggtcctggccgggctagtggtggtccctgtggctctgaacagcggtgtgtccctcctggtgcttgcgctgtgcctctctctggcttggttctcataggctctgcttgtgggatcagcagaggcttaagatgggatacatggcctgtgcagtgaggggacctgggtcctttgcttctgagaatgctcaactgaaagagaggccttctcatccccaagctctccagtcaacacagggctccctgtggtgacaccagtggagatgagggaacgggtagatggtgtgagtgaggggaacttttagagtggaactgggcatgtcctccgcctaccccccgagcctgtatttatttttgtataattctctggatgagggagagtggtcgtgagctggtcttggggcacaattacccagagatatatttattaacagccaacctgtgcaacctgctggagctttatttttaatttaatttatatagagtacctattattatatgccacaatagagctctatgagaaacagtgtcttgcggtgtagtgttctcctgtttgggcatgagtgtgcagggtggtcactttctgtgggaggatcacagtggggagttgggggtgggacgtggtcgcctgctgctgcttcaacatgtctttccttgaagatgtgtgtctcctcgtctcgtggtcctaatccatatggttctttgtcttttccacattctgcctgtgggaccctacaggtgtgtatttggatggtggtggtgggagccagggaggaagagtggcagccacatgagggtttggtgtcagtcacatggttgcagtggtagctgtggtctcctgtggatgtggggacatcagttgtgaatcagccacaaggttttgaggttactgaaaaaacagcctttgacaccagcagggagaccccttagtccctgagataaggaaggcctcagaaaggaaagaggagttaatgtactgcagtacttggtagcacagttgctgtccacagacatcacatttctactaaaaacaggaagcccagaagctttgaaagaaagatatatatttattgcatgcaaataaaaaactgctcaacaaaataaaa

SEQ ID NO: 171103 - DNA, 2443 bp, Homo sapiens
  Payload ID: 13666
  Gene Symbol: PPP1R3F
  Gene Name: protein phosphatase 1, regulatory subunit 3F
  Uniprot ID: Q6ZSY5
  ENST ID: ENST00000376188
  CDS Start-End: 662-2023
acctcaagtggtctccctgcctcggcctcccaaagtgctggaattacaggtgtaagccaccacgcccagccgaaaagatgggttcttctatcttttctctttccatagccaggaatgtatcctaaagaaatgatacaagtgtcgataaaactatgcccaatgctgtttgctggtttgctttgcaacctctaaatgaaagaacttagctgctcagtaggaagggaatggtatgatatgagtattaagcagccatttgaaatgtttgcaaaagtgtataatgatgtttcttactgttaaatggacaaagctagctgtgaaattatgtctgtagaatctaaatgatttcgtagaatatctggaaggaaattttccagaatggtaacagtagttgtctctggctgatgtgtgattgtttttcttgcttctttagactttcctgtattttgcgaattttctataatgaggctgtaggacttttaggatgaggggataaacaaaggcagcagaagagaaaacagcagctgtcaggtgaaggtgggctagcacagaggctcagaaggtgccagtgggtggcagaagtgacctctcagggtattattagatccatgtactctctcctctgccctgcaggcctgccgaggaggaactgaagacgaagaacatggatgataacacctttgccatggagcatcctgatgtccaggagtcagtgggtccactggtagcccccacccctctccgtccatggccccagatgacacttcaggtttctgacgttccgatgactggcaaccccgcagaagaaggtgatgtccccagaagcagtccacctgtggcttttacagaggtcctccaggcaccggccatcaggattcccccctcctcccctctctgtggcctgggtggctcccccagagaccaggcctcagggcccgatgcgagcgagggggccaccgggcctttcctggagcccagtcagcagcaggcagaggccacatggggagtatcgagtgagaatggaggggggctggaggctgtgagtgggtcagaggagctgctcggtgaggacaccatcgaccaggagctggagcagctctacctgtctcacctgagccgcctacgggctgctgtggctgcgggtggggcagggggtggtggggagggctccacagatggagggatgtcccccagccatcccctgggcatactgacggaccgcgacctgatcttgaagtggcctggccctgagcgggccctgaacagcgccctggctgaggagatcacgctgcactatgcccggctggggcgtggcgtggagctcatcaaggacaccgaagaccctgatgatgaaggggagggtgaagaggggctctctgtcacaccctccagcccagaaggggacagccccaaggaatcgcctccagaaatcctctccggggcccgttctgtggtagccacgatgggagatgtgtggctcccatgggcagagggctcaggatgtgacggccctgtggttctgggtacagagggtcagttcattggggatcctgagaaagggatgggcaaggacaccagctctttgcacatgaatagggtgatagctggggtgactgagtccctgggggaggccgggacagaagcccagatagaggtcaccagtgagtgggcaggcagcttggatcccatatctggcaaggagccagcctctcccgtccttctgcaggggcaaaatcccaccctcctcagtcccttgggggccgaagtctgtctctctagtgtagccaggcctcatgtgagctcccaggatgaaaaggatgcaggcccaagccttgaacccccaaagaagtctcccaccctagcagtccctgcagaatgtgtgtgtgcactgcctcctcagctccgggggcccttgacccagactctgggggtcctggccgggctagtggtggtccctgtggctctgaacagcggtgtgtccctcctggtgcttgcgctgtgcctctctctggcttggttctcataggctctgcttgtgggatcagcagaggcttaagatgggatacatggcctgtgcagtgaggggacctgggtcctttgcttctgagaatgctcaactgaaagagaggccttctcatccccaagctctccagtcaacacagggctccctgtggtgacaccagtggagatgagggaacgggtagatggtgtgagtgaggggaacttttagagtggaactgggcatgtcctccgcctaccccccgagcctgtatttatttttgtataattctctggatgagggagagtggtcgtgagctggtcttggggcacaattacccagagatatatttattaacagccaacctgtgcaacctgctggagctttatttttaatttaatttatatagagtacctattattatatgccacaatagagctctatgag

SEQ ID NO: 171104 - DNA, 1537 bp, Homo sapiens
  Payload ID: 13666
  Gene Symbol: PPP1R3F
  Gene Name: protein phosphatase 1, regulatory subunit 3F
  Uniprot ID: Q6ZSY5
  ENST ID: ENST00000495799
  CDS Start-End: 96-1457
atggcgcgtacggcccctgtggagcccccgctgcggcattccgcgcccccctcgccggccgcgggcctgccgaggaggaactgaagacgaagaacatggatgataacacctttgccatggagcatcctgatgtccaggagtcagtgggtccactggtagcccccacccctctccgtccatggccccagatgacacttcaggtttctgacgttccgatgactggcaaccccgcagaagaaggtgatgtccccagaagcagtccacctgtggcttttacagaggtcctccaggcaccggccatcaggattcccccctcctcccctctctgtggcctgggtggctcccccagagaccaggcctcagggcccgatgcgagcgagggggccaccgggcctttcctggagcccagtcagcagcaggcagaggccacatggggagtatcgagtgagaatggaggggggctggaggctgtgagtgggtcagaggagctgctcggtgaggacaccatcgaccaggagctggagcagctctacctgtctcacctgagccgcctacgggctgctgtggctgcgggtggggcagggggtggtggggagggctccacagatggagggatgtcccccagccatcccctgggcatactgacggaccgcgacctgatcttgaagtggcctggccctgagcgggccctgaacagcgccctggctgaggagatcacgctgcactatgcccggctggggcgtggcgtggagctcatcaaggacaccgaagaccctgatgatgaaggggagggtgaagaggggctctctgtcacaccctccagcccagaaggggacagccccaaggaatcgcctccagaaatcctctccggggcccgttctgtggtagccacgatgggagatgtgtggctcccatgggcagagggctcaggatgtgacggccctgtggttctgggtacagagggtcagttcattggggatcctgagaaagggatgggcaaggacaccagctctttgcacatgaatagggtgatagctggggtgactgagtccctgggggaggccgggacagaagcccagatagaggtcaccagtgagtgggcaggcagcttggatcccatatctggcaaggagccagcctctcccgtccttctgcaggggcaaaatcccaccctcctcagtcccttgggggccgaagtctgtctctctagtgtagccaggcctcatgtgagctcccaggatgaaaaggatgcaggcccaagccttgaacccccaaagaagtctcccaccctagcagtccctgcagaatgtgtgtgtgcactgcctcctcagctccgggggcccttgacccagactctgggggtcctggccgggctagtggtggtccctgtggctctgaacagcggtgtgtccctcctggtgcttgcgctgtgcctctctctggcttggttctcataggctctgcttgtgggatcagcagaggcttaagatgggatacatggcctgtgcagtgaggggacctgggtcctttgcttctg

SEQ ID NO: 171105 - DNA, 503 bp, Homo sapiens
  Payload ID: 13666
  Gene Symbol: PPP1R3F
  Gene Name: protein phosphatase 1, regulatory subunit 3F
  ENST ID: ENST00000471261
  CDS Start-End: 1-485
agggcgcgggcgatggggcgcgcctcgacttcgtggtgcgctatgagacccctgagggcactttctgggccaacaaccacggccgcaactacacagtcctgctccggatcgcacccgctcccacacccactgatgccgaagggctgccccagcagcagcagctgccgcagctggagccacagcccgagtgccagggtcccgtggaggctgaggccaggcagctgaagagctgcatgaagccggtgaggcgcaggcctgccgaggaggaactgaagacgaagaacatggatgataacacctttgccatggcagagcatcctgatgtccaggagtcagtgggtccactggtagcccccacccctctccgtccatggccccagatgacacttcaggtgaaaagcaatcacggagttaaaagaagacaagctgaaatgatgcaggctgctcctatgttggaaatttgttcattaaaattctcccaataaagctttacagccttctgc

SEQ ID NO: 171106 - DNA, 1885 bp, Homo sapiens
  Payload ID: 13666
  Gene Symbol: PPP1R3F
  Gene Name: protein phosphatase 1, regulatory subunit 3F
  Uniprot ID: Q6ZSY5
  ENST ID: ENST00000466508
  CDS Start-End: 389-1750
gccgtcggtgccgccgccgccgccgatatggcgcgtacggcccctgtggagcccccgctgcggcattccgcgcccccctcgccggccgcggctgccctttgctgagggcgcgggcgatggggcgcgcctcgacttcgtggtgcgctatgagacccctgagggcactttctgggccaacaaccacggccgcaactacacagtcctgctccggatcgcacccgctcccacacccactgatgccgaagggctgccccagcagcagcagctgccgcagctggagccacagcccgagtgccagggtcccgtggaggctgaggccaggcagctgaagagctgcatgaagccggtgaggcgcaggcctgccgaggaggaactgaagacgaagaacatggatgataacacctttgccatggagcatcctgatgtccaggagtcagtgggtccactggtagcccccacccctctccgtccatggccccagatgacacttcaggtttctgacgttccgatgactggcaaccccgcagaagaaggtgatgtccccagaagcagtccacctgtggcttttacagaggtcctccaggcaccggccatcaggattcccccctcctcccctctctgtggcctgggtggctcccccagagaccaggcctcagggcccgatgcgagcgagggggccaccgggcctttcctggagcccagtcagcagcaggcagaggccacatggggagtatcgagtgagaatggaggggggctggaggctgtgagtgggtcagaggagctgctcggtgaggacaccatcgaccaggagctggagcagctctacctgtctcacctgagccgcctacgggctgctgtggctgcgggtggggcagggggtggtggggagggctccacagatggagggatgtcccccagccatcccctgggcatactgacggaccgcgacctgatcttgaagtggcctggccctgagcgggccctgaacagcgccctggctgaggagatcacgctgcactatgcccggctggggcgtggcgtggagctcatcaaggacaccgaagaccctgatgatgaaggggagggtgaagaggggctctctgtcacaccctccagcccagaaggggacagccccaaggaatcgcctccagaaatcctctccggggcccgttctgtggtagccacgatgggagatgtgtggctcccatgggcagagggctcaggatgtgacggccctgtggttctgggtacagagggtcagttcattggggatcctgagaaagggatgggcaaggacaccagctctttgcacatgaatagggtgatagctggggtgactgagtccctgggggaggccgggacagaagcccagatagaggtcaccagtgagtgggcaggcagcttggatcccatatctggcaaggagccagcctctcccgtccttctgcaggggcaaaatcccaccctcctcagtcccttgggggccgaagtctgtctctctagtgtagccaggcctcatgtgagctcccaggatgaaaaggatgcaggcccaagccttgaacccccaaagaagtctcccaccctagcagtccctgcagaatgtgtgtgtgcactgcctcctcagctccgggggcccttgacccagactctgggggtcctggccgggctagtggtggtccctgtggctctgaacagcggtgtgtccctcctggtgcttgcgctgtgcctctctctggcttggttctcataggctctgcttgtgggatcagcagaggcttaagatgggatacatggcctgtgcagtgaggggacctgggtcctttgcttctgagaatgctcaactgaaagagaggccttctcatccccaagctctccagtcaacaca

SEQ ID NO: 171107 - DNA, 4907 bp, Homo sapiens
  Payload ID: 13667
  Gene Symbol: PPP1R3G
  Gene Name: protein phosphatase 1, regulatory subunit 3G
  Uniprot ID: B7ZBB8
  ENST ID: ENST00000405617
  CDS Start-End: 906-1982
ggcctccggccgctctcggctgcgggccatggccgctccccggcgcgtccccacacggtccccgccccagtctggccgcagcccaccccgcgccgccactgggcagatgggggcggcggctcctgcctcccggctttcggaagagcagagcggagcgcgcctgaccgagtcaggcttccgagtgggattggaacccggggcgccctgaagtttggggaaagcaggagcagaagggaagggatgcgctccccgctctccggcggcgcggaatgggcctccttccagcctctgcgtaggcaagatttccccagttgcgcgctgcaccggggactccccagcccgtgaggcagccaagaggagagcgctcagtgaccctctgggggcagagccgtcaggccaagttcatgggcaggaagactttgtgcacgtgggggtctctgaaggttgagcgcgagctctgcacccccacttcgaggcactcaagaagcggaacagacgcgagccccgccgggggtgcgggtgagggctgcagggagcccgcgaacgacagaaagtcgccccccgcattccaccggagcactcgggaacacggcttccaggtgtcccagcggccgcgcctccccgcccccggccctcccccgtcgcgggcaggttcaaccgggaggcggcgtggccccggagccggccccaggcccgcatcctcctcccacttcgccctgggcagccgcagctaaaagccggaggctccaaagtggaactacgttgtcttgtcgagcctggggcgactcgcctcggggagggcgagcctgaactgcagccctgcgctccttccacggcccgaggagttagttaagtctccagaggggcccggttcggcccgagcaagtccaggggcgaacggcgtcatggagcccataggggcgcggctaagtttggaggcgccgggaccagcgcccttccgagaggccccgccggccgaggagctgcccgccccggtggtcccctgtgtgcagggtggcggcgacggcggtggcgcttcggagaccccgagtcctgacgctcagctaggggataggcccctgtccccgaaggaagaggccgccccccaggagcaggaggagctgctggaatgccgccgccgctgccgcgcgcgctccttttccttgcccgccgaccccatcttgcaggcggccaagttcctgcagcagcagcagcaacaggcggtggcactgggcggcgagggggcggaggacgcacagctcggcccgggcggctgctgcgccaagtgcaagaagcgggtgcagttcgcggacacgctggggctaagcctggccagcgtgaagcacttcagcgaggcggaggagccgcaggtgccgcccgccgtgctctcgcgcctccgaagcttccctatgcgtgccgaggacctggagcagctcggggggctgctggccgcggcggcagtggccgcgcccctttcagcgccgccttcccggctccggccgctcttccagctcccggggccgagcgccgcggccgagcgtctgcagcggcagcgcgtgtgcctggagcgcgtgcagtgctcgacggcctcgggcgctgaggtgaagggctccggccgggtgctcagctgccctgggcccagggccgtgaccgtgcgctacacctttaccgagtggcgctccttcctggacgtgccggctgagctgcagcccgagccgctggagccacagcagccagaggcaccgtctggggcctccgagccagggtccggggatgccaagaaagagccaggcgccgagtgcttccacttctcgctgtgcctgcccccgggcctgcagcctgaggacgaagaggacgccgacgagcgcggcgtcgcggtccacttcgctgtctgctaccgctgcgcgcagggcgagtactgggacaacaacgcgggcgccaactacacgctgcgctacgcgcgccctgcggacgcgctctgagcctggagagtttcgaagagccgtggggcggggttgattagcacgtggagctcgggctgccgcctcaaggaacttgctgggacgctttgctgagcgtggcgagtctggcgtgaggggcgcgtggagggaaaggagggagactttgaaccgtcgactcgcacccccgcagacaagtgagcgagcttagagagcccgggcaatgctccgaaagcctctgacctcagtcttctcgtccgtttgaccttcctacaaggcctctagaattcccagcctgcgtcagaataggaagaaacttccaaggcccggagcagctgcctccaagaaaaaggctcccaactcccgggcatggttctaaggccttgggattggtttttaactctaaatatcatattgtagcccttgcagtttgctggagacccctagggaaagaacaaagcgtcctgccacggtgcaccagaggaaggtgccacggactgtgggtgcacgcgtgggacctttacaccccaacctatttctcagagaaaacccttcggggctgggccaggccacccttttcttttgactgagatgtgggtaatgtgtgcccagacttgacgttgtttattgtgcgacattgtgtacaaatgtcctttataaaagtaaaggccactcgcacccccttttacgctgtactctgaattttggctttcgtgagtttggggaggcattggcagtcggccgatctttgtcagctgatgatgtgcgcactttaacaatccttaaacaacagcctacaaattcctccccttcgttccttcctctctactgcgaaagggcccaaacttcccatgtgctttaaaatgttctgtagaaagtgttccgtccccctccgaattaagacgtttggtgaattgaaatgccagtcctcgggcaggccctggctgtgatctgcgagagccgggcacgcacgccccggcgccctttgtgtaggcagagcacactgttaggagacttgccgggccattagcagtcagagaagctgggcccttttagtcgctggactgccagcgcaggggatgggggatgggaaagtggctttctgttcctctcagagccacagtggggagtggtgacttgatggaagaggaggcatgcccagcgagtcagtgctgcgcagacgcagatggccacctctgcaggcccgttgggtggggtatggacggccttggtcgctgtgctggctgtggatgccaggatgatgtggccctctgtgcatgggtgggcaggagggcatcccgagtaaggtctgtcgccccttgactctgcctcagtgatttccctttttttaagtcttcccattttccagcacatggcgagtacagtcagtcgttttagggatggtagtctctaaggagggacagtttcactgttgcttgatagaacagggctgggcatacgtacatttggcccatgggccaaatttggcacacagcttattcttgtagggcctgtgacctaagaatagtttttacatttttatttttaatttaattttcttattattatttttcgagacggagtttcactcttgtcgcccaggctggagtgcaatgtgcgatcttggctcattgcaacctccgcctcccaggttcaagcgattctcctgcctcagcctccagagtagttgggagtacaggcatctgccaccacacctggctaatttttgtatttttggtagagacagggtttcaccatgttggccaggctagtcttgaactcctgacctcaggtgatccacccgccttggcctcccaaagtgctaggattataggcgtgagccacctcacctggccttacatttttaaattgttgaaaaaaattcaaaagaaagtactatttggtggcacgtgagaattatataaaatatatatttcagtgttcacaaatcaggttttactggaacacagccgtgcacactcatttctgtcttctctgtgctgcttccatgctaccgcagcagagtggagtagacacagcagagaccagatggcaaagtgtaaaatatttactatctggcccttttacaaaaggctggccaacccctgctctagggaagtagtgttttttaaacacaatatgctgacaattatagttaataaagcatttagactttagtgagcttttgccacttgaaataaaccccctttgggtaaaggtaaagctttatatgactctcagtaatcttgtttagaataaacacgaaaatgtgaaaagtgcggttatcattgtgtcaggcaggggaatctacctgttgccttctttcacctaaaaaaatagtaacacatcagtgcaactgaaacatagcacccgtttgaattggcttcaaactacaaagctgccagatatttctctgtgcttcaaaatgtggcatcttacacaatggaagtatttagtttgaactttgggttggagatatccctttgactatggcagtgtttcccaaagtaaactgatcataggaaaaaaataatttattgacagcaagccatcaggagttaacatattacaatttagacttttaaaaatggtcaatggtcatatcaatgaactaatgaatacttaattcatatatgcttataaaaactttgacgaaaaataaatgataaaatgaaacaatttttctgttactaaatataaaagctatgaagccttctgatgcatcatcaggtaatcttggtctgatataccatttcttaaaagtacattattgcataaccatatttttccgatatatttataaatacattaatttttaagatattgacagtatacatatgctataacattgtttgaaaatgcttgtttgtggggcaataaagcaacattttgaattgttttgaattacttaaaattaaatgaggagcccaatataatgattcaaacaga

SEQ ID NO: 171108 - DNA, 1084 bp, Homo sapiens
  Payload ID: 13668
  Gene Symbol: PPP1R42
  Gene Name: protein phosphatase 1, regulatory subunit 42
  Uniprot ID: Q7Z4L9
  ENST ID: ENST00000324682
  CDS Start-End: 146-832
gggacccggcgccgatgaaaccgaccaaactggagttagctaccggactgtcccgcgagcgaaagttggaaataatacctaaacctacttcttgacatggtgtcaaaacagagcttttgctgagagtttgatttataaagaaattatggttcgactgaccttggatctaattgccagaaacagcaatcttaaaccccgaaaagaagaaaccatttcacagtgcctgaagaaaataactcatataaatttttcagacaaaaatatagatgcaattgaagacctctctctttgcaaaaatcttagtgttttatatttatatgataattgtattagtcaaatcactaacctgaattatgccacaaatctgacccacttgtacctacaaaacaattgtatttcatgtatagagaacctcaggtcattaaagaaactggaaaaactgtatctgggaggcaattacattgctgtcatagaaggtttagaaggattaggagaactaagagagcttcatgttgagaatcagaggcttccccttggggaaaagcttctgtttgatccaagaactcttcattctctggcaaaatccctctgtatattgaatatcagcaataataatattgatgacattacagacttagaactactagagaatcttaatcagctcatagccgttgacaaccaacttctgcatgtgaaggatttggagtttttactgaacaagttgatgaagctgtggaaaattgatctaaatggaaatcctgtttgtctcaaaccaaaatacagggacagactgatattggtgtccaaatcactgggtacatatttatattaatataatttttaagagaatgacacctagttaactttttggttattttaccagcaagctttcagaaatataaatctgacatctggatctgtgaaaattgtcaactttaaattcaatattttgaataagagcaaaagttaaaattgacaaataaagcatgaaaaacatctgctgttcagaagtaattaaagcacctgatacttattccttaaggaggatattttgctattaccaataaaaatggttagtcataaa

SEQ ID NO: 171109 - DNA, 1282 bp, Homo sapiens
  Payload ID: 13668
  Gene Symbol: PPP1R42
  Gene Name: protein phosphatase 1, regulatory subunit 42
  ENST ID: ENST00000522909
  CDS Start-End: 186-1115
ggctgtactttgcattttgaagagtctaagaatacattccatatcttcaaatattttattgtgggcaatttataataacatagcctgggtaatgccaatgtaaagttggaaataatacctaaacctacttcttgacatggtgtcaaaacagagcttttgctgagagtttgatttataaagaaattatggttcgactgaccttggatctaattgccagaaacagcaatcttaaaccccgaaaagaagaaaccatttcacagtgcctgaagaaaataactcatataaatttttcagacaaaaatatagatgcaattgaagacctctctctttgcaaaaatcttagtgttttatatttatatgataattgtattagtcaaatcactaacctgaattatgccacaaatctgacccacttgtacctacaaaacaattgtatttcatgtatagagaacctcaggtcattaaagaaactggaaaaactgtatctgggaggcaattacattgctgtcatagaaggtttagaaggattaggagaactaagagagcttcatgttgagaatcagaggcttccccttggggaaaagcttctgtttgatccaagaactcttcattctctggcaaaatccctctgtatattgaatatcagcaataataatattgatgacattacagacttagaactactagagaatcttaatcagctcatagccgttgacaaccaacttctgcatgtgaaggatttggagtttttactgaacaagttgatgaagctgtggaaaattgatctaaatggaaatcctgtttgtctcaaaccaaaatacagggacagactgatattggtgtccaaatcactggaatttcttgatggaaaagaaattaaaaatatagaaagacaattcctaatgaattggaaagcatccaaagatgccaagaaaatcagcaaaaaaaggagcagtaaaaatgaggatgcaagcaattcactcataagtaacttcaaaacaatgcatcatatagttcctgtttattacccacaggtgggtaagccaaaattagcctttttctctgaaatacagagataccctgtaaatgcaaatgcatctccagaaagttcctgagaagattacactaaaattatttaagagatggggaatctctctttgaagcaatctgaaagcttgctgacaaaaaatgatgtgcatgaacctcacctcttccataacccagaagaaaaagaaaatttgtttgtggaaaatgagtaaattcagcctcaagtgacaggaaa

SEQ ID NO: 171110 - DNA, 2386 bp, Homo sapiens
  Payload ID: 13669
  Gene Symbol: PPP1R7
  Gene Name: protein phosphatase 1, regulatory subunit 7
  Uniprot ID: Q15435
  ENST ID: ENST00000234038
  CDS Start-End: 475-1557
agacgcagccagcgaggctcgcagaggtcagggatgcacgtaggactggcccgcaccttgcagccacggaaagatccgcctggcccgcggcccctccacgcctccgaggtcgagacagtgacataagtcaactctcaagcccagggcgtctctccactctgcctagacgtccactccgtctgcctgcagctacggctctgtgcgtcccgcttcgactccctctgctttccttcccagcttctcgcctccagactgttccggctccgccgcctgaaattacctgctctgggggaggcgcggcgcgcggcctcatgacggaactacaactcccatgaggcgctgggcccacgcaggcgcggcgcggctgaagtcgccgcgccggaatcccattggcagggccggctctgaggcgggagccctgattggctgaggggtctgaggcgacagattccggaaaggggaagagcagccaacatggcggcggaacgcggcgcggggcagcaacagtcgcaggagatgatggaggttgacaggcgggtcgagtctgaagaatccggcgatgaagaagggaagaaacacagcagtggcatcgtggccgacctcagtgaacagagcctgaaggatggggaggagcggggggaggaggacccagaagaagaacatgagctgcctgtggacatggaaaccatcaacctggacagagatgcagaggatgttgatttgaatcactatcgcatagggaagattgaaggatttgaggtactgaagaaagtgaagactctctgcctccgccaaaatttaattaaatgcattgagaatctggaggagctacagagtcttcgagagctggatctttacgacaaccagatcaagaagattgagaatctggaggcgctaacagagctggagattctagatatttcttttaatctgctgagaaacatcgaaggggttgacaagttgacacgactgaaaaaactcttcttggtcaacaataaaatcagtaaaattgagaacttaagcaacttacatcaactacagatgctagagctgggatctaaccgcatccgggcaatcgaaaatatcgacaccttaaccaacctggagagtttgtttttggggaaaaacaaaattactaaacttcagaacctggatgcgctcaccaacctgacagtcctcagtatgcagagcaaccggctgaccaagatcgagggtctgcagaacctggtgaacctgcgggagctgtaccttagccacaatggcatcgaggtcatcgagggcctggagaacaataacaaactcacgatgttggacattgcatcaaatagaatcaaaaagattgaaaatatcagccatctaacagagctgcaagagttctggatgaacgacaatctccttgagagctggagcgacctcgacgagctgaagggagccaggagcctggagacagtgtacctggagcggaaccccttgcagaaggacccccagtaccggcggaaggtcatgctcgccctcccctccgtgcggcagatcgatgccacgttcgtcaggttctgagtccttcttggctcctcatgtggtccctctcctcggaagaactgcccagccacgggtttttaacccacctgttgctcctgaggtcgtcactatatcaacagtcacaaacccaatggcaataaaggcactgacgatagctggcgcgcgcgacgtcacacaccattttcagatgccgttgcaattaaatcttgccacactgtcctcctgggtgattgttgacagttattgtagccacagagagaacataagacacgttgcgttcattcgctagaaatccctgtttccttctctcagaaggcagtcacagtccctacctgagtcgtgtgaaacacagggcctgagagtgctttacaggcattcacgtgctgtccgagtggcattcgggggctggcctagctggccctagtcctggtgtgcagggttcaggcagtcttgacctgcaacaaccgaggttttttagtcttttaacccagccattttcaattttttaaaaattaggtaagttaaaaaagctgggtaaaagctgactcagccctgtgtgcttgtgttccttagagctctccttcaaagagcgccgggcagggctgactgttttcacgtgtgcccgtcagttctcgccacatcccttgcctgtgggtgaaagctcaggtgtggggagggtgtcctgtgtcccacacggtgctgtgctgctgccagaatacgagtcccattgagcctctccaaagacggcctccaaggatctgaactcttggccactggtatagtggcctcctgttctcaccccattgttattttggcttttttaatataaaatgtacattgacagaca

SEQ ID NO: 171111 - DNA, 1954 bp, Homo sapiens
  Payload ID: 13669
  Gene Symbol: PPP1R7
  Gene Name: protein phosphatase 1, regulatory subunit 7
  Uniprot ID: Q15435
  ENST ID: ENST00000272983
  CDS Start-End: 839-1792
cgcccccgggccgggcagatgcggtttcctcccgactcgcgatcaaaatgggtgagtagcgcagagctcgcctcttggaggcctctttctgaaggcggaggacgcggggcggctcgttcatgggccgggtggctccgcagggtagacgaaggctgcagcgtccgcactgggctgggaacgacttgcaaggggagcccagctggcgccccggagccagccagctggctagcggccccaccagcgcaagtgccccgcacctgcccgcctgctccgagcgtcaagagaaggcggcatttcgcatgggtaaaatccgcgcggggacgccgggagaatgttgttgctcttgccgttcggcccattgtacagacgcagccagcgaggctcgcagaggtcagggatgcacgtaggactggcccgcaccttgcagccacggaaagatccgcctggcccgcggcccctccacgcctccgaggtcgagacagtgacataagtcaactctcaagcccagggcgtctctccactctgcctagacgtccactccgtctgcctgcagctacggctctgtgcgtcccgcttcgactccctctgctttccttcccagcttctcgcctccagactgttccggctccgccgcctgaaattacctgctctgggggaggcgcggcgcgcggcctcatgacggaactacaactcccatgaggcgctgggcccacgcaggcgcggcgcggctgaagtcgccgcgccggaatcccattggcagggccggctctgaggcgggagccctgattggctgaggggtctgaggcgacagattccggaaaggggaagagcagccaacatggcggcggaacgcggcgcggggcagcaacagtcgcaggagatgatggaggaagaacatgagctgcctgtggacatggaaaccatcaacctggacagagatgcagaggatgttgatttgaatcactatcgcatagggaagattgaaggatttgaggtactgaagaaagtgaagactctctgcctccgccaaaatttaattaaatgcattgagaatctggaggagctacagagtcttcgagagctggatctttacgacaaccagatcaagaagattgagaatctggaggcgctaacagagctggagattctagatatttcttttaatctgctgagaaacatcgaaggggttgacaagttgacacgactgaaaaaactcttcttggtcaacaataaaatcagtaaaattgagaacttaagcaacttacatcaactacagatgctagagctgggatctaaccgcatccgggcaatcgaaaatatcgacaccttaaccaacctggagagtttgtttttggggaaaaacaaaattactaaacttcagaacctggatgcgctcaccaacctgacagtcctcagtatgcagagcaaccggctgaccaagatcgagggtctgcagaacctggtgaacctgcgggagctgtaccttagccacaatggcatcgaggtcatcgagggcctggagaacaataacaaactcacgatgttggacattgcatcaaatagaatcaaaaagattgaaaatatcagccatctaacagagctgcaagagttctggatgaacgacaatctccttgagagctggagcgacctcgacgagctgaagggagccaggagcctggagacagtgtacctggagcggaaccccttgcagaaggacccccagtaccggcggaaggtcatgctcgccctcccctccgtgcggcagatcgatgccacgttcgtcaggttctgagtccttcttggctcctcatgtggtccctctcctcggaagaactgcccagccacgggtttttaacccacctgttgctcctgaggtcgtcactatatcaacagtcacaaacccaatggcaataaaggcactgacgatagctggcgcgcgcgacgtcacacacca

SEQ ID NO: 171112 - DNA, 883 bp, Homo sapiens
  Payload ID: 13669
  Gene Symbol: PPP1R7
  Gene Name: protein phosphatase 1, regulatory subunit 7
  Uniprot ID: Q15435
  ENST ID: ENST00000402734
  CDS Start-End: 114-779
gttgctagggacgcaccaaacacccctacggcgcttcggaggagccaaaggaataatgggcgcctccgcccccgggccgggcagatgcggtttcctcccgactcgcgatcaaaatggaagaacatgagctgcctgtggacatggaaaccatcaacctggacagagatgcagaggatgttgatttgaatcactatcgcatagggaagattgaaggatttgaggtactgaagaaagtgaagactctctgcctccgccaaaatttaattaaatgcattgagaatctggaggagctacagagtcttcgagagctggatctttacgacaaccagatcaagaagattgagaatctggaggcgctaacagagctggagattctagatatttcttttaatctgctgagaaacatcgaaggggttgacaagttgacacgactgaaaaaactcttcttggtcaacaataaaatcagtaaaattgagaacttaagcaacttacatcaactacagatgctagagctgggatctaaccgcatccgggcaatcgaaaatatcgacaccttaaccaacctggagagtttgtttttggggaaaaacaaaattactaaacttcagaacctggatgcgctcaccaacctgacagtcctcagtatgcagagcaaccggctgaccaagatcgagggtctgcagaacctggtgaacctgcgggagctgtaccttagccacaatggcatcgaggtcatcgagggcctggagaacaatgtgcaggacagcctcacgtactgaggggaagtgtgctcacagagcccccaccctcctcagctgcctccagctcaccctgctctgccccagtgcggtgttcaagacaaataaaagactttttctcattc

SEQ ID NO: 171113 - DNA, 965 bp, Homo sapiens
  Payload ID: 13669
  Gene Symbol: PPP1R7
  Gene Name: protein phosphatase 1, regulatory subunit 7
  Uniprot ID: Q15435
  ENST ID: ENST00000406106
  CDS Start-End: 17-859
gggaagagcagccaacatggcggcggaacgcggcgcggggcagcaacagtcgcaggagatgatggaggttgacaggcgggtcgagtctgaagaatccggcgatgaagaagggaagaaacacagcagtggcatcgtggccgacctcagtgaacagagcctgaaggatggggaggagcggggggaggaggacccagaagaagaacatgagctgcctgtggacatggaaaccatcaacctggacagagatgcagaggatgttgatttgaatcactatcgcatagggaagattgaaggatttgaggtactgaagaaagtgaagactctctgcctccgccaaaatttaattaaatgcattgagaatctggaggagctacagagtcttcgagagctggatctttacgacaaccagatcaagaagattgagaatctggaggcgctaacagagctggagattctagatatttcttttaatctgctgagaaacatcgaaggggttgacaagttgacacgactgaaaaaactcttcttggtcaacaataaaatcagtaaaattgagaacttaagcaacttacatcaactacagatgctagagctgggatctaaccgcatccgggcaatcgaaaatatcgacaccttaaccaacctggagagtttgtttttggggaaaaacaaaattactaaacttcagaacctggatgcgctcaccaacctgacagtcctcagtatgcagagcaaccggctgaccaagatcgagggtctgcagaacctggtgaacctgcgggagctgtaccttagccacaatggcatcgaggtcatcgagggcctggagaacaatgtgcaggacagcctcacgtactgaggggaagtgtgctcacagagcccccaccctcctcagctgcctccagctcaccctgctctgccccagtgcggtgttcaagacaaataaaagactttttctcattcaa

SEQ ID NO: 171114 - DNA, 820 bp, Homo sapiens
  Payload ID: 13669
  Gene Symbol: PPP1R7
  Gene Name: protein phosphatase 1, regulatory subunit 7
  Uniprot ID: Q15435
  ENST ID: ENST00000401987
  CDS Start-End: 1-714
atggcggcggaacgcggcgcggggcagcaacagtcgcaggagatgatggaggaagaacatgagctgcctgtggacatggaaaccatcaacctggacagagatgcagaggatgttgatttgaatcactatcgcatagggaagattgaaggatttgaggtactgaagaaagtgaagactctctgcctccgccaaaatttaattaaatgcattgagaatctggaggagctacagagtcttcgagagctggatctttacgacaaccagatcaagaagattgagaatctggaggcgctaacagagctggagattctagatatttcttttaatctgctgagaaacatcgaaggggttgacaagttgacacgactgaaaaaactcttcttggtcaacaataaaatcagtaaaattgagaacttaagcaacttacatcaactacagatgctagagctgggatctaaccgcatccgggcaatcgaaaatatcgacaccttaaccaacctggagagtttgtttttggggaaaaacaaaattactaaacttcagaacctggatgcgctcaccaacctgacagtcctcagtatgcagagcaaccggctgaccaagatcgagggtctgcagaacctggtgaacctgcgggagctgtaccttagccacaatggcatcgaggtcatcgagggcctggagaacaatgtgcaggacagcctcacgtactgaggggaagtgtgctcacagagcccccaccctcctcagctgcctccagctcaccctgctctgccccagtgcggtgttcaagacaaataaaagactttttctcattcaa

SEQ ID NO: 171115 - DNA, 1009 bp, Homo sapiens
  Payload ID: 13669
  Gene Symbol: PPP1R7
  Gene Name: protein phosphatase 1, regulatory subunit 7
  ENST ID: ENST00000404405
  CDS Start-End: 79-903
ggccggctctgaggcgggagccctgattggctgaggggtctgaggcgacagattccggaaaggggaagagcagccaacatggcggcggaacgcggcgcggggcagcaacagtcgcaggagatgatggaggttgacaggcgggtcgagtctgaagaatccggcgatgaagaagggaagaaacacagcagtggcatcgtggccgacctcagtgaacagagcctgaaggatggggaggagcggggggaggaggacccagaagaagaacatgagctgcctgtggacatggaaaccatcaacctggacagagatgcagaggatgttgatttgaatcactatcgcatagggaagattgaaggatttgagactctctgcctccgccaaaatttaattaaatgcattgagaatctggaggagctacagagtcttcgagagctggatctttacgacaaccagatcaagaagattgagaatctggaggcgctaacagagctggagattctagatatttcttttaatctgctgagaaacatcgaaggggttgacaagttgacacgactgaaaaaactcttcttggtcaacaataaaatcagtaaaattgagaacttaagcaacttacatcaactacagatgctagagctgggatctaaccgcatccgggcaatcgaaaatatcgacaccttaaccaacctggagagtttgtttttggggaaaaacaaaattactaaacttcagaacctggatgcgctcaccaacctgacagtcctcagtatgcagagcaaccggctgaccaagatcgagggtctgcagaacctggtgaacctgcgggagctgtaccttagccacaatggcatcgaggtcatcgagggcctggagaacaatgtgcaggacagcctcacgtactgaggggaagtgtgctcacagagcccccaccctcctcagctgcctccagctcaccctgctctgccccagtgcggtgttcaagacaaataaaagactttttctcattcaa

SEQ ID NO: 171116 - DNA, 1592 bp, Homo sapiens
  Payload ID: 13669
  Gene Symbol: PPP1R7
  Gene Name: protein phosphatase 1, regulatory subunit 7
  Uniprot ID: Q15435
  ENST ID: ENST00000407025
  CDS Start-End: 309-1391
aaaggaataatgggcgcctccgcccccgggccgggcagatgcggtttcctcccgactcgcgatcaaaatggcttctcgcctccagactgttccggctccgccgcctgaaattacctgctctgggggaggcgcggcgcgcggcctcatgacggaactacaactcccatgaggcgctgggcccacgcaggcgcggcgcggctgaagtcgccgcgccggaatcccattggcagggccggctctgaggcgggagccctgattggctgaggggtctgaggcgacagattccggaaaggggaagagcagccaacatggcggcggaacgcggcgcggggcagcaacagtcgcaggagatgatggaggttgacaggcgggtcgagtctgaagaatccggcgatgaagaagggaagaaacacagcagtggcatcgtggccgacctcagtgaacagagcctgaaggatggggaggagcggggggaggaggacccagaagaagaacatgagctgcctgtggacatggaaaccatcaacctggacagagatgcagaggatgttgatttgaatcactatcgcatagggaagattgaaggatttgaggtactgaagaaagtgaagactctctgcctccgccaaaatttaattaaatgcattgagaatctggaggagctacagagtcttcgagagctggatctttacgacaaccagatcaagaagattgagaatctggaggcgctaacagagctggagattctagatatttcttttaatctgctgagaaacatcgaaggggttgacaagttgacacgactgaaaaaactcttcttggtcaacaataaaatcagtaaaattgagaacttaagcaacttacatcaactacagatgctagagctgggatctaaccgcatccgggcaatcgaaaatatcgacaccttaaccaacctggagagtttgtttttggggaaaaacaaaattactaaacttcagaacctggatgcgctcaccaacctgacagtcctcagtatgcagagcaaccggctgaccaagatcgagggtctgcagaacctggtgaacctgcgggagctgtaccttagccacaatggcatcgaggtcatcgagggcctggagaacaataacaaactcacgatgttggacattgcatcaaatagaatcaaaaagattgaaaatatcagccatctaacagagctgcaagagttctggatgaacgacaatctccttgagagctggagcgacctcgacgagctgaagggagccaggagcctggagacagtgtacctggagcggaaccccttgcagaaggacccccagtaccggcggaaggtcatgctcgccctcccctccgtgcggcagatcgatgccacgttcgtcaggttctgagtccttcttggctcctcatgtggtccctctcctcggaagaactgcccagccacgggtttttaacccacctgttgctcctgaggtcgtcactatatcaacagtcacaaacccaatggcaataaaggcactgacgatagctggcgcgcgcgacgtcacacaccattttcagatgccgttgcaattaaatcttgccacactgtc

SEQ ID NO: 171117 - DNA, 1030 bp, Homo sapiens
  Payload ID: 13669
  Gene Symbol: PPP1R7
  Gene Name: protein phosphatase 1, regulatory subunit 7
  ENST ID: ENST00000450367
  CDS Start-End: 1-1007
ggcgggtcgagtctgaagaatccggcgatgaagaagggaagaaacacagcagtggcatcgtggccgacctcagtgaacagagcctgaaggatggggaggagcggggggaggaggacccagaagaagaacatgagctgcctgtggacatggaaaccatcaacctggacagagatgcagaggatgttgatttgaatcactatcgcatagggaagattgaaggatttgagactctctgcctccgccaaaatttaattaaatgcattgagaatctggaggagctacagagtcttcgagagctggatctttacgacaaccagatcaagaagattgagaatctggaggcgctaacagagctggagattctagatatttcttttaatctgctgagaaacatcgaaggggttgacaagttgacacgactgaaaaaactcttcttggtcaacaataaaatcagtaaaattgagaacttaagcaacttacatcaactacagatgctagagctgggatctaaccgcatccgggcaatcgaaaatatcgacaccttaaccaacctggagagtttgtttttggggaaaaacaaaattactaaacttcagaacctggatgcgctcaccaacctgacagtcctcagtatgcagagcaaccggctgaccaagatcgagggtctgcagaacctggtgaacctgcgggagctgtaccttagccacaatggcatcgaggtcatcgagggcctggagaacaataacaaactcacgatgttggacattgcatcaaatagaatcaaaaagattgaaaatatcagccatctaacagagctgcaagagttctggatgaacgacaatctccttgagagctggagcgacctcgacgagctgaagggagccaggagcctggagacagtgtacctggagcggaaccccttgcagaaggacccccagtaccggcggaaggtcatgctcgccctcccctccgtgcggcagatcgatgccacgttcgtcaggttctgagtccttcttggctcctcatgtgg

SEQ ID NO: 171118 - DNA, 976 bp, Homo sapiens
  Payload ID: 13669
  Gene Symbol: PPP1R7
  Gene Name: protein phosphatase 1, regulatory subunit 7
  ENST ID: ENST00000438799
  CDS Start-End: 130-976
gaagcccgcgctaagggttgctagggacgcaccaaacacccctacggcgcttcggaggagccaaaggaataatgggcgcctccgcccccgggccgggcagatgcggtttcctcccgactcgcgatcaaaatggttgacaggcgggtcgagtctgaagaatccggcgatgaagaagggaagaaacacagcagtggcatcgtggccgacctcagtgaacagagcctgaaggatggggaggagcggggggaggaggacccagaagaagaacatgagctgcctgtggacatggaaaccatcaacctggacagagatgcagaggatgttgatttgaatcactatcgcatagggaagattgaaggatttgaggtactgaagaaagtgaagactctctgcctccgccaaaatttaattaaatgcattgagaatctggaggagctacagagtcttcgagagctggatctttacgacaaccagatcaagaagattgagaatctggaggcgctaacagagctggagattctagatatttcttttaatctgctgagaaacatcgaaggggttgacaagttgacacgactgaaaaaactcttcttggtcaacaataaaatcagtaaaattgagaacttaagcaacttacatcaactacagatgctagagctgggatctaaccgcatccgggcaatcgaaaatatcgacaccttaaccaacctggagagtttgtttttggggaaaaacaaaattactaaacttcagaacctggatgcgctcaccaacctgacagtcctcagtatgcagagcaaccggctgaccaagatcgagggtctgcagaacctggtgaacctgcgggagctgtaccttagccacaatggcatcgaggtcatcgagggcctggagaacaataacaaactcacgatgttggacattgcatcaaatagaatcaaaaagattgaaaatatcagccatctaacagagctgc

SEQ ID NO: 171119 - DNA, 421 bp, Homo sapiens
  Payload ID: 13669
  Gene Symbol: PPP1R7
  Gene Name: protein phosphatase 1, regulatory subunit 7
  ENST ID: ENST00000427172
  CDS Start-End: 1-421
ctcgaaggcaacgaggttggggatagggtgagggaaaagagcaagaatcactcaagacggagaaaactgctgtcaaaagttgacaggcgggtcgagtctgaagaatccggcgatgaagaagggaagaaacacagcagtggcatcgtggccgacctcagtgaacagagcctgaaggatggggaggagcggggggaggaggacccagaagaagaacatgagctgcctgtggacatggaaaccatcaacctggacagagatgcagaggatgttgatttgaatcactatcgcatagggaagattgaaggatttgaggtactgaagaaagtgaagactctctgcctccgccaaaatttaattaaatgcattgagaatctggaggagctacagagtcttcgagagctggatctttacgacaaccaga

SEQ ID NO: 171120 - DNA, 583 bp, Homo sapiens
  Payload ID: 13669
  Gene Symbol: PPP1R7
  Gene Name: protein phosphatase 1, regulatory subunit 7
  ENST ID: ENST00000439916
  CDS Start-End: 30-583
agattccggaaaggggaagagcagccaacatggcggcggaacgcggcgcggggcagcaacagtcgcaggagatgatggaggttgacaggcgggtcgagtctgaagaatccggcgatgaagaagggaagaaacacagcagtggcatcgtggccgacctcagtgaacagagcctgaaggatggggaggagcggggggaggaggacccagaagaagaacatgagctgcctgtggacatggaaaccatcaacctggacagagatgcagagatttctgctttgtttcaggatgttgatttgaatcactatcgcatagggaagattgaaggatttgaggtactgaagaaagtgaagactctctgcctccgccaaaatttaattaaatgcattgagaatctggaggagctacagagtcttcgagagctggatctttacgacaaccagatcaagaagattgagaatctggaggcgctaacagagctggagattctagatatttcttttaatctgctgagaaacatcgaaggggttgacaagttgacacgactgaaaaaactcttcttggtcaacaataaaatcagtaaaat

SEQ ID NO: 171121 - DNA, 959 bp, Homo sapiens
  Payload ID: 13669
  Gene Symbol: PPP1R7
  Gene Name: protein phosphatase 1, regulatory subunit 7
  ENST ID: ENST00000423280
  CDS Start-End: 93-959
acccctacggcgcttcggaggagccaaaggaataatgggcgcctccgcccccgggccgggcagatgcggtttcctcccgactcgcgatcaaaatggaagaacatgagctgcctgtggacatggaaaccatcaacctggacagagatgcagaggatgttgatttgaatcactatcgcatagggaagattgaaggatttgaggtactgaagaaagtgaagactctctgcctccgccaaaatttaattaaatgcattgagaatctggaggagctacagagtcttcgagagctggatctttacgacaaccagatcaagaagattgagaatctggaggcgctaacagagctggagattctagatatttcttttaatctgctgagaaacatcgaaggggttgacaagttgacacgactgaaaaaactcttcttggtcaacaataaaatcagtaaaattgagaacttaagcaacttacatcaactacagatgctagagctgggatctaaccgcatccgggcaatcgaaaatatcgacaccttaaccaacctggagagtttgtttttggggaaaaacaaaattactaaacttcagaacctggatgcgctcaccaacctgacagtcctcagtatgcagagcaaccggctgaccaagatcgagggtctgcagaacctggtgaacctgcgggagctgtaccttagccacaatggcatcgaggtcatcgagggcctggagaacaataacaaactcacgatgttggacattgcatcaaatagaatcaaaaagattgaaaatatcagccatctaacagagctgcaagagttctggatgaacgacaatctccttgagagctggagcgacctcgacgagctgaagggagccaggagcctggagacagtgtacctggagcggaaccccttgcagaaggacccccagtaccggcggaaggtcatgctcgccctcccc

SEQ ID NO: 171122 - DNA, 514 bp, Homo sapiens
  Payload ID: 13669
  Gene Symbol: PPP1R7
  Gene Name: protein phosphatase 1, regulatory subunit 7
  ENST ID: ENST00000415769
  CDS Start-End: 1-325
ggacattgcatcaaatagaatcaaaaagattgaaaatatcagccatctaacagagctgcaagagttctggatgaacgacaatctccttgagagctggagcgacctcgacgagctgaagggagccaggagcctggagacagtgtacctggagcggaaccccttgcagaaggacccccagtaccggcggaaggtcatgctcgccctcccctccgtgcggcagatcgatgccacgttcgtcagagctctccttcaaagagcgccgggcagggctgactgttttcacgtgtgcccgtcagttctcgccacatcccttgcctgtgggtgaaagctcaggtgtggggagggtgtcctgtgtcccacacggtgctgtgctgctgccagaatacgagtcccattgagcctctccaaagacggcctccaaggatctgaactcttggccactggtatagtggcctcctgttctcaccccattgttattttggcttttttaatataaaatgtacattgacagaca

SEQ ID NO: 171123 - DNA, 2414 bp, Homo sapiens
  Payload ID: 13670
  Gene Symbol: PPP1R8
  Gene Name: protein phosphatase 1, regulatory subunit 8
  Uniprot ID: Q12972
  ENST ID: ENST00000236412
  CDS Start-End: 949-1332
aaatgggagggggagacgcaagatggcggcagccgcgaactccggctctagcctcccgctgttcgactgcccaacctggtgagtggcggggcggccagggctagagtggcccggccggagctagcctgggctggaagggcggctctttttttacttttctgctgcgagccgaacggctcagaaaccccggaatggttgaggaaaaactgtttgctgcaccgggccgggcgacgtgttgaagaaccgagagcctggagcccaggcccaggaactgaagaaacccggggttgggggctcaaaggcgctcacttaggcagcccctttgagcgattagccagtcgccggagcgcttcgaggccttggcccgaacttacgcccaactcttgactgagtgcctggtgctctcgtggagcatcgcatctggccccttcctgtacgtcccgagcgcgctcgagccagccccggccccaaccctacctccaagccccgcatccctctgtggttgctgcatccctcgtgcggcacttgtctgtctgccacagagaatacgaggggcaggtaagccccctcccggtttacatctggatgtagtcaaaggagacaaactaattgagaaactgattattgatgagaagaagtattacttatttgggagaaaccctgatttgtgtgactttaccattgaccaccagtcttgctctcgggtccatgctgcacttgtctaccacaagcatctgaagagagttttcctgatagatctcaacagtaaacctgacagagttcaacactgcccacaacaagcggatttctacccttaccattgaggagggaaatctggacattcaaagaccaaagaggaagaggaagaactcacgggtgacattcagtgaggatgatgagatcatcaacccagaggatgtggatccctcagttggtcgattcaggaacatggtgcaaactgcagtggtcccagtcaagaagaagcgtgtggagggccctggctccctgggcctggaggaatcagggagcaggcgcatgcagaactttgccttcagcggaggactctacgggggcctgccccccacacacagtgaagcaggctcccagccacatggcatccatgggacagcactcatcggtggcttgcccatgccatacccaaaccttgcccctgatgtggacttgactcctgttgtgccgtcagcagtgaacatgaaccctgcaccaaaccctgcagtctataaccctgaagctgtaaatgaacccaagaagaagaaatatgcaaaagaggcttggccaggcaagaagcccacaccttccttgctgatttgatatttttggtcatggagaagggtgggattgggtgggaatggggtggaagggtgatggggagctaatgaactagggagaaaaactttccatgtgtgcggtatcgtctttcagaatgtctcctggcatcctaaccatgtaatatgacaattgggggtggggttgaaatagcccataaagacctgtcttcacaacacttgcattgtagagaaaggcttcttatatccttttcaatagactgccctggctctttcctaggccttccactacctcctttctttctcccactttctaggatcatttttatgtaaagtcacatatcccaggccctcaggttgaatccagagctgtagaggttacagtagcatcaccagccttgggggtccagagcctaatttatattcactatccttccaagtcccgggtagcagaagggttgccatagatctcagtttgatcaaaaagaaggcttagaattctgcagttaagctgaggtttaaactaaaaaatgtttccttgggtcagtggttttgaggtccagtagctaggcttttctcttttgtccttcctgttggaatgaaaacatttcgattttccttcatctgtgactggtgccatagacacaggtttatagttttaacttacagtattgtttgaaatttacctgtttttcttgtcaaacctgagcactcctcctgctgaagtttcttatttaattccagagtactgtcctctactctaaggcattacttttaagtgtattatgaaggcagttttcaaaggatatgaccagttggggtaattcaaattaaaaaggaaaagatttgtttggaagtaactggtgtctctaagaggaatttttagatgtcagtttggaggctctttcccccctcaattgagagctcttgttattcagagctccaagactagacctggctaacaaacataggagacaaagttaggaaacattgatacaagctttgtacagagatttgtacatttgtgtaataggccttttcatgctttatgtgtagctttttacctgtaacctttattacattgtaaattaaacgtaacttttgtca

SEQ ID NO: 171124 - DNA, 2344 bp, Homo sapiens
  Payload ID: 13670
  Gene Symbol: PPP1R8
  Gene Name: protein phosphatase 1, regulatory subunit 8
  Uniprot ID: Q12972
  ENST ID: ENST00000311772
  CDS Start-End: 59-1114
cggtcttccagtttcccggcgtgcttagggcgcgccaaatgggagggggagacgcaagatggcggcagccgcgaactccggctctagcctcccgctgttcgactgcccaacctgggcaggtaagccccctcccggtttacatctggatgtagtcaaaggagacaaactaattgagaaactgattattgatgagaagaagtattacttatttgggagaaaccctgatttgtgtgactttaccattgaccaccagtcttgctctcgggtccatgctgcacttgtctaccacaagcatctgaagagagttttcctgatagatctcaacagtacacacggcactttcttgggtcacattcggttggaacctcacaagcctcagcaaattcccatcgattccacggtctcatttggcgcatccacaagggcatacactctgcgcgagaagcctcagacattgccatcggctgtgaaaggagatgagaagatgggtggagaggatgatgaactcaagggcttactggggcttccagaggaggaaactgagcttgataacctgacagagttcaacactgcccacaacaagcggatttctacccttaccattgaggagggaaatctggacattcaaagaccaaagaggaagaggaagaactcacgggtgacattcagtgaggatgatgagatcatcaacccagaggatgtggatccctcagttggtcgattcaggaacatggtgcaaactgcagtggtcccagtcaagaagaagcgtgtggagggccctggctccctgggcctggaggaatcagggagcaggcgcatgcagaactttgccttcagcggaggactctacgggggcctgccccccacacacagtgaagcaggctcccagccacatggcatccatgggacagcactcatcggtggcttgcccatgccatacccaaaccttgcccctgatgtggacttgactcctgttgtgccgtcagcagtgaacatgaaccctgcaccaaaccctgcagtctataaccctgaagctgtaaatgaacccaagaagaagaaatatgcaaaagaggcttggccaggcaagaagcccacaccttccttgctgatttgatatttttggtcatggagaagggtgggattgggtgggaatggggtggaagggtgatggggagctaatgaactagggagaaaaactttccatgtgtgcggtatcgtctttcagaatgtctcctggcatcctaaccatgtaatatgacaattgggggtggggttgaaatagcccataaagacctgtcttcacaacacttgcattgtagagaaaggcttcttatatccttttcaatagactgccctggctctttcctaggccttccactacctcctttctttctcccactttctaggatcatttttatgtaaagtcacatatcccaggccctcaggttgaatccagagctgtagaggttacagtagcatcaccagccttgggggtccagagcctaatttatattcactatccttccaagtcccgggtagcagaagggttgccatagatctcagtttgatcaaaaagaaggcttagaattctgcagttaagctgaggtttaaactaaaaaatgtttccttgggtcagtggttttgaggtccagtagctaggcttttctcttttgtccttcctgttggaatgaaaacatttcgattttccttcatctgtgactggtgccatagacacaggtttatagttttaacttacagtattgtttgaaatttacctgtttttcttgtcaaacctgagcactcctcctgctgaagtttcttatttaattccagagtactgtcctctactctaaggcattacttttaagtgtattatgaaggcagttttcaaaggatatgaccagttggggtaattcaaattaaaaaggaaaagatttgtttggaagtaactggtgtctctaagaggaatttttagatgtcagtttggaggctctttcccccctcaattgagagctcttgttattcagagctccaagactagacctggctaacaaacataggagacaaagttaggaaacattgatacaagctttgtacagagatttgtacatttgtgtaataggccttttcatgctttatgtgtagctttttacctgtaacctttattacattgtaaattaaacgtaacttttgtcatttgggtgcaggctgtgaatttgtctctcagtcactgattgccactgccatctggaaatgtttgctaaaggcacagtcactgggcttgggaggcaatgctccatccccattatattacaaataaagatgccctaaatgagtgtggaaa

SEQ ID NO: 171125 - DNA, 2651 bp, Homo sapiens
  Payload ID: 13670
  Gene Symbol: PPP1R8
  Gene Name: protein phosphatase 1, regulatory subunit 8
  Uniprot ID: Q12972
  ENST ID: ENST00000373931
  CDS Start-End: 796-1425
gggggagacgcaagatggcggcagccgcgaactccggctctagcctcccgctgttcgactgcccaacctggtgagtggcggggcggccagggctagagtggcccggccggagctagcctgggctggaagggcggctctttttttacttttctgctgcgagccgaacggctcagaaaccccggaatggttgaggaaaaactgtttgctgcaccgggccgggcgacgtgttgaagaaccgagagcctggagcccaggcccaggaactgaagaaacccggggttgggggctcaaaggcgctcacttaggcagcccctttgagcgattagccagtcgccggagcgcttcgaggccttggcccgaacttacgcccaactcttgactgagtgcctggtgctctcgtggagcatcgcatctggccccttcctggcaggtaagccccctcccggtttacatctggatgtagtcaaaggagacaaactaattgagaaactgattattgatgagaagaagtattacttatttgggagaaaccctgatttgtgtgactttaccattgaccaccagtcttgctctcgggtccatgctgcacttgtctaccacaagcatctgaagagagttttcctgatagatctcaacagtacacacggcactttcttgggtcacattcggttggaacctcacaagcctcagcaaattcccatcgattccacggtctcatttggcgcatccacaagggcatacactctgcgcgagaagcctcagacattgccatcggctgtgaaaggagatgagaagatgggtggagaggatgatgaactcaagggcttactggggcttccagaggaggaaactgagcttgataacctgacagagttcaacactgcccacaacaagcggatttctacccttaccattgaggagggaaatctggacattcaaagaccaaagaggaagaggaagaactcacgggtgacattcagtgaggatgatgagatcatcaacccagaggatgtggatccctcagttggtcgattcaggaacatggtgcaaactgcagtggtcccagtcaagaagaagcgtgtggagggccctggctccctgggcctggaggaatcagggagcaggcgcatgcagaactttgccttcagcggaggactctacgggggcctgccccccacacacagtgaagcaggctcccagccacatggcatccatgggacagcactcatcggtggcttgcccatgccatacccaaaccttgcccctgatgtggacttgactcctgttgtgccgtcagcagtgaacatgaaccctgcaccaaaccctgcagtctataaccctgaagctgtaaatgaacccaagaagaagaaatatgcaaaagaggcttggccaggcaagaagcccacaccttccttgctgatttgatatttttggtcatggagaagggtgggattgggtgggaatggggtggaagggtgatggggagctaatgaactagggagaaaaactttccatgtgtgcggtatcgtctttcagaatgtctcctggcatcctaaccatgtaatatgacaattgggggtggggttgaaatagcccataaagacctgtcttcacaacacttgcattgtagagaaaggcttcttatatccttttcaatagactgccctggctctttcctaggccttccactacctcctttctttctcccactttctaggatcatttttatgtaaagtcacatatcccaggccctcaggttgaatccagagctgtagaggttacagtagcatcaccagccttgggggtccagagcctaatttatattcactatccttccaagtcccgggtagcagaagggttgccatagatctcagtttgatcaaaaagaaggcttagaattctgcagttaagctgaggtttaaactaaaaaatgtttccttgggtcagtggttttgaggtccagtagctaggcttttctcttttgtccttcctgttggaatgaaaacatttcgattttccttcatctgtgactggtgccatagacacaggtttatagttttaacttacagtattgtttgaaatttacctgtttttcttgtcaaacctgagcactcctcctgctgaagtttcttatttaattccagagtactgtcctctactctaaggcattacttttaagtgtattatgaaggcagttttcaaaggatatgaccagttggggtaattcaaattaaaaaggaaaagatttgtttggaagtaactggtgtctctaagaggaatttttagatgtcagtttggaggctctttcccccctcaattgagagctcttgttattcagagctccaagactagacctggctaacaaacataggagacaaagttaggaaacattgatacaagctttgtacagagatttgtacatttgtgtaataggccttttcatgctttatgtgtagctttttacctgtaacctttattacattgtaaattaaacgtaacttttgtcatttgggtgcaggctgtgaatttgtctctcagtcactgattgccactgccatctggaaatgtttgctaaaggcacagtcactgggcttgggaggcaatgctccatccccattatattacaaataaagatgccctaaatgagtgtg

SEQ ID NO: 171126 - DNA, 1029 bp, Homo sapiens
  Payload ID: 13670
  Gene Symbol: PPP1R8
  Gene Name: protein phosphatase 1, regulatory subunit 8
  ENST ID: ENST00000431586
  CDS Start-End: 414-1029
tccctcgtgcggcacttgtctgtctgccacagagaatacgaggggcaggtaagccccctcccggtttacatctggatgtagtcaaaggagacaaactaattgagaaactgattattgatgagaagaagtattacttatttgggagaaaccctgatttgtgtgactttaccattgaccaccagtcttgctctcgggtccatgctgcacttgtctaccacaagcatctgaagagagttttcctgatagatctcaacagtacacacggcactttcttgggtcacattcggttggaacctcacaagcctcagcaaattcccatcgattccacggtctcatttggcgcatccacaagggcatacactctgcgcgagaagcctcagacattgccatcggctgtgaaaggagatgagaagatgggtggagaggatgatgaactcaagggcttactggggcttccagaggaggaaactgagcttgataacctgacagagttcaacactgcccacaacaagcggatttctacccttaccattgaggagggaaatctggacattcaaagaccaaagaggaagaggaagaactcacgggtgacattcagtgaggatgatgagatcatcaacccagaggatgtggatccctcagttggtcgattcaggaacatggtgcaaactgcagtggtcccagtcaagaagaagcgtgtggagggccctggctccctgggcctggaggaatcagggagcaggcgcatgcagaactttgccttcagcggaggactctacgggggcctgccccccacacacagtgaagcaggctcccagccacatggcatccatgggacagcactcatcggtggcttgcccatgccatacccaaaccttgcccctgatgtggacttgactcctgttgtgccgtcagcagtgaacatgaaccctgcaccaaaccctgcagtctataaccctgaagctgtaaatgaacccaagaagaagaaatatgcaaaagaggcttggccaggcaagaagcccacacctt

SEQ ID NO: 171127 - DNA, 3983 bp, Homo sapiens
  Payload ID: 13671
  Gene Symbol: PPP1R9A
  Gene Name: protein phosphatase 1, regulatory subunit 9A
  Uniprot ID: Q9ULJ8
  ENST ID: ENST00000289495
  CDS Start-End: 32-3922
tgaacattggcttttcacccctgaagtgaaaatgttgaaaactgagtcttcaggtgaacgaaccactctcagaagtgcctctcctcacaggaatgcatatcgaactgagtttcaggcactgaaaagtacctttgacaaacccaagtcagatggggaacaaaaaacaaaagaaggtgagggctcccagcagagcagggggaggaaatatggctccaatgtcaacagaattaaaaacctatttatgcagatgggtatggaacccaacgagaatgctgcagtcattgccaaaacaagggggaaaggtggacattcatctcctcagagaagaatgaagcccaaagaatttctggaaaaaacagatggctcagttgttaagttggagtcttctgtttctgaacgaattagtagatttgacactatgtacgatggcccttcatattccaagttcactgagactcgaaagatgtttgagagaagtgtgcatgaatcaggacagaacaaccgctattccccaaagaaagagaaagctggagggagtgaacctcaggatgaatggggaggttccaagtccaacagaggcagtactgattccttggacagccttagctcccgaactgaggctgtctccccaactgtgagtcaactgagtgcagtatttgagaacactgattctcccagtgccatcatttctgagaaggctgaaaacaatgaatactcagtgactgggcattatcccttgaatttaccatctgttactgttacaaatcttgacacatttggtcacctgaaggattctaattcctggcctccttcaaacaagcgaggtgttgatacagaggatgctcacaagagtaatgcaactccagtaccagaagtggcttctaaaagtacctctctagcttcgatacctggtgaagagatccagcagagcaaggaacccgaggactccacatctaatcaacagactcccgacagcattgacaaagatggtcctgaagaaccttgtgctgaaagtaaggcaatgccaaagtccgaaatcccttcaccacaaagccaactgttagaagatgctgaagctaatttggttggaagggaggcagcaaagcaacagaggaaagaacttgcaggtggtgatttcacctctcctgatgcttctgcatccagttgtggaaaagaagtacctgaagattcaaataattttgatggttcccatgtgtacatgcacagtgactataatgtgtatagggtgagatccaggtataattcagactggggagagacaggcactgagcaggatgaggaggaagatagtgatgagaacagttactatcagcctgatatggagtactcggaaattgttggattgccagaagaagaagaaatcccagcaaataggaaaattaagtttagtagtgctcctattaaggttttcaacacatactccaatgaagactatgacaggagaaatgacgaagttgaccctgtggctgcttcagctgagtatgaacttgaaaaacgtgtagaaaagctggaacttttcccagtggagctagagaaagatgaggatggtcttggtataagtattattggaatgggtgttggagcagatgctggacttgaaaagctgggaatattcgtcaagacagtaacagaaggtggtgctgctcaacgggatggcagaatacaagtcaatgaccagattgtggaagtggatggaatcagcttggtgggtgtgacacagaattttgcagcaacagttctcagaaacaccaagggcaacgtcagatttgttattgggcgggaaaaaccaggacaagtgagcgaggttgcccagttgataagccagacactggaacaggagaggcgccagagagagctgctggaacagcactatgcccagtatgatgccgacgatgacgagacaggagaatatgccacagatgaagaagaagatgaggtaggacctgtccttcctggcagcgacatggccattgaagtctttgagctgcctgagaatgaggacatgttttccccatcagaactggacacaagcaagctcagtcacaagttcaaagagttgcaaatcaaacatgcagttacagaagcagagattcaaaaattgaagaccaagctgcaggcagcagaaaatgagaaagtgaggtgggaactagaaaaaacccaactccaacaaaacatagaagagaataaggaaagaatgttgaagttggaaagctactggattgaggcccaaacattatgccacacagtgaatgagcatctcaaagagactcaaagccagtatcaggccttggaaaagaaatacaacaaggcaaagaagttgatcaaggattttcaacaaaaagagcttgatttcatcaaaagacaggaagcagaaagaaagaaaatagaagatttggaaaaagctcatcttgtggaagtgcaaggcctccaagtgcggattagagatttggaagctgaggtattcaggctactgaagcaaaatgggactcaagttaacaataataacaacatctttgagagaagaacatctcttggtgaagtctctaaaggggataccatggagaacttggatggcaagcagacatcttgccaagatggcctaagtcaagacttgaatgaagcagtcccagagacagagcgcctggattcaaaagcactgaaaactcgagcccagctctctgtgaagaacagacgccagagaccctctaggacaagactgtatgatagtgttagttccacagatggggaggacagtctagagagaaagggtttgagaacgtcttctccagaatcagattctggtgttccacccctcaccccggtggatagcaatgtgcccttctcgtctgaccacatagctgaatttcaagaagaaccactggacccagaaatggggcctctctcctctatgtggggagacacttcactgttttctacttcaaagtctgatcatgatgtggaagaatctccttgccatcaccaaaccaccaacaagaaaatattacgagaaaaagatgatgccaaagatcccaaatcactaagggcatccagttcattggcggtgcaaggaggaaaaattaagcggaagtttgtggatctgggggcgcctttgcgaaggaattccagcaagggaaagaagtggaaagaaaaagaaaaagaagccagtaggttttctgcaggtagcaggatcttcagaggcagactggaaaactggacacccaagccatgttcaacagctcagacctccactcgttccccttgcatgcctttctcatggtttaatgacagccggaaaggatcctattccttcaggaacctgcctgcgcctacaagttcccttcagccttctcctgagactctaatttcagataaaaaggggtccaagaattttaccttcaatgatgacttcagtcccagcagtaccagttcagcagacctcagcggcttaggagcagaacctaaaacaccagggctctctcagtccttagcactgtcatcagatgagatccttgatgatggacagtctcccaaacacagtcagtgtcagaatcgggccgttcaggaatggagtgtgcagcaggtttctcactggttaatgagcctaaatctggagcagtatgtatctgaattcagtgcccaaaacatcactggagaacagctcctgcagttggatggaaataaacttaaggctcttggaatgacagcatcccaggaccgagcagtggtcaaaaagaaactcaaggaaatgaagatgtctctagagaaggctcggaaggcccaagagaaaatggaaaaacaaagagaaaagctaaggagaaaggagcaagagcaaatgcagaggaagtccaaaaagacagaaaagatgacgtcaactacagccgagggtgctggtgagcagtaacacataccctcttacagatgatggagatgctccaagagaagtccccacctcttcctgccct

SEQ ID NO: 171128 - DNA, 9689 bp, Homo sapiens
  Payload ID: 13671
  Gene Symbol: PPP1R9A
  Gene Name: protein phosphatase 1, regulatory subunit 9A
  Uniprot ID: Q9ULJ8
  ENST ID: ENST00000340694
  CDS Start-End: 283-3579
ctctcccgggattttgctgccgggctccctctctctgcggccctagagttaatcccatcagccgagatgaacctctagtcttgctttgaaaaaatcattctgtgtaactcttgactgtgactaagttcctaatacacctgttgggacgatcactgacaccgtataccatttgagaggtacttttcttgacccaatactggtgattagagaagagaggtatcttggtttttggtttttttctttgatcattatgaacattggcttttcacccctgaagtgaaaatgttgaaaactgagtcttcaggtgaacgaaccactctcagaagtgcctctcctcacaggaatgcatatcgaactgagtttcaggcactgaaaagtacctttgacaaacccaagtcagatggggaacaaaaaacaaaagaaggtgagggctcccagcagagcagggggaggaaatatggctccaatgtcaacagaattaaaaacctatttatgcagatgggtatggaacccaacgagaatgctgcagtcattgccaaaacaagggggaaaggtggacattcatctcctcagagaagaatgaagcccaaagaatttctggaaaaaacagatggctcagttgttaagttggagtcttctgtttctgaacgaattagtagatttgacactatgtacgatggcccttcatattccaagttcactgagactcgaaagatgtttgagagaagtgtgcatgaatcaggacagaacaaccgctattccccaaagaaagagaaagctggagggagtgaacctcaggatgaatggggaggttccaagtccaacagaggcagtactgattccttggacagccttagctcccgaactgaggctgtctccccaactgtgagtcaactgagtgcagtatttgagaacactgattctcccagtgccatcatttctgagaaggctgaaaacaatgaatactcagtgactgggcattatcccttgaatttaccatctgttactgttacaaatcttgacacatttggtcacctgaaggattctaattcctggcctccttcaaacaagcgaggtgttgatacagaggatgctcacaagagtaatgcaactccagtaccagaagtggcttctaaaagtacctctctagcttcgatacctggtgaagagatccagcagagcaaggaacccgaggactccacatctaatcaacagactcccgacagcattgacaaagatggtcctgaagaaccttgtgctgaaagtaaggcaatgccaaagtccgaaatcccttcaccacaaagccaactgttagaagatgctgaagctaatttggttggaagggaggcagcaaagcaacagaggaaagaacttgcaggtggtgatttcacctctcctgatgcttctgcatccagttgtggaaaagaagtacctgaagattcaaataattttgatggttcccatgtgtacatgcacagtgactataatgtgtatagggtgagatccaggtataattcagactggggagagacaggcactgagcaggatgaggaggaagatagtgatgagaacagttactatcagcctgatatggagtactcggaaattgttggattgccagaagaagaagaaatcccagcaaataggaaaattaagtttagtagtgctcctattaaggttttcaacacatactccaatgaagactatgacaggagaaatgacgaagttgaccctgtggctgcttcagctgagtatgaacttgaaaaacgtgtagaaaagctggaacttttcccagtggagctagagaaagatgaggatggtcttggtataagtattattggaatgggtgttggagcagatgctggacttgaaaagctgggaatattcgtcaagacagtaacagaaggtggtgctgctcaacgggatggcagaatacaagtcaatgaccagattgtggaagtggatggaatcagcttggtgggtgtgacacagaattttgcagcaacagttctcagaaacaccaagggcaacgtcagatttgttattgggcgggaaaaaccaggacaagtgagcgaggttgcccagttgataagccagacactggaacaggagaggcgccagagagagctgctggaacagcactatgcccagtatgatgccgacgatgacgagacaggagaatatgccacagatgaagaagaagatgaggtaggacctgtccttcctggcagcgacatggccattgaagtctttgagctgcctgagaatgaggacatgttttccccatcagaactggacacaagcaagctcagtcacaagttcaaagagttgcaaatcaaacatgcagttacagaagcagagattcaaaaattgaagaccaagctgcaggcagcagaaaatgagaaagtgaggtgggaactagaaaaaacccaactccaacaaaacatagaagagaataaggaaagaatgttgaagttggaaagctactggattgaggcccaaacattatgccacacagtgaatgagcatctcaaagagactcaaagccagtatcaggccttggaaaagaaatacaacaaggcaaagaagttgatcaaggattttcaacaaaaagagcttgatttcatcaaaagacaggaagcagaaagaaagaaaatagaagatttggaaaaagctcatcttgtggaagtgcaaggcctccaagtgcggattagagatttggaagctgaggtattcaggctactgaagcaaaatgggactcaagttaacaataataacaacatctttgagagaagaacatctcttggtgaagtctctaaaggggataccatggagaacttggatggcaagcagacatcttgccaagatggcctaagtcaagacttgaatgaagcagtcccagagacagagcgcctggattcaaaagcactgaaaactcgagcccagctctctgtgaagaacagacgccagagaccctctaggacaagactgtatgatagtgttagttccacagatggggaggacagtctagagagaaagaattttaccttcaatgatgacttcagtcccagcagtaccagttcagcagacctcagcggcttaggagcagaacctaaaacaccagggctctctcagtccttagcactgtcatcagatgagagcctggatatgatagatgacgagatccttgatgatggacagtctcccaaacacagtcagtgtcagaatcgggccgttcaggaatggagtgtgcagcaggtttctcactggttaatgagcctaaatctggagcagtatgtatctgaattcagtgcccaaaacatcactggagaacagctcctgcagttggatggaaataaacttaaggctcttggaatgacagcatcccaggaccgagcagtggtcaaaaagaaactcaaggaaatgaagatgtctctagagaaggctcggaaggcccaagagaaaatggaaaaacaaagagaaaagctaaggagaaaggagcaagagcaaatgcagaggaagtccaaaaagacagaaaagatgacgtcaactacagccgagggtgctggtgagcagtaacacataccctcttacagatgatggagatgctccaagagaagtccccacctcttcctgccctgctctcctccagaggatgaaaaagaaactaaatgataagggtaatgcggctctaggccggctgaggaactgtgtgttgaataactgcattttctgcaatagaatgcactcttaattttaactactaaaataatcccaagccacctttggttcattaacaaaccagagatttcatttaagtagctgtgttttgctcttctctaacttaccaacatcttgtgttgtgttgggtgtgttttgtcacttggagaactagtgtgaccccacccaagagcatgacacaccctggtgttgttaatggagcgccgtgaattttcagtgtgggatcctgaaatggcaattgcacatgtctgcatggcagagagcaccctgccatgagatctgagaccagtacttaacttctaggactgcaacacctactccaatgtgtgggaaagatttgctcttaattctcagtctggacagtgagaccaccccgctgtggaaacatgggtgctctgctctgtagttacctactaagggaaaaggcaagcaagtcattctgcttgctaggcatcaaaaagaaagaaaataaattatagctatttgttaaccactgaaaaaagcaaaagccttaagaatgtggatgtgggtattaccttggggttctgagggtaatatttatcctctagatacggctgaacaagaaagaaaaaaatcagacattaatgcagccatgggatattgggatctgttgaccttgctactgctgtgtgttcagcatttcagcaacactggcaaacacaacacagttcctcttccccctacctaacccaagaaattgaacaggaaattgatttttaaggaaaccaccattttcaggtttcctctcctggggaacattctggctggtcttcagcctgcctatgtcacaatcaggaactcatcacatattttctactcaagatttcccaggtgggctcagttagtattttaacaaatgtacttttaagaaaaatagaaataccagttagaggaaactgtcagttaacattttagagagattttgaatggtttttccgaaccattcctttccatacttcaaagattctcaattttacagaaaaagtttgtttaaggcagtgcataggtatactttagtagtggaggaacttatactaattttaagccagcattaaggatttccatgtttcaccaaactaagtcaagtgcaggagactggggcagaagaaggagaaaataaactcgttttgagaaatttcatgtgatgagggttttttgttttttatgctcatgtatctggttctctttgctgcgttgactctaaaaatgaggttatccactttccaaaggacaagtttcagaataagacttgaggccacatgaattcttggacagtattttacttcttttactttatgggaatctctgctctgttcccagcatctcgtatcttccactagaagtattccatatttagagcctcggcaaggcttttgagtgtaacagattaagggaactcccttgtagccccatcttgtattttaataacagtgtgatttttttttatctgaaaatctgaattcagaaattatctaaactggacatttttaattctgttttacccccaaggcctgttttcttttcattgccagagtattgtcggttatgcgtcagctcttttgtcattaggtacagacccttcattcaatcctcagaaacgttgacatgaagtaacattgtgttttacagttatcaaagtcaccattatgtttttctgtctgtcttcattaggggtatgataatgaaactgccgtattggatactctattaatgtcttgagatgtctggtgctttgttattttttcacatcatgagaaataagaagccactattaatgagtgatacaatttggcaaaacttttcaaatactaaaacactaaattagtaaaaatctggtaatattagtgcttgctattgtaaatttttgccatttttgcttatctttgggaaaaaagtgacctggatcacactggaagtttcactgtattcaagagtagaaatagaaggatgattatcttaagttatgtttacactttggtaatatttgaaaatggatgtatatactggaaatgtctgtaagtgtcttgtttttgcacctaatttatgatctattatattgcattttcttaaatatcttagaagtatttttctttataactttgtatattgaatgtttagataaatgtccaactgacaatgttataaatcaaattcttattcctaaaatcatttagtattataagtattttgattttttaagttaaattatagtaattttaggccgaagtgagttattttaacattaccacttaaaacggatgaaattgtaaaagtcatttggtttgattgccccacaaagcataagatgtaaactgattaagggtatgaaagcaaagtgaaagacctcagatcttgtgcacattttgttttcctattatttcttttattgactgtagtgcatgatacctaatcaaggctccaatgtcttgcacaattcctactttaatgctagtggttttcagtgtccttacaatttaacacagaattgttatttcatcaaccttaaaaactgcagtttttattatcagaaaatgaacaaaaagggaatatctggttgctatgaactgattccctaaaggagagctcagtatgattctaacaatagccaaaagtgttttggggtataggttatgctttgttgggagggaatgtgtggtgaggaggccaagctgcagacagaaagcattgtatgagctgtatctgggtcagggtttcccattaaaggatgttagttttataacagattactttgtttaagaccatctcccttcaagtaactcacagtttatgtaatactaatctcattctttttttacctgaatcaggaattttctgcagaatgttaagttagggaagaaacctcatttcatccattctaacactcctgatgaagtccccctttagtttcatgacaataaagctgttctgtggctatcatcctttagctgggattgacaattgatttcacaccctcaacatcacaagctttttttaacccacagcagttcatgattgcagtatgataggtactaaagccaaactcagctttcaactggcacaaaatgggactgtcaccttttgctccattgttgttggaaacaaagtggcaagagggaaaatgaggaaccagatttacctttgccactatctgtgaccctgtaatcatcactagcctgaaatcttaaaatatcccagtcccaagctacaaaaatggtcacaggtggtttgatctagcacctcggccgttagagtttgtgctgaagacaaatttgtctgggttcattgtgcaccagaattagcatgtgcttgaaaattgcattttataaaagggaaatgaaaatttgcatttatatagatactctgattcatgtttaagtgttaaaggttatgcagactaaacttcaagaggagatccagtgtttaacaatagtgttctagaggattctaaaggaagctgccccagcagccctgagagaaccatctatactttggatatgttgtagccccatcattacactgagatatttccatttgagtaactaaaggtactcctgacagagctggagatgaggggcattttggtgggcagtggtcactagggttcacgtcacctacttaatgcaaagaccttagtggtctcagaatgaaaaggtaaaatggaagagaaaagcacagtcctttcctgtcttttcaaatttactttttattaaggatgtacctgtgcactattctaaagctaagcatttaaggataaagtccagaaataaaatgtccatattttcttttcttttctttttttttttttttttctgtcatctgtcacccagactggactgcagtggtgccatcatgtcttactgcagcctcaaactcctgggctcaagtggtcctcctgcttcagcttcccaagtagctgggactacaggcatgtgccaccacccccagccaaaacatccatattttctattagaatggtttacattatgatgggggatggggagctgggggagggctgtacattcccaaaagaaagtagtgttataggaaatccaaatgcgcttcagtgattcactcctgaaaagcagcctgggtatgttggcagattttgtttgcatttgtcttgcgtatttaaagtctcaggaaatctagtcttggtccaaaacactggagaaaaaaataacaccagacaaaacacatttgagtaacttgaagtagcagcatagaataggcccaactaagaagttggaggggcaaagagaaagccgacagaatcagcttctcctggaaagtgaaagcatcaagttctatttatggtagacagagggtccttatttgcttgtccgtggtgtctatgtgggcctattgagggaatggtagttacttgaaggttcacatatgtaagcgtgtggacccagcacagtctgtgacctgattccagatcctcaagagtggagaaggaaagaaatatgatgatttcctatgcttgaccctaacccaaccccaaaactgctagggattcaacagtgagtaagatgtatgcaataagagaacagataacttctcaacaatgtgcatgccgtttgtgtagatgttcagaactacatatgtgtgaatatcactcccaccttacacacgcacacacactgcaatcacatggcattaaaaaatatattgtgtatggaacttggcgaggtcagtcaggacctggagctgtaatcatagccttattgccacttcttgcgttgtgtatacattgaatggctcatagattttaagagatttttttattgtaagtatttctactaaatgcacttatccttctatatgtttatatattttggtaaaattgatttatcagatacttggtattttagtaagaaaatttcctcaaatatttggctaatgctttgatgtcaagattgcatattgctgagttggagctcagaagaaatgtatgcagctaaaaattgcactgtgtgttcttgtgaatttgctcacaattctaaaatgacataattggtggctgtgatgcttacagtcactgcctactggctctcttatgatgaatgttgccatcatatgatcatttatttactttttgtgcaagcaatggcattttggttgttgccaaaaacaacacaagtggttgggagtgtatgttgttggaaggtgtacacttctgtttctttcagctgtattatttatacacccaggttttctgttaaggatgtaatcattcattcaagaaagaacaattggcaagaaataattaaattaccttaaaaagaattaagaggcactccagccagataacacctcccaacaacatgaaatttagttagtgcttagtgaaattccttaaatatatatgtatatgttttcttcaacattatttaatataactactgcttttatattttttaatggtgttgcaaccacttgtacacctgctacaccttactgacaaaactgggcagctgaaaataaaagagaataaattctattccactgtaagaagttgatttcttttcagctttctttgtatatcagtaaagaacacgaattgtttgaaaataattttaagtctgataagtatggatagcatgttacctaagcttttaatttgtacattttgatgtctgatcatttgcatggaagagacaatagtgccacgtctgaattgttctcttgtgcttggttaatatgtacttctctagattgttcaaaaagtttcaaatgacattccttactctttggttttcagaggcattcaagcaaaatatcacagtggtcttttgttttctgaccaatctaacaatacctgtgattaaatttaatttgttagtgtaaataaatttcttgccaatgagtattattgttgttagacaacgaatgcaataaaaagaaatactgaggtctgttgaagc

SEQ ID NO: 171129 - DNA, 512 bp, Homo sapiens
  Payload ID: 13671
  Gene Symbol: PPP1R9A
  Gene Name: protein phosphatase 1, regulatory subunit 9A
  ENST ID: ENST00000422324
  CDS Start-End: 389-512
gcggccgccgcagccgccctacgcgctgcgccgtgaggagcgggttgcggtgtacccagcgggccggcgccgagccgagccgccgcgtccaccgtggggcggggggcgcctgcgaggagggggtgggagccgcggcggcccgaccctccccgcccgcggcgctcccgctcggatgaacctctagtcttgctttgaaaaaatcattctgtgtaactcttgactgtgactaagttcctaatacacctgttgggacgatcactgacaccgtataccatttgagaggtacttttcttgacccaatactggtgattagagaagagaggtatcttggtttttggtttttttctttgatcattatgaacattggcttttcacccctgaagtgaaaatgttgaaaactgagtcttcaggtgaacgaaccactctcagaagtgcctctcctcacaggaatgcatatcgaactgagtttcaggcactgaaaagtacctttgacaaacccaagtcagatgggg

SEQ ID NO: 171130 - DNA, 9928 bp, Homo sapiens
  Payload ID: 13671
  Gene Symbol: PPP1R9A
  Gene Name: protein phosphatase 1, regulatory subunit 9A
  Uniprot ID: Q9ULJ8
  ENST ID: ENST00000433881
  CDS Start-End: 533-3829
attatcagtgggatctattgtttcctggcacattgggaggaaaaacaaagggatttattttcattaccctgtaattttttttcttttctatttttttaaatgtggccagggagctcgtctctctccgtgtcacagtgggatccgcctggcagccgccgggagctgcagccaatgtgttaggacttcaggtgcttcttggcacaaagctagactgcgacctcctaccatagcgcttggcgtcacctgctctcccggtcctgccccagggccgagggattgcgtcccgaaccgggcttgggaatcggctgcctctcaaatgaacctctagtcttgctttgaaaaaatcattctgtgtaactcttgactgtgactaagttcctaatacacctgttgggacgatcactgacaccgtataccatttgagaggtacttttcttgacccaatactggtgattagagaagagaggtatcttggtttttggtttttttctttgatcattatgaacattggcttttcacccctgaagtgaaaatgttgaaaactgagtcttcaggtgaacgaaccactctcagaagtgcctctcctcacaggaatgcatatcgaactgagtttcaggcactgaaaagtacctttgacaaacccaagtcagatggggaacaaaaaacaaaagaaggtgagggctcccagcagagcagggggaggaaatatggctccaatgtcaacagaattaaaaacctatttatgcagatgggtatggaacccaacgagaatgctgcagtcattgccaaaacaagggggaaaggtggacattcatctcctcagagaagaatgaagcccaaagaatttctggaaaaaacagatggctcagttgttaagttggagtcttctgtttctgaacgaattagtagatttgacactatgtacgatggcccttcatattccaagttcactgagactcgaaagatgtttgagagaagtgtgcatgaatcaggacagaacaaccgctattccccaaagaaagagaaagctggagggagtgaacctcaggatgaatggggaggttccaagtccaacagaggcagtactgattccttggacagccttagctcccgaactgaggctgtctccccaactgtgagtcaactgagtgcagtatttgagaacactgattctcccagtgccatcatttctgagaaggctgaaaacaatgaatactcagtgactgggcattatcccttgaatttaccatctgttactgttacaaatcttgacacatttggtcacctgaaggattctaattcctggcctccttcaaacaagcgaggtgttgatacagaggatgctcacaagagtaatgcaactccagtaccagaagtggcttctaaaagtacctctctagcttcgatacctggtgaagagatccagcagagcaaggaacccgaggactccacatctaatcaacagactcccgacagcattgacaaagatggtcctgaagaaccttgtgctgaaagtaaggcaatgccaaagtccgaaatcccttcaccacaaagccaactgttagaagatgctgaagctaatttggttggaagggaggcagcaaagcaacagaggaaagaacttgcaggtggtgatttcacctctcctgatgcttctgcatccagttgtggaaaagaagtacctgaagattcaaataattttgatggttcccatgtgtacatgcacagtgactataatgtgtatagggtgagatccaggtataattcagactggggagagacaggcactgagcaggatgaggaggaagatagtgatgagaacagttactatcagcctgatatggagtactcggaaattgttggattgccagaagaagaagaaatcccagcaaataggaaaattaagtttagtagtgctcctattaaggttttcaacacatactccaatgaagactatgacaggagaaatgacgaagttgaccctgtggctgcttcagctgagtatgaacttgaaaaacgtgtagaaaagctggaacttttcccagtggagctagagaaagatgaggatggtcttggtataagtattattggaatgggtgttggagcagatgctggacttgaaaagctgggaatattcgtcaagacagtaacagaaggtggtgctgctcaacgggatggcagaatacaagtcaatgaccagattgtggaagtggatggaatcagcttggtgggtgtgacacagaattttgcagcaacagttctcagaaacaccaagggcaacgtcagatttgttattgggcgggaaaaaccaggacaagtgagcgaggttgcccagttgataagccagacactggaacaggagaggcgccagagagagctgctggaacagcactatgcccagtatgatgccgacgatgacgagacaggagaatatgccacagatgaagaagaagatgaggtaggacctgtccttcctggcagcgacatggccattgaagtctttgagctgcctgagaatgaggacatgttttccccatcagaactggacacaagcaagctcagtcacaagttcaaagagttgcaaatcaaacatgcagttacagaagcagagattcaaaaattgaagaccaagctgcaggcagcagaaaatgagaaagtgaggtgggaactagaaaaaacccaactccaacaaaacatagaagagaataaggaaagaatgttgaagttggaaagctactggattgaggcccaaacattatgccacacagtgaatgagcatctcaaagagactcaaagccagtatcaggccttggaaaagaaatacaacaaggcaaagaagttgatcaaggattttcaacaaaaagagcttgatttcatcaaaagacaggaagcagaaagaaagaaaatagaagatttggaaaaagctcatcttgtggaagtgcaaggcctccaagtgcggattagagatttggaagctgaggtattcaggctactgaagcaaaatgggactcaagttaacaataataacaacatctttgagagaagaacatctcttggtgaagtctctaaaggggataccatggagaacttggatggcaagcagacatcttgccaagatggcctaagtcaagacttgaatgaagcagtcccagagacagagcgcctggattcaaaagcactgaaaactcgagcccagctctctgtgaagaacagacgccagagaccctctaggacaagactgtatgatagtgttagttccacagatggggaggacagtctagagagaaagaattttaccttcaatgatgacttcagtcccagcagtaccagttcagcagacctcagcggcttaggagcagaacctaaaacaccagggctctctcagtccttagcactgtcatcagatgagagcctggatatgatagatgacgagatccttgatgatggacagtctcccaaacacagtcagtgtcagaatcgggccgttcaggaatggagtgtgcagcaggtttctcactggttaatgagcctaaatctggagcagtatgtatctgaattcagtgcccaaaacatcactggagaacagctcctgcagttggatggaaataaacttaaggctcttggaatgacagcatcccaggaccgagcagtggtcaaaaagaaactcaaggaaatgaagatgtctctagagaaggctcggaaggcccaagagaaaatggaaaaacaaagagaaaagctaaggagaaaggagcaagagcaaatgcagaggaagtccaaaaagacagaaaagatgacgtcaactacagccgagggtgctggtgagcagtaacacataccctcttacagatgatggagatgctccaagagaagtccccacctcttcctgccctgctctcctccagaggatgaaaaagaaactaaatgataagggtaatgcggctctaggccggctgaggaactgtgtgttgaataactgcattttctgcaatagaatgcactcttaattttaactactaaaataatcccaagccacctttggttcattaacaaaccagagatttcatttaagtagctgtgttttgctcttctctaacttaccaacatcttgtgttgtgttgggtgtgttttgtcacttggagaactagtgtgaccccacccaagagcatgacacaccctggtgttgttaatggagcgccgtgaattttcagtgtgggatcctgaaatggcaattgcacatgtctgcatggcagagagcaccctgccatgagatctgagaccagtacttaacttctaggactgcaacacctactccaatgtgtgggaaagatttgctcttaattctcagtctggacagtgagaccaccccgctgtggaaacatgggtgctctgctctgtagttacctactaagggaaaaggcaagcaagtcattctgcttgctaggcatcaaaaagaaagaaaataaattatagctatttgttaaccactgaaaaaagcaaaagccttaagaatgtggatgtgggtattaccttggggttctgagggtaatatttatcctctagatacggctgaacaagaaagaaaaaaatcagacattaatgcagccatgggatattgggatctgttgaccttgctactgctgtgtgttcagcatttcagcaacactggcaaacacaacacagttcctcttccccctacctaacccaagaaattgaacaggaaattgatttttaaggaaaccaccattttcaggtttcctctcctggggaacattctggctggtcttcagcctgcctatgtcacaatcaggaactcatcacatattttctactcaagatttcccaggtgggctcagttagtattttaacaaatgtacttttaagaaaaatagaaataccagttagaggaaactgtcagttaacattttagagagattttgaatggtttttccgaaccattcctttccatacttcaaagattctcaattttacagaaaaagtttgtttaaggcagtgcataggtatactttagtagtggaggaacttatactaattttaagccagcattaaggatttccatgtttcaccaaactaagtcaagtgcaggagactggggcagaagaaggagaaaataaactcgttttgagaaatttcatgtgatgagggttttttgttttttatgctcatgtatctggttctctttgctgcgttgactctaaaaatgaggttatccactttccaaaggacaagtttcagaataagacttgaggccacatgaattcttggacagtattttacttcttttactttatgggaatctctgctctgttcccagcatctcgtatcttccactagaagtattccatatttagagcctcggcaaggcttttgagtgtaacagattaagggaactcccttgtagccccatcttgtattttaataacagtgtgatttttttttatctgaaaatctgaattcagaaattatctaaactggacatttttaattctgttttacccccaaggcctgttttcttttcattgccagagtattgtcggttatgcgtcagctcttttgtcattaggtacagacccttcattcaatcctcagaaacgttgacatgaagtaacattgtgttttacagttatcaaagtcaccattatgtttttctgtctgtcttcattaggggtatgataatgaaactgccgtattggatactctattaatgtcttgagatgtctggtgctttgttattttttcacatcatgagaaataagaagccactattaatgagtgatacaatttggcaaaacttttcaaatactaaaacactaaattagtaaaaatctggtaatattagtgcttgctattgtaaatttttgccatttttgcttatctttgggaaaaaagtgacctggatcacactggaagtttcactgtattcaagagtagaaatagaaggatgattatcttaagttatgtttacactttggtaatatttgaaaatggatgtatatactggaaatgtctgtaagtgtcttgtttttgcacctaatttatgatctattatattgcattttcttaaatatcttagaagtatttttctttataactttgtatattgaatgtttagataaatgtccaactgacaatgttataaatcaaattcttattcctaaaatcatttagtattataagtattttgattttttaagttaaattatagtaattttaggccgaagtgagttattttaacattaccacttaaaacggatgaaattgtaaaagtcatttggtttgattgccccacaaagcataagatgtaaactgattaagggtatgaaagcaaagtgaaagacctcagatcttgtgcacattttgttttcctattatttcttttattgactgtagtgcatgatacctaatcaaggctccaatgtcttgcacaattcctactttaatgctagtggttttcagtgtccttacaatttaacacagaattgttatttcatcaaccttaaaaactgcagtttttattatcagaaaatgaacaaaaagggaatatctggttgctatgaactgattccctaaaggagagctcagtatgattctaacaatagccaaaagtgttttggggtataggttatgctttgttgggagggaatgtgtggtgaggaggccaagctgcagacagaaagcattgtatgagctgtatctgggtcagggtttcccattaaaggatgttagttttataacagattactttgtttaagaccatctcccttcaagtaactcacagtttatgtaatactaatctcattctttttttacctgaatcaggaattttctgcagaatgttaagttagggaagaaacctcatttcatccattctaacactcctgatgaagtccccctttagtttcatgacaataaagctgttctgtggctatcatcctttagctgggattgacaattgatttcacaccctcaacatcacaagctttttttaacccacagcagttcatgattgcagtatgataggtactaaagccaaactcagctttcaactggcacaaaatgggactgtcaccttttgctccattgttgttggaaacaaagtggcaagagggaaaatgaggaaccagatttacctttgccactatctgtgaccctgtaatcatcactagcctgaaatcttaaaatatcccagtcccaagctacaaaaatggtcacaggtggtttgatctagcacctcggccgttagagtttgtgctgaagacaaatttgtctgggttcattgtgcaccagaattagcatgtgcttgaaaattgcattttataaaagggaaatgaaaatttgcatttatatagatactctgattcatgtttaagtgttaaaggttatgcagactaaacttcaagaggagatccagtgtttaacaatagtgttctagaggattctaaaggaagctgccccagcagccctgagagaaccatctatactttggatatgttgtagccccatcattacactgagatatttccatttgagtaactaaaggtactcctgacagagctggagatgaggggcattttggtgggcagtggtcactagggttcacgtcacctacttaatgcaaagaccttagtggtctcagaatgaaaaggtaaaatggaagagaaaagcacagtcctttcctgtcttttcaaatttactttttattaaggatgtacctgtgcactattctaaagctaagcatttaaggataaagtccagaaataaaatgtccatattttcttttcttttctttttttttttttttttctgtcatctgtcacccagactggactgcagtggtgccatcatgtcttactgcagcctcaaactcctgggctcaagtggtcctcctgcttcagcttcccaagtagctgggactacaggcatgtgccaccacccccagccaaaacatccatattttctattagaatggtttacattatgatgggggatggggagctgggggagggctgtacattcccaaaagaaagtagtgttataggaaatccaaatgcgcttcagtgattcactcctgaaaagcagcctgggtatgttggcagattttgtttgcatttgtcttgcgtatttaaagtctcaggaaatctagtcttggtccaaaacactggagaaaaaaataacaccagacaaaacacatttgagtaacttgaagtagcagcatagaataggcccaactaagaagttggaggggcaaagagaaagccgacagaatcagcttctcctggaaagtgaaagcatcaagttctatttatggtagacagagggtccttatttgcttgtccgtggtgtctatgtgggcctattgagggaatggtagttacttgaaggttcacatatgtaagcgtgtggacccagcacagtctgtgacctgattccagatcctcaagagtggagaaggaaagaaatatgatgatttcctatgcttgaccctaacccaaccccaaaactgctagggattcaacagtgagtaagatgtatgcaataagagaacagataacttctcaacaatgtgcatgccgtttgtgtagatgttcagaactacatatgtgtgaatatcactcccaccttacacacgcacacacactgcaatcacatggcattaaaaaatatattgtgtatggaacttggcgaggtcagtcaggacctggagctgtaatcatagccttattgccacttcttgcgttgtgtatacattgaatggctcatagattttaagagatttttttattgtaagtatttctactaaatgcacttatccttctatatgtttatatattttggtaaaattgatttatcagatacttggtattttagtaagaaaatttcctcaaatatttggctaatgctttgatgtcaagattgcatattgctgagttggagctcagaagaaatgtatgcagctaaaaattgcactgtgtgttcttgtgaatttgctcacaattctaaaatgacataattggtggctgtgatgcttacagtcactgcctactggctctcttatgatgaatgttgccatcatatgatcatttatttactttttgtgcaagcaatggcattttggttgttgccaaaaacaacacaagtggttgggagtgtatgttgttggaaggtgtacacttctgtttctttcagctgtattatttatacacccaggttttctgttaaggatgtaatcattcattcaagaaagaacaattggcaagaaataattaaattaccttaaaaagaattaagaggcactccagccagataacacctcccaacaacatgaaatttagttagtgcttagtgaaattccttaaatatatatgtatatgttttcttcaacattatttaatataactactgcttttatattttttaatggtgttgcaaccacttgtacacctgctacaccttactgacaaaactgggcagctgaaaataaaagagaataaattctattccactgtaagaagttgatttcttttcagctttctttgtatatcagtaaagaacacgaattgtttgaaaataattttaagtctgataagtatggatagcatgttacctaagcttttaatttgtacattttgatgtctgatcatttgcatggaagagacaatagtgccacgtctgaattgttctcttgtgcttggttaatatgtacttctctagattgttcaaaaagtttcaaatgacattccttactctttggttttcagaggcattcaagcaaaatatcacagtggtcttttgttttctgaccaatctaacaatacctgtgattaaatttaatttgttagtgtaaataaatttcttgccaatgagtattattgttgttagacaacgaatgcaataaaaagaaatactgagg

SEQ ID NO: 171131 - DNA, 10090 bp, Homo sapiens
  Payload ID: 13671
  Gene Symbol: PPP1R9A
  Gene Name: protein phosphatase 1, regulatory subunit 9A
  Uniprot ID: Q9ULJ8
  ENST ID: ENST00000456331
  CDS Start-End: 217-3978
atgaacctctagtcttgctttgaaaaaatcattctgtgtaactcttgactgtgactaagttcctaatacacctgttgggacgatcactgacaccgtataccatttgagaggtacttttcttgacccaatactggtgattagagaagagaggtatcttggtttttggtttttttctttgatcattatgaacattggcttttcacccctgaagtgaaaatgttgaaaactgagtcttcaggtgaacgaaccactctcagaagtgcctctcctcacaggaatgcatatcgaactgagtttcaggcactgaaaagtacctttgacaaacccaagtcagatggggaacaaaaaacaaaagaaggtgagggctcccagcagagcagggggaggaaatatggctccaatgtcaacagaattaaaaacctatttatgcagatgggtatggaacccaacgagaatgctgcagtcattgccaaaacaagggggaaaggtggacattcatctcctcagagaagaatgaagcccaaagaatttctggaaaaaacagatggctcagttgttaagttggagtcttctgtttctgaacgaattagtagatttgacactatgtacgatggcccttcatattccaagttcactgagactcgaaagatgtttgagagaagtgtgcatgaatcaggacagaacaaccgctattccccaaagaaagagaaagctggagggagtgaacctcaggatgaatggggaggttccaagtccaacagaggcagtactgattccttggacagccttagctcccgaactgaggctgtctccccaactgtgagtcaactgagtgcagtatttgagaacactgattctcccagtgccatcatttctgagaaggctgaaaacaatgaatactcagtgactgggcattatcccttgaatttaccatctgttactgttacaaatcttgacacatttggtcacctgaaggattctaattcctggcctccttcaaacaagcgaggtgttgatacagaggatgctcacaagagtaatgcaactccagtaccagaagtggcttctaaaagtacctctctagcttcgatacctggtgaagagatccagcagagcaaggaacccgaggactccacatctaatcaacagactcccgacagcattgacaaagatggtcctgaagaaccttgtgctgaaagtaaggcaatgccaaagtccgaaatcccttcaccacaaagccaactgttagaagatgctgaagctaatttggttggaagggaggcagcaaagcaacagaggaaagaacttgcaggtggtgatttcacctctcctgatgcttctgcatccagttgtggaaaagaagtacctgaagattcaaataattttgatggttcccatgtgtacatgcacagtgactataatgtgtatagggtgagatccaggtataattcagactggggagagacaggcactgagcaggatgaggaggaagatagtgatgagaacagttactatcagcctgatatggagtactcggaaattgttggattgccagaagaagaagaaatcccagcaaataggaaaattaagtttagtagtgctcctattaaggttttcaacacatactccaatgaagactatgacaggagaaatgacgaagttgaccctgtggctgcttcagctgagtatgaacttgaaaaacgtgtagaaaagctggaacttttcccagtggagctagagaaagatgaggatggtcttggtataagtattattggaatgggtgttggagcagatgctggacttgaaaagctgggaatattcgtcaagacagtaacagaaggtggtgctgctcaacgggatggcagaatacaagtcaatgaccagattgtggaagtggatggaatcagcttggtgggtgtgacacagaattttgcagcaacagttctcagaaacaccaagggcaacgtcagatttgttattgggcgggaaaaaccaggacaagtgagcgaggttgcccagttgataagccagacactggaacaggagaggcgccagagagagctgctggaacagcactatgcccagtatgatgccgacgatgacgagacaggagaatatgccacagatgaagaagaagatgaggtaggacctgtccttcctggcagcgacatggccattgaagtctttgagctgcctgagaatgaggacatgttttccccatcagaactggacacaagcaagctcagtcacaagttcaaagagttgcaaatcaaacatgcagttacagaagcagagattcaaaaattgaagaccaagctgcaggcagcagaaaatgagaaagtgaggtgggaactagaaaaaacccaactccaacaaaacatagaagagaataaggaaagaatgttgaagttggaaagctactggattgaggcccaaacattatgccacacagtgaatgagcatctcaaagagactcaaagccagtatcaggccttggaaaagaaatacaacaaggcaaagaagttgatcaaggattttcaacaaaaagagcttgatttcatcaaaagacaggaagcagaaagaaagaaaatagaagatttggaaaaagctcatcttgtggaagtgcaaggcctccaagtgcggattagagatttggaagctgaggtattcaggctactgaagcaaaatgggactcaagttaacaataataacaacatctttgagagaagaacatctcttggtgaagtctctaaaggggataccatggagaacttggatggcaagcagacatcttgccaagatggcctaagtcaagacttgaatgaagcagtcccagagacagagcgcctggattcaaaagcactgaaaactcgagcccagctctctgtgaagaacagacgccagagaccctctaggacaagactgtatgatagtgttagttccacagatggggaggacagtctagagagaaagccatcaaacagtttctataaccacatgcatattaccaaattacttccacctaagggtttgagaacgtcttctccagaatcagattctggtgttccacccctcaccccggtggatagcaatgtgcccttctcgtctgaccacatagctgaatttcaagaagaaccactggacccagaaatggggcctctctcctctatgtggggagacacttcactgttttctacttcaaagtctgatcatgatgtggaagaatctccttgccatcaccaaaccaccaacaagaaaatattacgagaaaaagatgatgccaaagatcccaaatcactaagggcatccagttcattggcggtgcaaggaggaaaaattaagcggaagtttgtggatctgggggcgcctttgcgaaggaattccagcaagggaaagaagtggaaagaaaaagaaaaagaagccagtaggttttctgcaggtagcaggatcttcagaggcagactggaaaactggacacccaagccatgttcaacagctcagacctccactcgttccccttgcatgcctttctcatggtttaatgacagccggaaaggatcctattccttcaggaacctgcctgcgcctacaagttcccttcagccttctcctgagactctaatttcagataaaaaggggtccaagaattttaccttcaatgatgacttcagtcccagcagtaccagttcagcagacctcagcggcttaggagcagaacctaaaacaccagggctctctcagtccttagcactgtcatcagatgaggctcttggaatgacagcatcccaggaccgagcagtggtcaaaaagaaactcaaggaaatgaagatgtctctagagaaggctcggaaggcccaagagaaaatggaaaaacaaagagaaaagctaaggagaaaggagcaagagcaaatgcagaggaagtccaaaaagacagaaaagatgacgtcaactacagccgagggtgctggtgagcagtaacacataccctcttacagatgatggagatgctccaagagaagtccccacctcttcctgccctgctctcctccagaggatgaaaaagaaactaaatgataagggtaatgcggctctaggccggctgaggaactgtgtgttgaataactgcattttctgcaatagaatgcactcttaattttaactactaaaataatcccaagccacctttggttcattaacaaaccagagatttcatttaagtagctgtgttttgctcttctctaacttaccaacatcttgtgttgtgttgggtgtgttttgtcacttggagaactagtgtgaccccacccaagagcatgacacaccctggtgttgttaatggagcgccgtgaattttcagtgtgggatcctgaaatggcaattgcacatgtctgcatggcagagagcaccctgccatgagatctgagaccagtacttaacttctaggactgcaacacctactccaatgtgtgggaaagatttgctcttaattctcagtctggacagtgagaccaccccgctgtggaaacatgggtgctctgctctgtagttacctactaagggaaaaggcaagcaagtcattctgcttgctaggcatcaaaaagaaagaaaataaattatagctatttgttaaccactgaaaaaagcaaaagccttaagaatgtggatgtgggtattaccttggggttctgagggtaatatttatcctctagatacggctgaacaagaaagaaaaaaatcagacattaatgcagccatgggatattgggatctgttgaccttgctactgctgtgtgttcagcatttcagcaacactggcaaacacaacacagttcctcttccccctacctaacccaagaaattgaacaggaaattgatttttaaggaaaccaccattttcaggtttcctctcctggggaacattctggctggtcttcagcctgcctatgtcacaatcaggaactcatcacatattttctactcaagatttcccaggtgggctcagttagtattttaacaaatgtacttttaagaaaaatagaaataccagttagaggaaactgtcagttaacattttagagagattttgaatggtttttccgaaccattcctttccatacttcaaagattctcaattttacagaaaaagtttgtttaaggcagtgcataggtatactttagtagtggaggaacttatactaattttaagccagcattaaggatttccatgtttcaccaaactaagtcaagtgcaggagactggggcagaagaaggagaaaataaactcgttttgagaaatttcatgtgatgagggttttttgttttttatgctcatgtatctggttctctttgctgcgttgactctaaaaatgaggttatccactttccaaaggacaagtttcagaataagacttgaggccacatgaattcttggacagtattttacttcttttactttatgggaatctctgctctgttcccagcatctcgtatcttccactagaagtattccatatttagagcctcggcaaggcttttgagtgtaacagattaagggaactcccttgtagccccatcttgtattttaataacagtgtgatttttttttatctgaaaatctgaattcagaaattatctaaactggacatttttaattctgttttacccccaaggcctgttttcttttcattgccagagtattgtcggttatgcgtcagctcttttgtcattaggtacagacccttcattcaatcctcagaaacgttgacatgaagtaacattgtgttttacagttatcaaagtcaccattatgtttttctgtctgtcttcattaggggtatgataatgaaactgccgtattggatactctattaatgtcttgagatgtctggtgctttgttattttttcacatcatgagaaataagaagccactattaatgagtgatacaatttggcaaaacttttcaaatactaaaacactaaattagtaaaaatctggtaatattagtgcttgctattgtaaatttttgccatttttgcttatctttgggaaaaaagtgacctggatcacactggaagtttcactgtattcaagagtagaaatagaaggatgattatcttaagttatgtttacactttggtaatatttgaaaatggatgtatatactggaaatgtctgtaagtgtcttgtttttgcacctaatttatgatctattatattgcattttcttaaatatcttagaagtatttttctttataactttgtatattgaatgtttagataaatgtccaactgacaatgttataaatcaaattcttattcctaaaatcatttagtattataagtattttgattttttaagttaaattatagtaattttaggccgaagtgagttattttaacattaccacttaaaacggatgaaattgtaaaagtcatttggtttgattgccccacaaagcataagatgtaaactgattaagggtatgaaagcaaagtgaaagacctcagatcttgtgcacattttgttttcctattatttcttttattgactgtagtgcatgatacctaatcaaggctccaatgtcttgcacaattcctactttaatgctagtggttttcagtgtccttacaatttaacacagaattgttatttcatcaaccttaaaaactgcagtttttattatcagaaaatgaacaaaaagggaatatctggttgctatgaactgattccctaaaggagagctcagtatgattctaacaatagccaaaagtgttttggggtataggttatgctttgttgggagggaatgtgtggtgaggaggccaagctgcagacagaaagcattgtatgagctgtatctgggtcagggtttcccattaaaggatgttagttttataacagattactttgtttaagaccatctcccttcaagtaactcacagtttatgtaatactaatctcattctttttttacctgaatcaggaattttctgcagaatgttaagttagggaagaaacctcatttcatccattctaacactcctgatgaagtccccctttagtttcatgacaataaagctgttctgtggctatcatcctttagctgggattgacaattgatttcacaccctcaacatcacaagctttttttaacccacagcagttcatgattgcagtatgataggtactaaagccaaactcagctttcaactggcacaaaatgggactgtcaccttttgctccattgttgttggaaacaaagtggcaagagggaaaatgaggaaccagatttacctttgccactatctgtgaccctgtaatcatcactagcctgaaatcttaaaatatcccagtcccaagctacaaaaatggtcacaggtggtttgatctagcacctcggccgttagagtttgtgctgaagacaaatttgtctgggttcattgtgcaccagaattagcatgtgcttgaaaattgcattttataaaagggaaatgaaaatttgcatttatatagatactctgattcatgtttaagtgttaaaggttatgcagactaaacttcaagaggagatccagtgtttaacaatagtgttctagaggattctaaaggaagctgccccagcagccctgagagaaccatctatactttggatatgttgtagccccatcattacactgagatatttccatttgagtaactaaaggtactcctgacagagctggagatgaggggcattttggtgggcagtggtcactagggttcacgtcacctacttaatgcaaagaccttagtggtctcagaatgaaaaggtaaaatggaagagaaaagcacagtcctttcctgtcttttcaaatttactttttattaaggatgtacctgtgcactattctaaagctaagcatttaaggataaagtccagaaataaaatgtccatattttcttttcttttctttttttttttttttttctgtcatctgtcacccagactggactgcagtggtgccatcatgtcttactgcagcctcaaactcctgggctcaagtggtcctcctgcttcagcttcccaagtagctgggactacaggcatgtgccaccacccccagccaaaacatccatattttctattagaatggtttacattatgatgggggatggggagctgggggagggctgtacattcccaaaagaaagtagtgttataggaaatccaaatgcgcttcagtgattcactcctgaaaagcagcctgggtatgttggcagattttgtttgcatttgtcttgcgtatttaaagtctcaggaaatctagtcttggtccaaaacactggagaaaaaaataacaccagacaaaacacatttgagtaacttgaagtagcagcatagaataggcccaactaagaagttggaggggcaaagagaaagccgacagaatcagcttctcctggaaagtgaaagcatcaagttctatttatggtagacagagggtccttatttgcttgtccgtggtgtctatgtgggcctattgagggaatggtagttacttgaaggttcacatatgtaagcgtgtggacccagcacagtctgtgacctgattccagatcctcaagagtggagaaggaaagaaatatgatgatttcctatgcttgaccctaacccaaccccaaaactgctagggattcaacagtgagtaagatgtatgcaataagagaacagataacttctcaacaatgtgcatgccgtttgtgtagatgttcagaactacatatgtgtgaatatcactcccaccttacacacgcacacacactgcaatcacatggcattaaaaaatatattgtgtatggaacttggcgaggtcagtcaggacctggagctgtaatcatagccttattgccacttcttgcgttgtgtatacattgaatggctcatagattttaagagatttttttattgtaagtatttctactaaatgcacttatccttctatatgtttatatattttggtaaaattgatttatcagatacttggtattttagtaagaaaatttcctcaaatatttggctaatgctttgatgtcaagattgcatattgctgagttggagctcagaagaaatgtatgcagctaaaaattgcactgtgtgttcttgtgaatttgctcacaattctaaaatgacataattggtggctgtgatgcttacagtcactgcctactggctctcttatgatgaatgttgccatcatatgatcatttatttactttttgtgcaagcaatggcattttggttgttgccaaaaacaacacaagtggttgggagtgtatgttgttggaaggtgtacacttctgtttctttcagctgtattatttatacacccaggttttctgttaaggatgtaatcattcattcaagaaagaacaattggcaagaaataattaaattaccttaaaaagaattaagaggcactccagccagataacacctcccaacaacatgaaatttagttagtgcttagtgaaattccttaaatatatatgtatatgttttcttcaacattatttaatataactactgcttttatattttttaatggtgttgcaaccacttgtacacctgctacaccttactgacaaaactgggcagctgaaaataaaagagaataaattctattccactgtaagaagttgatttcttttcagctttctttgtatatcagtaaagaacacgaattgtttgaaaataattttaagtctgataagtatggatagcatgttacctaagcttttaatttgtacattttgatgtctgatcatttgcatggaagagacaatagtgccacgtctgaattgttctcttgtgcttggttaatatgtacttctctagattgttcaaaaagtttcaaatgacattccttactctttggttttcagaggcattcaagcaaaatatcacagtggtcttttgttttctgaccaatctaacaatacctgtgattaaatttaatttgttagtgtaaataaatttcttgccaatgagtattattgttgttagacaacgaatgcaataaaaagaaatactgaggtctgttgaagcaa

SEQ ID NO: 171132 - DNA, 5369 bp, Homo sapiens
  Payload ID: 13671
  Gene Symbol: PPP1R9A
  Gene Name: protein phosphatase 1, regulatory subunit 9A
  Uniprot ID: Q9ULJ8
  ENST ID: ENST00000433360
  CDS Start-End: 283-4407
ctctcccgggattttgctgccgggctccctctctctgcggccctagagttaatcccatcagccgagatgaacctctagtcttgctttgaaaaaatcattctgtgtaactcttgactgtgactaagttcctaatacacctgttgggacgatcactgacaccgtataccatttgagaggtacttttcttgacccaatactggtgattagagaagagaggtatcttggtttttggtttttttctttgatcattatgaacattggcttttcacccctgaagtgaaaatgttgaaaactgagtcttcaggtgaacgaaccactctcagaagtgcctctcctcacaggaatgcatatcgaactgagtttcaggcactgaaaagtacctttgacaaacccaagtcagatggggaacaaaaaacaaaagaaggtgagggctcccagcagagcagggggaggaaatatggctccaatgtcaacagaattaaaaacctatttatgcagatgggtatggaacccaacgagaatgctgcagtcattgccaaaacaagggggaaaggtggacattcatctcctcagagaagaatgaagcccaaagaatttctggaaaaaacagatggctcagttgttaagttggagtcttctgtttctgaacgaattagtagatttgacactatgtacgatggcccttcatattccaagttcactgagactcgaaagatgtttgagagaagtgtgcatgaatcaggacagaacaaccgctattccccaaagaaagagaaagctggagggagtgaacctcaggatgaatggggaggttccaagtccaacagaggcagtactgattccttggacagccttagctcccgaactgaggctgtctccccaactgtgagtcaactgagtgcagtatttgagaacactgattctcccagtgccatcatttctgagaaggctgaaaacaatgaatactcagtgactgggcattatcccttgaatttaccatctgttactgttacaaatcttgacacatttggtcacctgaaggattctaattcctggcctccttcaaacaagcgaggtgttgatacagaggatgctcacaagagtaatgcaactccagtaccagaagtggcttctaaaagtacctctctagcttcgatacctggtgaagagatccagcagagcaaggaacccgaggactccacatctaatcaacagactcccgacagcattgacaaagatggtcctgaagaaccttgtgctgaaagtaaggcaatgccaaagtccgaaatcccttcaccacaaagccaactgttagaagatgctgaagctaatttggttggaagggaggcagcaaagcaacagaggaaagaacttgcaggtggtgatttcacctctcctgatgcttctgcatccagttgtggaaaagaagtacctgaagattcaaataattttgatggttcccatgtgtacatgcacagtgactataatgtgtatagggtgagatccaggtataattcagactggggagagacaggcactgagcaggatgaggaggaagatagtgatgagaacagttactatcagcctgatatggagtactcggaaattgttggattgccagaagaagaagaaatcccagcaaataggaaaattaagtttagtagtgctcctattaaggttttcaacacatactccaatgaagactatgacaggagaaatgacgaagttgaccctgtggctgcttcagctgagtatgaacttgaaaaacgtgtagaaaagctggaacttttcccagtggagctagagaaagatgaggatggtcttggtataagtattattggaatgggtgttggagcagatgctggacttgaaaagctgggaatattcgtcaagacagtaacagaaggtggtgctgctcaacgggatggcagaatacaagtcaatgaccagattgtggaagtggatggaatcagcttggtgggtgtgacacagaattttgcagcaacagttctcagaaacaccaagggcaacgtcagatttgttattgggcgggaaaaaccaggacaagtgagcgaggttgcccagttgataagccagacactggaacaggagaggcgccagagagagctgctggaacagcactatgcccagtatgatgccgacgatgacgagaacactgtggctgaattgcaaggaatgtctggcaactgcaataacaataacaactattttcttaagacaggagaatatgccacagatgaagaagaagatgaggtaggacctgtccttcctggcagcgacatggccattgaagtctttgagctgcctgagaatgaggacatgttttccccatcagaactggacacaagcaagctcagtcacaagttcaaagagttgcaaatcaaacatgcagttacagaagcagagattcaaaaattgaagaccaagctgcaggcagcagaaaatgagaaagtgaggtgggaactagaaaaaacccaactccaacaaaacatagaagagaataaggaaagaatgttgaagttggaaagctactggattgaggcccaaacattatgccacacagtgaatgagcatctcaaagagactcaaagccagtatcaggccttggaaaagaaatacaacaaggcaaagaagttgatcaaggattttcaacaaaaagagcttgatttcatcaaaagacaggaagcagaaagaaagaaaatagaagatttggaaaaagctcatcttgtggaagtgcaaggcctccaagtgcggattagagatttggaagctgaggtattcaggctactgaagcaaaatgggactcaagttaacaataataacaacatctttgagagaagaacatctcttggtgaagtctctaaaggggataccatggagaacttggatggcaagcagacatcttgccaagatggcctaagtcaagacttgaatgaagcagtcccagagacagagcgcctggattcaaaagcactgaaaactcgagcccagctctctgtgaagaacagacgccagagaccctctaggacaagactgtatgatagtgttagttccacagatggggaggacagtctagagagaaagccatcaaacagtttctataaccacatgcatattaccaaattacttccacctaagggtttgagaacgtcttctccagaatcagattctggtgttccacccctcaccccggtggatagcaatgtgcccttctcgtctgaccacatagctgaatttcaagaagaaccactggacccagaaatggggcctctctcctctatgtggggagacacttcactgttttctacttcaaagtctgatcatgatgtggaagaatctccttgccatcaccaaaccaccaacaagaaaatattacgagaaaaagatgatgccaaagatcccaaatcactaagggcatccagttcattggcggtgcaaggaggaaaaattaagcggaagtttgtggatctgggggcgcctttgcgaaggaattccagcaagggaaagaagtggaaagaaaaagaaaaagaagccagtaggttttctgcaggtagcaggatcttcagaggcagactggaaaactggacacccaagccatgttcaacagctcagacctccactcgttccccttgcatgcctttctcatggtttaatgacagccggaaaggatcctattccttcaggaacctgcctgcgcctacaagttcccttcagccttctcctgagactctaatttcagataaaaaggggtccaaggtagaaaacacatggattacaaaagcaaacaagagaaacccaaatccctcctcttcttcaatctttggaaggcattctcaacttatgtctgtagtctggatccaagaaaccaataattttaccttcaatgatgacttcagtcccagcagtaccagttcagcagacctcagcggcttaggagcagaacctaaaacaccagggctctctcagtccttagcactgtcatcagatgagatccttgatgatggacagtctcccaaacacagtcagtgtcagaatcgggccgttcaggaatggagtgtgcagcaggtttctcactggttaatgagcctaaatctggagcagtatgtatctgaattcagtgcccaaaacatcactggagaacagctcctgcagttggatggaaataaacttaaggctcttggaatgacagcatcccaggaccgagcagtggtcaaaaagaaactcaaggaaatgaagatgtctctagagaaggctcggaaggcccaagagaaaatggaaaaacaaagagaaaagctaaggagaaaggagcaagagcaaatgcagaggaagtccaaaaagacagaaaagatgacgtcaactacagccgagggtgctggtgagcagtaacacataccctcttacagatgatggagatgctccaagagaagtccccacctcttcctgccctgctctcctccagaggatgaaaaagaaactaaatgataagggtaatgcggctctaggccggctgaggaactgtgtgttgaataactgcattttctgcaatagaatgcactcttaattttaactactaaaataatcccaagccacctttggttcattaacaaaccagagatttcatttaagtagctgtgttttgctcttctctaacttaccaacatcttgtgttgtgttgggtgtgttttgtcacttggagaactagtgtgaccccacccaagagcatgacacaccctggtgttgttaatggagcgccgtgaattttcagtgtgggatcctgaaatggcaattgcacatgtctgcatggcagagagcaccctgccatgagatctgagaccagtacttaacttctaggactgcaacacctactccaatgtgtgggaaagatttgctcttaattctcagtctggacagtgagaccaccccgctgtggaaacatgggtgctctgctctgtagttacctactaagggaaaaggcaagcaagtcattctgcttgctaggcatcaaaaagaaagaaaataaattatagctatttgttaaccactgaaaaaagcaaaagccttaagaatgtggatgtgggtattaccttggggttctgagggtaatatttatcctctagatacggctgaacaagaaagaaaaaaatcagacattaatgcagccatgggatattgggatctgttgaccttgctactgctgtgtgttcagcatttcagcaacactggcaaacacaacacagttcctcttccccctacctaacccaagaaattgaacaggaaattgatttttaaggaaaccaccattttcaggtttcctctcctggggaacattctggctggtcttcagcctg

SEQ ID NO: 171133 - DNA, 555 bp, Homo sapiens
  Payload ID: 13671
  Gene Symbol: PPP1R9A
  Gene Name: protein phosphatase 1, regulatory subunit 9A
  ENST ID: ENST00000413325
  CDS Start-End: 337-555
actgagcctttagaaaagggcggggttcgggggggagtgagctgaaaaactctccctagacaggaaaggtagaagacctcctcatccctttctctttggcagtgagatcttaaggtcaagatgaacctctagtcttgctttgaaaaaatcattctgtgtaactcttgactgtgactaagttcctaatacacctgttgggacgatcactgacaccgtataccatttgagaggtacttttcttgacccaatactggtgattagagaagagaggtatcttggtttttggtttttttctttgatcattatgaacattggcttttcacccctgaagtgaaaatgttgaaaactgagtcttcaggtgaacgaaccactctcagaagtgcctctcctcacaggaatgcatatcgaactgagtttcaggcactgaaaagtacctttgacaaacccaagtcagatggggaacaaaaaacaaaagaaggtgagggctcccagcagagcagggggaggaaatatggctccaatgtcaacagaattaaaaacctatttatgcagatg

SEQ ID NO: 171134 - DNA, 4058 bp, Homo sapiens
  Payload ID: 13671
  Gene Symbol: PPP1R9A
  Gene Name: protein phosphatase 1, regulatory subunit 9A
  Uniprot ID: Q9ULJ8
  ENST ID: ENST00000424654
  CDS Start-End: 245-4006
ggccctagagttaatcccatcagccgagatgaacctctagtcttgctttgaaaaaatcattctgtgtaactcttgactgtgactaagttcctaatacacctgttgggacgatcactgacaccgtataccatttgagaggtacttttcttgacccaatactggtgattagagaagagaggtatcttggtttttggtttttttctttgatcattatgaacattggcttttcacccctgaagtgaaaatgttgaaaactgagtcttcaggtgaacgaaccactctcagaagtgcctctcctcacaggaatgcatatcgaactgagtttcaggcactgaaaagtacctttgacaaacccaagtcagatggggaacaaaaaacaaaagaaggtgagggctcccagcagagcagggggaggaaatatggctccaatgtcaacagaattaaaaacctatttatgcagatgggtatggaacccaacgagaatgctgcagtcattgccaaaacaagggggaaaggtggacattcatctcctcagagaagaatgaagcccaaagaatttctggaaaaaacagatggctcagttgttaagttggagtcttctgtttctgaacgaattagtagatttgacactatgtacgatggcccttcatattccaagttcactgagactcgaaagatgtttgagagaagtgtgcatgaatcaggacagaacaaccgctattccccaaagaaagagaaagctggagggagtgaacctcaggatgaatggggaggttccaagtccaacagaggcagtactgattccttggacagccttagctcccgaactgaggctgtctccccaactgtgagtcaactgagtgcagtatttgagaacactgattctcccagtgccatcatttctgagaaggctgaaaacaatgaatactcagtgactgggcattatcccttgaatttaccatctgttactgttacaaatcttgacacatttggtcacctgaaggattctaattcctggcctccttcaaacaagcgaggtgttgatacagaggatgctcacaagagtaatgcaactccagtaccagaagtggcttctaaaagtacctctctagcttcgatacctggtgaagagatccagcagagcaaggaacccgaggactccacatctaatcaacagactcccgacagcattgacaaagatggtcctgaagaaccttgtgctgaaagtaaggcaatgccaaagtccgaaatcccttcaccacaaagccaactgttagaagatgctgaagctaatttggttggaagggaggcagcaaagcaacagaggaaagaacttgcaggtggtgatttcacctctcctgatgcttctgcatccagttgtggaaaagaagtacctgaagattcaaataattttgatggttcccatgtgtacatgcacagtgactataatgtgtatagggtgagatccaggtataattcagactggggagagacaggcactgagcaggatgaggaggaagatagtgatgagaacagttactatcagcctgatatggagtactcggaaattgttggattgccagaagaagaagaaatcccagcaaataggaaaattaagtttagtagtgctcctattaaggttttcaacacatactccaatgaagactatgacaggagaaatgacgaagttgaccctgtggctgcttcagctgagtatgaacttgaaaaacgtgtagaaaagctggaacttttcccagtggagctagagaaagatgaggatggtcttggtataagtattattggaatgggtgttggagcagatgctggacttgaaaagctgggaatattcgtcaagacagtaacagaaggtggtgctgctcaacgggatggcagaatacaagtcaatgaccagattgtggaagtggatggaatcagcttggtgggtgtgacacagaattttgcagcaacagttctcagaaacaccaagggcaacgtcagatttgttattgggcgggaaaaaccaggacaagtgagcgaggttgcccagttgataagccagacactggaacaggagaggcgccagagagagctgctggaacagcactatgcccagtatgatgccgacgatgacgagacaggagaatatgccacagatgaagaagaagatgaggtaggacctgtccttcctggcagcgacatggccattgaagtctttgagctgcctgagaatgaggacatgttttccccatcagaactggacacaagcaagctcagtcacaagttcaaagagttgcaaatcaaacatgcagttacagaagcagagattcaaaaattgaagaccaagctgcaggcagcagaaaatgagaaagtgaggtgggaactagaaaaaacccaactccaacaaaacatagaagagaataaggaaagaatgttgaagttggaaagctactggattgaggcccaaacattatgccacacagtgaatgagcatctcaaagagactcaaagccagtatcaggccttggaaaagaaatacaacaaggcaaagaagttgatcaaggattttcaacaaaaagagcttgatttcatcaaaagacaggaagcagaaagaaagaaaatagaagatttggaaaaagctcatcttgtggaagtgcaaggcctccaagtgcggattagagatttggaagctgaggtattcaggctactgaagcaaaatgggactcaagttaacaataataacaacatctttgagagaagaacatctcttggtgaagtctctaaaggggataccatggagaacttggatggcaagcagacatcttgccaagatggcctaagtcaagacttgaatgaagcagtcccagagacagagcgcctggattcaaaagcactgaaaactcgagcccagctctctgtgaagaacagacgccagagaccctctaggacaagactgtatgatagtgttagttccacagatggggaggacagtctagagagaaagccatcaaacagtttctataaccacatgcatattaccaaattacttccacctaagggtttgagaacgtcttctccagaatcagattctggtgttccacccctcaccccggtggatagcaatgtgcccttctcgtctgaccacatagctgaatttcaagaagaaccactggacccagaaatggggcctctctcctctatgtggggagacacttcactgttttctacttcaaagtctgatcatgatgtggaagaatctccttgccatcaccaaaccaccaacaagaaaatattacgagaaaaagatgatgccaaagatcccaaatcactaagggcatccagttcattggcggtgcaaggaggaaaaattaagcggaagtttgtggatctgggggcgcctttgcgaaggaattccagcaagggaaagaagtggaaagaaaaagaaaaagaagccagtaggttttctgcaggtagcaggatcttcagaggcagactggaaaactggacacccaagccatgttcaacagctcagacctccactcgttccccttgcatgcctttctcatggtttaatgacagccggaaaggatcctattccttcaggaacctgcctgcgcctacaagttcccttcagccttctcctgagactctaatttcagataaaaaggggtccaagaattttaccttcaatgatgacttcagtcccagcagtaccagttcagcagacctcagcggcttaggagcagaacctaaaacaccagggctctctcagtccttagcactgtcatcagatgaggctcttggaatgacagcatcccaggaccgagcagtggtcaaaaagaaactcaaggaaatgaagatgtctctagagaaggctcggaaggcccaagagaaaatggaaaaacaaagagaaaagctaaggagaaaggagcaagagcaaatgcagaggaagtccaaaaagacagaaaagatgacgtcaactacagccgagggtgctggtgagcagtaacacataccctcttacagatgatggagatgctccaagagaagtccccacctct

SEQ ID NO: 171135 - DNA, 4167 bp, Homo sapiens
  Payload ID: 13672
  Gene Symbol: PPP1R9B
  Gene Name: protein phosphatase 1, regulatory subunit 9B
  ENST ID: ENST00000612501
  CDS Start-End: 118-2571
aaaaggccttcggggtttcttttatcggggggagggggcggtggtcccgacttggccagccgcctgttgaagcgggggagcggggagcaggggcatgcgaacccggctccccccaccatgatgaagacggagccacgggggcccgggggtcccctccggagcgcctccccgcaccgcagcgcctacgaggcgggcatccaggcgctgaagccgcccgacgcgcccgggcccgacgaggcacccaagggggcccaccacaagaaatatggctccaacgtccaccgcatcaaaagtatgttcctgcagatgggcacgacggcggggccctcgggcgaggcgggcggcggcgcgggcctggccgaggccccacgggcgtccgagcgcggcgtgcgcctgtcgctgccgcgggccagcagcctgaacgagaacgtggaccacagcgccctgctgaagctgggcaccagcgtgtcggagcgcgtgagccgcttcgactccaagcccgcgccctccgcgcagcctgcgccgccgccgcacccgccgtcccggctgcaggagacgcggaagctgttcgaacggagcgccccagcggccgcaggcggcgacaaggaggccgcggcgcggcggctgctgaggcaggagcgcgccggcctgcaggaccggaagctggacgtcgtggtgcgcttcaacggcagcaccgaggcgctggacaagctggacgctgacgccgtgtcccccacggtcagccagctcagcgccgtcttcgagaaggccgactcgaggaccggcctccaccgcgggcccgggctccccagggccgcaggggttccccaggtcaactcgaagctggtcagcaagcggtcccgggtgttccagcccccgccgccgccgccgcccgccccgtcgggggatgccccggccgagaaagagcgatgccccgcagggcagcagcccccgcagcaccgagtggcccctgcccggccgccccccaagccccgggaggtgcgcaagattaagccggtggaggtggaggagagcggggagtcggaggccgagtcggcgcccggggaggtgatccaggccgaggttacggtccacgcggccctggagaatggcagcaccgtggcaactgcagccagccccgcgcccgaggagccaaaggcccaagcggccccggagaaggaggcggcggcggtagcgccgccagagaggggggtgggcaatggccgggccccggacgtggcccctgaggaggtagatgaatccaagaaggaggacttctcggaggcggacttggtggacgtgagcgcctacagtgggctcggggaggactctgcgggcagtgccctggaggaggacgacgaagacgacgaggaggatggggagcccccctacgagcccgagtcggggtgcgtggagatcccggggctgtcggaggaggaggacccagccccgagccggaagatccatttcagcacggcgcccatccaagtgttcagcacttactccaacgaggattacgatcgtcgcaacgaggatgtggatcccatggcagcctctgctgagtacgagctggagaagcgtgtggagaggttggagctgttccctgtggagctggagaaggactccgagggcctgggcatcagcatcatcggcatgggcgccggggcagacatgggcctggagaagctgggtatcttcgtcaagaccgtgacggagggtggtgcggcccatcgggatggcaggatccaggtgaatgatctcctggtggaggtggatggaacaagtctggtgggagtgacccagagcttcgcggcgtctgtgctccggaacaccaagggccgagtgcggtttatgattggccgggagcggccgggagagcagagcgaagtggcccagctaattcagcagactttggaacaggagcgatggcagcgggagatgatggagcagagatacgcccagtatggggaggatgacgaggagacgggagagtatgccactgacgaggatgaggagctgagccccacgttcccgggtggtgagatggccatcgaggtgtttgagctagcggagaacgaggatgcactgtcccctgtggacatggagcccgagaagctggtgcacaagttcaaggagctccagatcaagcatgcggtcactgaggcagagatccagcagctgaaaagaaagctgcagagcctggagcaggagaaggggcgctggcgggtggagaaggcgcagttggagcagagtgtggaggagaacaaggagcgcatggagaaactggaaggctactggggtgaggcccagagcctgtgccaggctgtggacgagcacctgcgggagactcaggcgcagtaccaggccctggagcgcaagtacagcaaggccaagcgcctcatcaaggactaccagcagaaggagatcgagttcctgaaaaaggagactgcacagcgtcgggttctggaggagtcggagctggccagaaaggaggagatggacaagctcctggacaagatctcagaactggaaggaaacttgcaaacactgaggaattccaattctacttaacaggaatcattccatgactggacaataattaacccccctcccattgtcctccctcccctgtcctcaacaccccacccctcccccttccagcctggggacaggtgccccgactccccccacccctccaccccacctcccccagcttcagggaccagagggctcatatcacaggcccccttaagatggcctgggcagacagaggtggctagaagggcagcctctttcttgccccatggggctgaggcacagaggccgagggctgccgagggctggcctggtggtcgacggacacaagcacctgcagatcaaactgccagactttacacactccagcttttgtctctggactggaacggggctggggctctcccagcatctgccaactgggggctgctccctgcccatggggcacctgggtggcccctgggcctcttgacttgagattctaccttctcggcccttccctctccccccatcattgtgccgtctctgttgcattctgaccctcccgcctggggggtgggggcgttgcctcaacacctcccccatccctgttccctgtcctgggagggatagagtccaccccagagcccggaggctgggcctggccctggccctgcactgatttctcatgtgtccttcgggaaaagggggagtgagagtgggaaaaagggagagttcaggacacctggtccccagctccccattgcctggggcagcagccctcaatttctccttgtgcctcccctcttccaggtgccaaatagccataacctcgtcttggaactgttatgtggcctctctggggtccaggtttcctggtcaagcctgggaatgccagggaggaaagggggtctggctacagcgaccctggtcttaggcaaggggaacatttctccctggagagtcaggtcctatcctgtgctgccctgtctgcccagcccagggcgatgcctggaagcctactgacattgcagggagtcagcctcgcccccaccccctactggttttccaatgttttgactggagggcaaaattttactactactcatctttttggagaccagggctgccctgctggcagcctgccttctaagtgaaatcgactctgtttccccactttaaccccaaattggggcttggaccaagggaggtgagaccacctcccccaggtcccctcccctttcaaaatccatctcattttgccacttcatgcccctgccctaactgggtttttgttcattttttaaaaacagaccacccatcccatccgttttggcttcttgtcccctgtaaatagaccatgacttcgatcagtatttcttgtccccaccccttcctatccccagatgtgcccccatcccctgaaggagctggctgtctcagtcctgggctcgcgcacttcaccccggcagatggagggggcggaaccgggtgggcggggccgcttcgggctgcttgggccagcggccacccctgcccagccgtcgggagggccgcatctctgtatataatatatatatgtatgtattgttcccggttttgtacggaccatgccctctgtcaggtcgtccccataaaagcagcccccagagc

SEQ ID NO: 171136 - DNA, 4649 bp, Homo sapiens
  Payload ID: 13673
  Gene Symbol: PPP2CA
  Gene Name: protein phosphatase 2, catalytic subunit, alpha isozyme
  Uniprot ID: P67775
  ENST ID: ENST00000481195
  CDS Start-End: 282-1211
cttttcccctccgctccccgccgcctcctgacgccgggcgtgacgtcaccacgcccggcggccgccattacagagagccgagctctggagcctcagcgagcggaggaggaggcgcagcggccgacggccgagtactgcggtgagagccagcgggccagcgccagcctcaacagccgccagaagtacacgaggaaccggcggcggcgtgtgcgtgtaggcccgtgtgcgggcggcggcgcgggagcagcgcggagcggcagccggctggggcgggtggcatcatggacgagaaggtgttcaccaaggagctggaccagtggatcgagcagctgaacgagtgcaagcagctgtccgagtcccaggtcaagagcctctgcgagaaggctaaagaaatcctgacaaaagaatccaacgtgcaagaggttcgatgtccagttactgtctgtggagatgtgcatgggcaatttcatgatctcatggaactgtttagaattggtggcaaatcaccagatacaaattacttgtttatgggagattatgttgacagaggatattattcagttgaaacagttacactgcttgtagctcttaaggttcgttaccgtgaacgcatcaccattcttcgagggaatcatgagagcagacagatcacacaagtttatggtttctatgatgaatgtttaagaaaatatggaaatgcaaatgtttggaaatattttacagatctttttgactatcttcctctcactgccttggtggatgggcagatcttctgtctacatggtggtctctcgccatctatagatacactggatcatatcagagcacttgatcgcctacaagaagttccccatgagggtccaatgtgtgacttgctgtggtcagatccagatgaccgtggtggttggggtatatctcctcgaggagctggttacacctttgggcaagatatttctgagacatttaatcatgccaatggcctcacgttggtgtctagagctcaccagctagtgatggagggatataactggtgccatgaccggaatgtagtaacgattttcagtgctccaaactattgttatcgttgtggtaaccaagctgcaatcatggaacttgacgatactctaaaatactctttcttgcagtttgacccagcacctcgtagaggcgagccacatgttactcgtcgtaccccagactacttcctgtaatgaaattttaaacttgtacagtattgccatgaaccatatatcgacctaatggaaatgggaagagcaacagtaactccaaagtgtcagaaaatagttaacattcaaaaaacttgttttcacatggaccaaaagatgtgccatataaaaatacaaagcctcttgtcatcaacagccgtgaccactttagaatgaaccagttcattgcatgctgaagcgacattgttggtcaagaaaccagtttctggcatagcgctatttgtagttacttttgctttctctgagagactgcagataataagatgtaaacattaacacctcgtgaatacaatttaacttccatttagctatagctttactcagcatgactgtagataaggatagcagcaaacaatcattggagcttaatgaacatttttaaaaataattaccaaggcctcccttctacttgtgagttttgaaattgttctttttattttcagggataccgtttaatttaattatatgatttgtctgcactcagtttattccctactcaaatctcagccccatgttgttctttgttattgtcagaacctggtgagttgttttgaacagaactgttttttccccttcctgtaagacgatgtgactgcacaagagcactgcagtgtttttcataataaacttgtgaactaagaactgagaaggtcaaattttaattgtatcaatgggcaagactggtgctgtttattaaaaaagttaaatcaattgagtaaattttagaatttgtagacttgtaggtaaaataaaaatcaagggcactacataacctctctggtaactccttgacattcttcagattaacttcaggatttatttgtatttcacatattacaatttgtcacattgttggtgtgcactttgtgggttcttcctgcatattaacttgtttgtaagaaaggaaatctgtgctgcttcagtaagacttaattgtaaaaccatataacttgagatttaagtctttgggttttgttttaataaaacagcatgttttcaggtagagcttaaactaaatgatgtgtttacttagtgcagtttctggttatgaatattatattgctatgtgtatattatatggactctttaaaatgattgacagattggcaaattcttaaatctttgtacattgttgagtcatatgttcttagagttaaatttgtctcagataagaaagtgttaaagcattagcctgtgtcaagttctttgagtgatactagtgaaaccaaatagaaaactattgttggatcatgatttagtcttatgtacattcacccgaagacaaaaatggtacttaaagtggcagtgttcaacatttaatgagtttttccccttttatccttcgaataggattagatgtttaaaaaaaagttcttctgtgggaactaatatttgatattttaacctaccagagtaaacaggaacacttaatcatacttgtgagtgtagtaaataaaagttttcttgctttgtgctgtgttgaatctggaaccaacagggaagttatagcatatcccctttctaaaatgcttgaggaacacatacataccgaatgtcttttctgatctaattgatagtatttttagtggcttgtggagttaattttccaaagcaaaaggccattagggtttctacatttcatttcatttcattcttttctttcacaagaaatacattctctgtgtgtctttttgttgctctgtcactctatgccctttctctccgactgaacaaatagcttatccatgtgcagtggttttaatacccaaacaatctagacaccaagcagctattttttccggtcctgtgatatcagaattgaccaaggaatacgtatattgtaattgacacgtggtggtatcttccaggtacaaattctctaaattttgtggttagcagaatgggacttgtgataagaatagcttggttttagcataactagggtttaaaataattgtttaattatagagactgaccgggctttggccatctaaactggaaagtgttagtaccctaccttcttttgaaaatggctatggtaaggaaaatgtgttagtaaattatgtattttcttgaaaaatacataattatggttggatgggaatcactaagttgggtgttaactgatgtctcaattagtaacattaggattttcattaataaacctaaaaagctttccctaagaacaggcctggcacagtggctcatgcctgtaatcccagcactttgggagaccagggtgggtggatcccttgaggtcaggagttgaagagcagcctggccaacatggcaaaaccccatctctacaaaaaatatgaaaatcagccgggcttggtggcataccatagtcccagctacttgggaggctgaggtgagaggatcgcctgagcccaggagatggaggttgcagtgggctgagattgtgccactgtactccagtctgggtgacagagccagaccctgtctcaaaaataaagaggattctgagtttgtatagtgagggcttgcagaaattttgaaacttattttgtaagtttacaatgaatttgtacatgatgtgctcatgtcttgggttgagtatcctagacatgattttttcatttgctgcatattaaacatttgttggttgtagtcggtatttcttaaatagaagtttgtcaatattagattagtttcaagaaggacttagctcaggaaaaggatagttatttctgtggttctcagctttgatgcctacagagattctgatttaaattgctggaggagggcccaggcatacattttttaagtttcccaagtgattctaatttacatctagggttaaaaacagccaggcgcggtggctcatgcctgtaatcccagcacttggggaggccggggtgggtggatcacctgatgtcaggagatcgagaccagcctggccagcgtggtgaaaccccatctctattaaaaatacaaaactgaccggtgtggtggcaggagcctgtaatcccagctacttgggaggctgaggcaggagaatcacttgaactcaggaggaggaggttacagtgagcccagatcgtgccattgcactccagcctgggcaaaaagagcaaaactccatctcaaaaaacaaaaacacctcactgctgtttcctaagtacatacttaagaaaattgggatacatggtggtggttcatggatgttgataaggaattaaaatgtaccgtgcgactctctgtttcagtggtgacttttacctgtttagtataaatattcctttgcttccaaccataaatgtgttcttagaaatgggcctatagtttagtaacctatagtttggtaataggcttgtttgttttcagatggattttggttctgtgagctaaagctattttgcattaaagccttcgtcctca

SEQ ID NO: 171137 - DNA, 510 bp, Homo sapiens
  Payload ID: 13673
  Gene Symbol: PPP2CA
  Gene Name: protein phosphatase 2, catalytic subunit, alpha isozyme
  ENST ID: ENST00000523082
  CDS Start-End: 75-510
agatttagatttgtttctcccaagcctgaacaaaactactactagtggatgaggtggcacatcatctgttggagatgccttttaatggtagcgatgtattgaatctcctgtttctttaccctctcacgtcaaatgaggctaaagaaatcctgacaaaagaatccaacgtgcaagaggttcgatgtccagttactgtctgtggagatgtgcatgggcaatttcatgatctcatggaactgtttagaattggtggcaaatcaccagatacaaattacttgtttatgggagattatgttgacagaggatattattcagttgaaacagttacactgcttgtagctcttaaggttcgttaccgtgaacgcatcaccattcttcgagggaatcatgagagcagacagatcacacaagtttatggtttctatgatgaatgtttaagaaaatatggaaatgcaaatgtttggaaatattttacagatctttttgactatcttcctctcactgccttgg

SEQ ID NO: 171138 - DNA, 585 bp, Homo sapiens
  Payload ID: 13673
  Gene Symbol: PPP2CA
  Gene Name: protein phosphatase 2, catalytic subunit, alpha isozyme
  ENST ID: ENST00000522385
  CDS Start-End: 208-585
aaaatggcgccgttcactcgactcctgggcttttgagtcagccggccttggcgccagacgaggtggcagggggagcggagaccctgtgggtcatcgtcagggacggttttgagggctaaagaaatcctgacaaaagaatccaacgtgcaagaggttcgatgtccagttactgtctgtggagatgtgcatgggcaatttcatgatctcatggaactgtttagaattggtggcaaatcaccagatacaaattacttgtttatgggagattatgttgacagaggatattattcagttgaaacagttacactgcttgtagctcttaaggttcgttaccgtgaacgcatcaccattcttcgagggaatcatgagagcagacagatcacacaagtttatggtttctatgatgaatgtttaagaaaatatggaaatgcaaatgtttggaaatattttacagatctttttgactatcttcctctcactgccttggtggatgggcagatcttctgtctacatggtggtctctcgccatctatagatacactggatcatatcagagcacttgatcgcctacaagaagttccccat

SEQ ID NO: 171139 - DNA, 2006 bp, Homo sapiens
  Payload ID: 13674
  Gene Symbol: PPP2CB
  Gene Name: protein phosphatase 2, catalytic subunit, beta isozyme
  Uniprot ID: P62714
  ENST ID: ENST00000221138
  CDS Start-End: 452-1381
cggcggaaatgcccgagcgatgacggaaacccggagggaggggagagaaagagcgagagaaggggaaagacaagtcgggagaggccggtaggcgtgaggcgggcctgaagcggcagcgggcggccttcgtccggcgagagctaggccgaggacccgcgccgcgctccccggcacctcaccgcgtccttcaccgactcccgcggcgcgcggccgggcggggaagggcgggcgggggtctcctccaggctgcgcgctcggagccgcctgctgggcttgggcggggcgcggggcccgcggccgccctacccggctcagtcctccccctgtgggacctggcgacggcggcggagggagaggggagcggcgcccgggccggggccgggggcgggtggggaggggggagggcggcggccgggctggggctcgggatccgcatcgggatcgggccgccatggacgacaaggcgttcaccaaggagctggaccagtgggtcgagcagctgaacgagtgtaagcagctgaacgagaaccaagtgcggacgctgtgcgagaaggcaaaggaaattttaacaaaagaatcaaatgtgcaagaggttcgttgccctgttactgtctgtggagatgtgcatggtcaatttcatgatcttatggaactctttagaattggtggaaaatcaccggatacaaactacttattcatgggtgactatgtagacagaggatattattcagtggagactgtgactcttcttgtagcattaaaggtgcgttatccagaacgcattacaatattgagaggaaatcacgaaagccgacaaattacccaagtatatggcttttatgatgaatgtctgcgaaagtatgggaatgccaacgtttggaaatattttacagatctctttgattatcttccacttacagctttagtagatggacagatattctgcctccatggtggcctctctccatccatagacacactggatcatataagagccctggatcgtttacaggaagttccacatgagggcccaatgtgtgatctgttatggtcagatccagatgatcgtggtggatggggtatttcaccacgtggtgctggctacacatttggacaagacatttctgaaacctttaaccatgccaatggtctcacactggtttctcgtgcccaccagcttgtaatggagggatacaattggtgtcatgatcggaatgtggttaccattttcagtgcacccaattactgttatcgttgtgggaaccaggctgctatcatggaattagatgacactttaaaatattccttccttcaatttgacccagcgcctcgtcgtggtgagcctcatgttacacggcgcaccccagactacttcctataaatttctcctgggaaacctgcctttgtatgtggaagtatacctggctttttaaaatatatgtatttaaaaacaaaaagcaacagtaatctatgtgtttctgtaacaaattgggatctgtcttggcattaaaccacatcatggaccaaatgtgccatactaatgatgagcatttagcacaatttgagactgaaatttagtacactatgttctaggtcagtctaacagtttgcctgctgtatttatagtaaccattttcctttggactgttcaagcaaaaaaggtaactaactgcttcatctccttttgcgcttatttggaaattttagttatagtgtttaactggcatggattaatagagttggagttttatttttaagaaaaattcacaagctaacttccactaatccattatcctttattttattgaaatgtataattaacttaactgaagaaaaggttcttcttgggagtatgttgtcataacatttaaagagatttcccttcatttaaactaaattactgttttatgttgatctgcatatttctgtatatttgtcatgacagtgcttgcatcctatttggtgtactcagcaaataaacttttcattttaaacaaaaacattca

SEQ ID NO: 171140 - DNA, 691 bp, Homo sapiens
  Payload ID: 13674
  Gene Symbol: PPP2CB
  Gene Name: protein phosphatase 2, catalytic subunit, beta isozyme
  ENST ID: ENST00000518564
  CDS Start-End: 177-320
gggcggggcgcggggcccgcggccgccctacccggctcagtcctccccctgtgggacctggcgacggcggcggagggagaggggagcggcgcccgggccggggccgggggcgggtggggaggggggagggcggcggccgggctggggctcgggatccgcatcgggatcgggccgccatggacgacaaggcgttcaccaaggagctggaccagtgggtcgagcagctgaacgagtgtaagcagctgaacgagaaccaagtgcggacgctgtgcgagaaggcaaaggaaattttaacaaaagaatcaaatgtgcaagagtaaccattttcctttggactgttcaagcaaaaaaggtaactaactgcttcatctccttttgcgcttatttggaaattttagttatagtgtttaactggcatggattaatagagttggagttttatttttaagaaaaattcacaagctaacttccactaatccattatcctttattttattgaaatgtataattaacttaactgaagaaaaggttcttcttgggagtatgttgtcataacatttaaagagatttcccttcatttaaactaaattactgttttatgttgatctgcatatttctgtatatttgtcatgacagtgcttgcatcctatttggtgtactcagcaaataaacttttcattttaaacaaaaa

SEQ ID NO: 171141 - DNA, 577 bp, Homo sapiens
  Payload ID: 13674
  Gene Symbol: PPP2CB
  Gene Name: protein phosphatase 2, catalytic subunit, beta isozyme
  ENST ID: ENST00000518243
  CDS Start-End: 26-577
ttttcccggcggaaatgcccgagcgatgacggaaacccggagggaggggagagaaagagcgagagaaggggaaagacaagtcgggagaggccgaattggtggaaaatcaccggatacaaactacttattcatgggtgactatgtagacagaggatattattcagtggagactgtgactcttcttgtagcattaaaggtgcgttatccagaacgcattacaatattgagaggaaatcacgaaagccgacaaattacccaagtatatggcttttatgatgaatgtctgcgaaagtatgggaatgccaacgtttggaaatattttacagatctctttgattatcttccacttacagctttagtagatggacagatattctgcctccatggtggcctctctccatccatagacacactggatcatataagagccctggatcgtttacaggaagttccacatgagggcccaatgtgtgatctgttatggtcagatccagatgatcgtggtggatggggtatttcaccacgtggtgctggctacacatttggacaagacatttctgaaacctttaaccatgcc

SEQ ID NO: 171142 - DNA, 755 bp, Homo sapiens
  Payload ID: 13674
  Gene Symbol: PPP2CB
  Gene Name: protein phosphatase 2, catalytic subunit, beta isozyme
  ENST ID: ENST00000520056
  CDS Start-End: 381-755
gttttgccatgctggccaggctggtctagaactcctggcctgaagtgatccctcagccttccaaagtgctgggattacaggcgcgagcctcgtgcacagcccctattgactttctaataattttaagatgaacttctagagaagaatattgtaccactgctgtactttgaaataatcacaccggagtgtcaacgatcacttgaggaagctttctgtatttgtcaaaagagattatttttacttcggctcctaaataaatcagactaacagttcctaggacttcacaggcaaaggaaattttaacaaaagaatcaaatgtgcaagaggttcgttgccctgttactgtctgtggagatgtgcatggtcaatttcatgatcttatggaactctttagaattggtggaaaatcaccggatacaaactacttattcatgggtgactatgtagacagaggatattattcagtggagactgtgactcttcttgtagcattaaaggtgcgttatccagaacgcattacaatattgagaggaaatcacgaaagccgacaaattacccaagtatatggcttttatgatgaatgtctgcgaaagtatgggaatgccaacgtttggaaatattttacagatctctttgattatcttccacttacagctttagtagatggacagatattctgcctccatggtggcctctctccatccatagacacactggatcatataagagccctggatcgtttacaggaagttcca

SEQ ID NO: 171143 - DNA, 448 bp, Homo sapiens
  Payload ID: 13674
  Gene Symbol: PPP2CB
  Gene Name: protein phosphatase 2, catalytic subunit, beta isozyme
  ENST ID: ENST00000523023
  CDS Start-End: 1-157
cattttcagtgcacccaattactgttatcgttgtgggaaccaggctgctatcatggaattagatgacactttaaaatattccttccttcaatttgacccagcgcctcgtcgtggtgagcctcatgttacacggcgcaccccagactacttcctataaatttctcctgggaaacctgcctttgctggagtgcaatggtgtgatctcggctcactgcaacctccacctcccaagttcaaccgattctcctgcctcagcctcccaaatagctgggattacagacgatgatgatgatgattgagacatgatctcactctgtcacccaggctggagcacagaggtgagatcatggctcactgcaacctcaacctgtggggctccagtgatcctcccacctcagtctccagagtagctgagactacaggtgcaggcaatcacgcctggctaatt

SEQ ID NO: 171144 - DNA, 578 bp, Homo sapiens
  Payload ID: 13674
  Gene Symbol: PPP2CB
  Gene Name: protein phosphatase 2, catalytic subunit, beta isozyme
  ENST ID: ENST00000520334
  CDS Start-End: 1-375
atattctgcctccatggtggcctctctccatccatagacacactggatcatataagagccctggatcgtttacaggaagttccacatgagggcccaatgtgtgatctgttatggtcagatccagatgatcgtggtggatggggtatttcaccacgtggtgctggctacacatttggacaagacatttctgaaacctttaaccatgccaatggtctcacactggtttctcgtgcccaccagcttgtaatggagggatacaattggtgtcatgatcggaatgtggttaccattttcagtgcacccaattactgttatcgttgtgggaaccaggctgctatcatggaattagatgacactttaaaatattccttgtgagtaactgtaaattttaattgtatatactttcagaaggaaaattttaaatgttaaaaatagaagatttctgtttctgaaattggatgaggagtatagcaaagcccctctccagcaaaaataaccattagctggagaacattatttttaaaaaataatttttcaaagcttttggaaattgtcctaagggcatacagcaggtggag

SEQ ID NO: 171145 - DNA, 5380 bp, Homo sapiens
  Payload ID: 13675
  Gene Symbol: PPP2R1A
  Gene Name: protein phosphatase 2, regulatory subunit A, alpha
  Uniprot ID: P30153
  ENST ID: ENST00000322088
  CDS Start-End: 59-1828
ccccccacgtttcagcacagcgctggccgcagtctgacaggaaagggacggagccaagatggcggcggccgacggcgacgactcgctgtaccccatcgcggtgctcatagacgaactccgcaatgaggacgttcagcttcgcctcaacagcatcaagaagctgtccaccatcgccttggcccttggggttgaaaggacccgaagtgagcttctgcctttccttacagataccatctatgatgaagatgaggtcctcctggccctggcagaacagctgggaaccttcactaccctggtgggaggcccagagtacgtgcactgcctgctgccaccgctggagtcgctggccacagtggaggagacagtggtgcgggacaaggcagtggagtccttacgggccatctcacacgagcactcgccctctgacctggaggcgcactttgtgccgctagtgaagcggctggcgggcggcgactggttcacctcccgcacctcggcctgcggcctcttctccgtctgctacccccgagtgtccagtgctgtgaaggcggaacttcgacagtacttccggaacctgtgctcagatgacacccccatggtgcggcgggccgcagcctccaagctgggggagtttgccaaggtgctggagctggacaacgtcaagagtgagatcatccccatgttctccaacctggcctctgacgagcaggactcggtgcggctgctggcggtggaggcgtgcgtgaacatcgcccagcttctgccccaggaggatctggaggccctggtgatgcccactctgcgccaggccgctgaagacaagtcctggcgcgtccgctacatggtggctgacaagttcacagagctccagaaagcagtggggcctgagatcaccaagacagacctggtccctgccttccagaacctgatgaaagactgtgaggccgaggtgagggccgcagcctcccacaaggtcaaagagttctgtgaaaacctctcagctgactgtcgggagaatgtgatcatgtcccagatcttgccctgcatcaaggagctggtgtccgatgccaaccaacatgtcaagtctgccctggcctcagtcatcatgggtctctctcccatcttgggcaaagacaacaccatcgagcacctcttgcccctcttcctggctcagctgaaggatgagtgccctgaggtacggctgaacatcatctctaacctggactgtgtgaacgaggtgattggcatccggcagctgtcccagtccctgctccctgccattgtggagctggctgaggacgccaagtggcgggtgcggctggccatcattgagtacatgcccctcctggctggacagctgggagtggagttctttgatgagaaacttaactccttgtgcatggcctggcttgtggatcatgtatatgccatccgcgaggcagccaccagcaacctgaagaagctagtggaaaagtttgggaaggagtgggcccatgccacaatcatccccaaggtcttggccatgtccggagaccccaactacctgcaccgcatgactacgctcttctgcatcaatgtgctgtctgaggtctgtgggcaggacatcaccaccaagcacatgctacccacggttctgcgcatggctggggacccggttgccaatgtccgcttcaatgtggccaagtctctgcagaagatagggcccatcctggacaacagcaccttgcagagtgaagtcaagcccatcctagagaagctgacccaggaccaggatgtggacgtcaaatactttgcccaggaggctctgactgttctgtctctcgcctgatgctggaagaggagcaaacactggcctctggtgtccaccctccaacccccacaagtccctctttggggagacactggggggcctttggctgtcactccctgtgcatggtctgaccccaggccccttcccccagcacggttcctcctctccccagcctgggaagatgtctcactgtccacctcccaacgggctaggggagcacggggttggacaggacagtgaccttgggaggaaggggctactccgcccacgtcagggagagatgtgagcatcccgggtcactggatcctgctgctgtaatgggaacccctcccccatttacttctccacctcccgtcctccccatcattggtttttttttgtgtgtcaactgtgccgtttttattttattccttttattttcccccttttcacagagaaataaaggtctagaagtagttggtcctctggccttagtcatcagcttggaggagggggcaccaccccagagccacaacatctgcgcttttctctggagaagatcttgttacaggacccattatacccctatgtcccgaaagaatactctggggatccccccaggagtgctgctggcctttggggtagagggtccatgaggtgctctgggtggtgtcctgtagtgcagttcagattcatagatgtcggccgagtatttggggggttaagagcaggtgccttggaaccagactgcctgggtccaaattgtggctccttcagttaatagacgtgtgactaggagtagcttgttaagtctttatgagctcagttttgtattgtgtaaaatgagagttacagtaatacctagattgcagggtgggtggcgaggaccaagtgaattagtacctggaaagtgtgtaacagtttcaacatgagaagtacacaacatgagaagcagagttagctgtacattgccagagaaccccctgtgggccatttcctgtgttcttgaagaagacttgggcttggaccctgtccccaggaggtctcagagtaatcaggacggtactagggagagaactgtggcaagatagatcagttatctcggtatctattctccccttcctaatgtagaagctctgatttttaactgggcagatgactacatggattcaaggtattttcctagtgtctcttgaaattaggtgtggtattgtgaccaaattctagccaaaaagatgttgaacagaagtggtatatgcagcttctaggaagtgttcttaagggggaaggcgtcatcccccacctttcctccttcctgcactctggaatgtggaccagatggctggagtaggagctgccacctggggccagaaaatgatcttaggcgtgaaggtcaagtaaggcaggacaagagagaaggagcctgcctccccgaggctgtgaagagccatgccagtactgtcacctgggagaattaaactggtcaagtgcctgttcgtttagggtttcatcacttgaaggtgaccggaattctaactgatggagggaggggcccagagcaccctggagaaaggagcaagggacgtatggctggtggtgtctgcatggaagggtttcacagaggaaatgatgcttgagcacattttgacccaggtggtggaagggaaatgtggctttgagtgacaaggtgatttcaccagctcagccttcatattaccacatccctaccctttgttagactttattgtgccctaggggatgaggctgaaggagaccaaaaagcatctttagaaatttccatttatgccctgggcgataaactctctcccagttgagaactactgctctagaaatgtgaacacacgtgtaaccaaacgtcaaagtctgacattaaactttgactttccccatggttaacgctgctggtccattgtaacaagagtgcagtggaccagcagcctttgcattctcaggagcttgttagaaatgcagagcctctcgtccctgccccgacctgctcaggcagagccttcattttaacaagatgcccaggttcatctgcacactgaagttagagaagtcctgccttaaatactaacccagtttttctctcttgagagtgaggttaatgctacgtgggtctagggctgaggatgtgctatggctcagaggtggggtctacaattggacatgtgtatgtagacaaggctcagggatatgttgaggctgctagattgggcaagtgatggaatgggattattacaggaggtggaggtgcgatggatacccaggatgtgctgggtaatgaggtgatactcagcgaccacaggagtgagtatgagagacgagggtgaaggatagcttgagttattgaacgctggcagagtcctgagttaaccaggagttgcctggtgtcttgggtcatgtgctctagaagcagagcccgagtggagactcgttcaagtgtgttactgagggagtgctctcaggagaacggactgaggtaactcaccttctgtgagcttcatgttggaagaatccaatcaggtgatgaatgtgatgttattaagtccattgttaggagtggttcctaatctcccaggctgcaggctttgtttgctccatacacctggccttctctgtagcagctgaagtttgatgctggagctgggtcagggtggagagactgtgtggagccaggactcatgaccctggcctgtttctcccgctctctaggcctaaatcccagcagtcacactggccatctctaatggttccttccacagcactgttcttcagagcccacacacaaattttgtctccttttgtgatgactgcacttctttggctgtttttgccaacagcctcttcactgaccccttccttccactgcattgacccagacatctggatgtggatgaggtcgagtcacttgttgcctttggctaatgcataggggcacgagtagagctctagaatcaccatgcccttgactcagggtgcagaatctgcctatggtgcttgagctgtggttgtcgctagaggagaattaccatggctcccccgggcagatgaagatgacgaggtggtgcctcagccccgaggagtgaactgcagggcaccgacaagattctgcctgtggccatcagggctggagggaaggaggccaggttcatctacccaagctggtggcatgaggcataaatttaaaaaaattggtgtgggcacagtggctcgcacctgtaatcccagcgctttgggaggccgaggtgggcggatcacctgaggccgggagttcgagaccatcctgaccaattcagtgaaaccctgtctttactaaaaatatgaaaaaattagctgggcgtggtggagggcgcctgtaatcccagctactcaggaggctgaggcgggaggattgcttgaacctgggaggcagaggttgcagtgagcctagattgggccattgcactccagccagggtgacagagcaagaccccatatgaaaaaaaataataattcaggaacttgtcaaaaagagaaaatccaataaagatttagtgccaggccttgactccagcaggccttccccgc

SEQ ID NO: 171146 - DNA, 979 bp, Homo sapiens
  Payload ID: 13675
  Gene Symbol: PPP2R1A
  Gene Name: protein phosphatase 2, regulatory subunit A, alpha
  ENST ID: ENST00000391791
  CDS Start-End: 1-397
tgccatccgcgaggcagccaccagcaacctgaagaagctagtggaaaagtttgggaaggagtgggcccatgccacaatcatccccaaggtcttggccatgtccggagaccccaactacctgcaccgcatgactacgctcttctgcatcaatgtgctgtctgaggtctgtgggcaggacatcaccaccaagcacatgctacccacggttctgcgcatggctggggacccggttgccaatgtccgcttcaatgtggccaagtctctgcagaagatagggcccatcctggacaacagcaccttgcagagtgaagtcaagcccatcctagagaagctgacccaggaccaggatgtggacgtcaaatactttgcccaggaggctctgactggtaagacctagaaagcacggagccctagcaggagggtggactttgaggacaggcactgggcctgtgggcagcagcttctgggagggggaggtaccttggcattgtgggcagagagagggctctggttctgattcttgcctgttcctgttttcctagttctgtctctcgcctgatgctggaagaggagcaaacactggcctctggtgtccaccctccaacccccacaagtccctctttggggagacactggggggcctttggctgtcactccctgtgcatggtctgaccccaggccccttcccccagcacggttcctcctctccccagcctgggaagatgtctcactgtccacctcccaacgggctaggggagcacggggttggacaggacagtgaccttgggaggaaggggctactccgcccacgtcagggagagatgtgagcatcccgggtcactggatcctgctgctgtaatgggaacccctcccccatttacttctccacctcccgtcctccccatcattggtttttttttgtgtgtcaactgtgccgtttttattttattccttttattttcccccttttcacagagaa

SEQ ID NO: 171147 - DNA, 1233 bp, Homo sapiens
  Payload ID: 13675
  Gene Symbol: PPP2R1A
  Gene Name: protein phosphatase 2, regulatory subunit A, alpha
  ENST ID: ENST00000454220
  CDS Start-End: 47-1233
cagcacagcgctggccgcagtctgacaggaaagggacggagccaagatggcggcggccgacggcgacgactcgctgtaccccatcgcggtgctcatagacgaactccgcaatgaggacgttcaggtccggaggctacgggggacttggggaagacgcggaggggtacctgggggcacgggcggccctcgcggagaagactcagcgttcgctgggagtggcggaagggggcgacggccaatcagccttcgcctcaacagcatcaagaagctgtccaccatcgccttggcccttggggttgaaaggacccgaagtgagcttctgcctttccttacagataccatctatgatgaagatgaggtcctcctggccctggcagaacagctgggaaccttcactaccctggtgggaggcccagagtacgtgcactgcctgctgccaccgctggagtcgctggccacagtggaggagacagtggtgcgggacaaggcagtggagtccttacgggccatctcacacgagcactcgccctctgacctggaggcgcactttgtgccgctagtgaagcggctggcgggcggcgactggttcacctcccgcacctcggcctgcggcctcttctccgtctgctacccccgagtgtccagtgctgtgaaggcggaacttcgacagtacttccggaacctgtgctcagatgacacccccatggtgcggcgggccgcagcctccaagctgggggagtttgccaaggtgctggagctggacaacgtcaagagtgagatcatccccatgttctccaacctggcctctgacgagcaggactcggtgcggctgctggcggtggaggcgtgcgtgaacatcgcccagcttctgccccaggaggatctggaggccctggtgatgcccactctgcgccaggccgctgaagacaagtcctggcgcgtccgctacatggtggctgacaagttcacagagctccagaaagcagtggggcctgagatcaccaagacagacctggtccctgccttccagaacctgatgaaagactgtgaggccgaggtgagggccgcagcctcccacaaggtcaaagagttctgtgaaaacctctcagctgactgtcgggagaatgtgatcatgtcccagatcttgccctgcatcaaggagctggtgtccgatgccaaccaacatgtcaagtctgccctggcctcagtcatcatgggtctctctcccatctt

SEQ ID NO: 171148 - DNA, 668 bp, Homo sapiens
  Payload ID: 13675
  Gene Symbol: PPP2R1A
  Gene Name: protein phosphatase 2, regulatory subunit A, alpha
  ENST ID: ENST00000490868
  CDS Start-End: 50-166
tttcagcacagcgctggccgcagtctgacaggaaagggacggagccaagatggcggcggccgacggcgacgactcgctgtaccccatcgcggtgctcatagacgaactccgcaatgaggacgttcagtgctgggagctattaataataggagaggcctcgtggtgatgaagaaatgaggggagagtttcacagtctgtcctgccatcagagcagctggctttggatcccacactccctcggtgcttgctttgcttcgcctcaacagcatcaagaagctgtccaccatcgccttggcccttggggttgaaaggacccgaagtgagcttctgcctttccttacagataccatctatgatgaagatgaggtcctcctggccctggcagaacagctgggaaccttcactaccctggtgggaggcccagagtacgtgcactgcctgctgccaccgctggagtcgctggccacagtggaggagacagtggtgcgggacaaggcagtggagtccttacgggccatctcacacgagcactcgccctctgacctggaggcgcactttgtgccgctagtgaagcggctggcgggcggcgactggttcacctcccgcacctcggcctgcggcctcttctccgtctgctacccccgagtgtccagtgctgtgaaggcgga

SEQ ID NO: 171149 - DNA, 2730 bp, Homo sapiens
  Payload ID: 13675
  Gene Symbol: PPP2R1A
  Gene Name: protein phosphatase 2, regulatory subunit A, alpha
  ENST ID: ENST00000462990
  CDS Start-End: 1062-2294
aaagaccgttttgacgtgcacgtcactggattcaaggctaaccctccgtttaggatgatattatctggacacacttaactacgcctgcaaagactgttttgacgtgcacgtcactgggacataactttttgaggctgctattcagcctcctgtactggtggtattattactactgctaatgctactcttgtttttgtagtcattttattacaataatttttttttctctttgagacaaagagtctcactctgttgcccaggctggagtgttgtttgttcttttacaatcacttagccagcaatcctggctttaaatcctgctccatgtgatcttagctgtctgaccctgagaggggcttttgttccccgagcctgtttccctgtctgtaaaatgggactccagctagtgacatgggtgcaggtgtgtggatgtgtttagccgaggaccgggcacagaggaagcgtgttataaacgtggctgctgctgttaaagtacagtgcattggcatgttacatgatactgtgtataggagaaagtgatgaagagagaggaggagagggagtacagttttcaacagagtggtcctggaaagtgcaactgacttcgcctcaacagcatcaagaagctgtccaccatcgccttggcccttggggttgaaaggacccgaagtgagcttctgcctttccttacagataccatctatgatgaagatgaggtcctcctggccctggcagaacagctgggaaccttcactaccctggtgggaggcccagagtacgtgcactgcctgctgccaccgctggagtcgctggccacagtggaggagacagtggtgcgggacaaggcagtggagtccttacgggccatctcacacgagcactcgccctctgacctggaggcgcactttgtgccgctagtgaagcggctggcgggcggcgactggttcacctcccgcacctcggcctgcggcctcttctccgtctgctacccccgagtgtccagtgctgtgaaggcggaacttcgacagtacttccggaacctgtgctcagatgacacccccatggtgcggcgggccgcagcctccaagctgggggagtttgccaaggtgctggagctggacaacgtcaagagtgagatcatccccatgttctccaacctggcctctgacgagcaggactcggtgcggctgctggcggtggaggcgtgcgtgaacatcgcccagcttctgccccaggaggatctggaggccctggtgatgcccactctgcgccaggccgctgaagacaagtcctggcgcgtccgctacatggtggctgacaagttcacagagctccagaaagcagtggggcctgagatcaccaagacagacctggtccctgccttccagaacctgatgaaagactgtgaggccgaggtgagggccgcagcctcccacaaggtcaaagagttctgtgaaaacctctcagctgactgtcgggagaatgtgatcatgtcccagatcttgccctgcatcaaggagctggtgtccgatgccaaccaacatgtcaagtctgccctggcctcagtcatcatgggtctctctcccatcttgggcaaagacaacaccatcgagcacctcttgcccctcttcctggctcagctgaaggatgagtgccctgaggtacggctgaacatcatctctaacctggactgtgtgaacgaggtgattggcatccggcagctgtcccagtccctgctccctgccattgtggagctggctgaggacgccaagtggcgggtgcggctggccatcattgagtacatgcccctcctggctggacagctgggagtggagttctttgatgagaaacttaactccttgtgcatggcctggcttgtggatcatgtatatgccatccgcgaggcagccaccagcaacctgaagaagctagtggaaaagtttgggaaggagtgggcccatgccacaatcatccccaaggtcttggccatgtccggagaccccaactacctgcaccgcatgactacgctcttctgcatcaatgtgctgtctgaggtctgtgggcaggacatcaccaccaagcacatgctacccacggttctgcgcatggctggggacccggttgccaatgtccgcttcaatgtggccaagtctctgcagaagatagggcccatcctggacaacagcaccttgcagagtgaagtcaagcccatcctagagaagctgacccaggaccaggatgtggacgtcaaatactttgcccaggaggctctgactgttctgtctctcgcctgatgctggaagaggagcaaacactggcctctggtgtccaccctccaacccccacaagtccctctttggggagacactggggggcctttggctgtcactccctgtgcatggtctgaccccaggccccttcccccagcacggttcctcctctccccagcctgggaagatgtctcactgtccacctcccaacgggctaggggagcacggggttggacaggacagtgaccttgggaggaaggggctactccgcccacgtcagggagagatgtgagcatcccgggtcactggatcctgctgctgtaatgggaacccctcccccatttacttctccacctcccgtcctccccatcattggtttttttttgtgtgtcaactgtgccgtttttattttattccttttattttcccccttttcacagagaaataaaggtctagaagt

SEQ ID NO: 171150 - DNA, 444 bp, Homo sapiens
  Payload ID: 13675
  Gene Symbol: PPP2R1A
  Gene Name: protein phosphatase 2, regulatory subunit A, alpha
  ENST ID: ENST00000477989
  CDS Start-End: 7-207
gccaagatggcggcggccgacggcgacgactcgctgtaccccatcgcggtgctcatagacgaactccgcaatgaggacgttcagagacggggtttcaccatgttggccaggcttggtcgggaactcttgacctcaagcgatccacccgcctcggcctcccaaagtgttggaattacaggcgtgagccaccgcgcccagcccggatgaacattcctggttatgggatgaggtgacccaaggctctgagccgggctggtgtgggattgagaacagttagaactgcaagtccacctcccacctgctgtgtgaccttgtgcaaattacttcaccgctttgggtctctgtgttccataaaatatgggctaattgtagtcctggtcttgctggagggacttgtgagggactgaacgaattatgacacaaataaaaagtagaatggtgtca

SEQ ID NO: 171151 - DNA, 117 bp, Homo sapiens
  Payload ID: 13675
  Gene Symbol: PPP2R1A
  Gene Name: protein phosphatase 2, regulatory subunit A, alpha
  ENST ID: ENST00000628959
  CDS Start-End: 1-117
atggcggcggccgacggcgacgactcgctgtaccccatcgcggtgctcatagacgaactccgcaatgaggacgttcagtgctgggagctattaataataggagaggcctcgtggtga

SEQ ID NO: 171152 - DNA, 2082 bp, Homo sapiens
  Payload ID: 13676
  Gene Symbol: PPP2R1B
  Gene Name: protein phosphatase 2, regulatory subunit A, beta
  Uniprot ID: P30154
  ENST ID: ENST00000311129
  CDS Start-End: 22-2025
agcagcaggaggagaaagaacatggcgggcgcatcagagctcgggaccggcccaggagcagcgggtggagatggagatgattcgctatacccgatcgcggttttaatcgacgagctccgcaatgaagacgtgcagctccgactcaacagtattaagaagttatcaacaattgccctagcacttggagtagaaaggacccgaagtgaattgttgccatttcttacagatacaatttatgatgaagatgaggtactattagctcttgctgagcagctgggaaatttcactggcctagtgggaggtcctgactttgcccactgtctgctgcctcctttggaaaatctggcaactgtggaagagactgttgttcgtgacaaggctgtggagtccctgagacagatctcccaggagcatactcctgttgctctggaagcttattttgtacctctggtgaaacgcttagcaagtggggattggttcacctctcgcacatctgcatgtggtttgttcagcgtttgctatcccagggcatcaaatgctgttaaagcagaaatcagacagcaattccgttccttgtgctcagatgacacaccaatggtacgacgtgctgctgcttccaaattgggtgaatttgcaaaagttttggaattagacagtgtgaaaagtgaaattgttccactgttcactagtctagcttcagatgaacaggattcagtgcgcctccttgctgtggaagcttgtgtcagtattgcccagttattgtctcaggatgaccttgagactttggtgatgcctacacttcgacaagcagcagaagataaatcttggcgcgttcgctatatggtggctgacagattttcagagctccagaaagccatgggtcctaaaatcaccctaaatgacctcatccccgcctttcagaacctacttaaagactgtgaagctgaagtccgggcagctgctgcccacaaagtaaaagaacttggtgagaacttgcccattgaagatagagagaccataattatgaatcaaattctgccttatataaaggaattagtatccgataccaatcaacatgtcaaatcggctctagcttctgtaattatgggattgtctactattttgggcaaagaaaataccattgaacatcttctacctcttttcttagctcagttaaaggatgagtgtcctgacgttcgtttgaatatcatctccaatttggattgtgtaaatgaagtgattggaatccgtcagctctctcagtctctccttcctgccatagtggagctggcagaagatgccaaatggagggtccgcctggccatcattgagtatatgccgctgctggcaggccagctgggtgtggaattctttgatgaaaagctgaattctttatgtatggcttggctcgtggaccatgtatacgccatccgagaagctgccaccaacaacctcatgaaactagttcagaagtttggtacagagtgggcccaaaatactattgttcccaaagtgttagtaatggcaaatgatcctaattacttgcatagaatgaccactttattctgcattaatgcactgtctgaggcctgtggtcaggaaataactactaagcaaatgctgcccatcgtattaaaaatggcaggagaccaagtagcaaatgttcgcttcaatgtggccaaatctctacaaaagattggaccaattctagataccaatgctttacagggagaagtgaagccagtactacagaagttaggtcaagatgaagacatggatgtcaaatactttgcacaggaagctataagtgtggtggcacaaaggctgaggaagctagaatttcctgtgaaggacagtggagaacccagtgtccctcgggctgacaagaaccacttcccaagacccacagtgcctggagaggacatggggaagggaccagtgtatcagttgcgtggagatactagagacacacttgcccagctgggaattgcagagctagtgcatttctcccaaagcacagactaataccccagatttaaaaaaagaacataaaaaataaagtaccacacatattgcactttt

SEQ ID NO: 171153 - DNA, 1953 bp, Homo sapiens
  Payload ID: 13676
  Gene Symbol: PPP2R1B
  Gene Name: protein phosphatase 2, regulatory subunit A, beta
  Uniprot ID: P30154
  ENST ID: ENST00000341980
  CDS Start-End: 8-1678
aaagaacatggcgggcgcatcagagctcgggaccggcccaggagcagcgggtggagatggagatgattcgctatacccgatcgcggttttaatcgacgagctccgcaatgaagacgtgcagctccgactcaacagtattaagaagttatcaacaattgccctagcacttggagtagaaaggacccgaagtgaattgttgccatttcttacagatacaatttatgatgaagatgaggtactattagctcttgctgagcagctgggaaatttcactggcctagtgggaggtcctgactttgcccactgtctgctgcctcctttggaaaatctggcaactgtggaagagactgttgttcgtgacaaggctgtggagtccctgagacagatctcccaggagcatactcctgttgctctggaagcttattttgtacctctggtgaaacgcttagcaagtggggattggttcacctctcgcacatctgcatgtggtttgttcagcgtttgctatcccagggcatcaaatgctgttaaagcagaaatcagacagcaattccgttccttgtgctcagatgacacaccaatggtacgacgtgctgctgcttccaaattgggtgaatttgcaaaagttttggaattagacagtgtgaaaagtgaaattgttccactgttcactagtctagcttcagatgaacaggattcagtgcgcctccttgctgtggaagcttgtgtcagtattgcccagttattgtctcaggatgaccttgagactttggtgatgcctacacttcgacaagcagcagaagataaatcttggcgcgttcgctatatggtggctgacagattttcagagctccagaaagccatgggtcctaaaatcaccctaaatgacctcatccccgcctttcagaacctacttaaagactgtgaagctgaagtccgggcagctgctgcccacaaagtaaaagaacttggtgagaacttgcccattgaagatagagagaccataattatgaatcaaattctgccttatataaagtgtcctgacgttcgtttgaatatcatctccaatttggattgtgtaaatgaagtgattggaatccgtcagctctctcagtctctccttcctgccatagtggagctggcagaagatgccaaatggagggtccgcctggccatcattgagtatatgccgctgctggcaggccagctgggtgtggaattctttgatgaaaagctgaattctttatgtatggcttggctcgtggaccatgtatacgccatccgagaagctgccaccaacaacctcatgaaactagttcagaagtttggtacagagtgggcccaaaatactattgttcccaaagtgttagtaatggcaaatgatcctaattacttgcatagaatgaccactttattctgcattaatgcactgtctgaggcctgtggtcaggaaataactactaagcaaatgctgcccatcgtattaaaaatggcaggagaccaagtagcaaatgttcgcttcaatgtggccaaatctctacaaaagattggaccaattctagataccaatgctttacagggagaagtgaagccagtactacagaagttaggtcaagatgaagacatggatgtcaaatactttgcacaggaagctataagtgttcttgcattggcataatgaggagcaggagggaaaaggcctttactagattcttgtcacaaatttctagtcaatgtgttcttaactgggtggagaaagaatggaaaaccttcaagatctcatccaagcaaatggcaacaacttagaagaaatcatttagtgacttaattctttctaaagatgaaatgggattgttttttactcgtcttccttgttaaatcattatttaagccgttcttattgaccaattcctgacacttgattgtctcctaatgctttatccatcaccacct

SEQ ID NO: 171154 - DNA, 1525 bp, Homo sapiens
  Payload ID: 13676
  Gene Symbol: PPP2R1B
  Gene Name: protein phosphatase 2, regulatory subunit A, beta
  Uniprot ID: P30154
  ENST ID: ENST00000393055
  CDS Start-End: 22-1446
agcagcaggaggagaaagaacatggcgggcgcatcagagctcgggaccggcccaggagcagcgggtggagatggagatgattcgctatacccgatcgcggttttaatcgacgagctccgcaatgaagacgtgcagctccgactcaacagtattaagaagttatcaacaattgccctagcacttggagtagaaaggacccgaagtgaattgttgccatttcttacagatacaatttatgatgaagatgaggtactattagctcttgctgagcagctgggaaatttcactggcctagtgggaggtcctgactttgcccactgtctgctggattcagtgcgcctccttgctgtggaagcttgtgtcagtattgcccagttattgtctcaggatgaccttgagactttggtgatgcctacacttcgacaagcagcagaagataaatcttggcgcgttcgctatatggtggctgacagattttcagagctccagaaagccatgggtcctaaaatcaccctaaatgacctcatccccgcctttcagaacctacttaaagactgtgaagctgaagtccgggcagctgctgcccacaaagtaaaagaacttggtgagaacttgcccattgaagatagagagaccataattatgaatcaaattctgccttatataaaggaattagtatccgataccaatcaacatgtcaaatcggctctagcttctgtaattatgggattgtctactattttgggcaaagaaaataccattgaacatcttctacctcttttcttagctcagttaaaggatgagtgtcctgacgttcgtttgaatatcatctccaatttggattgtgtaaatgaagtgattggaatccgtcagctctctcagtctctccttcctgccatagtggagctggcagaagatgccaaatggagggtccgcctggccatcattgagtatatgccgctgctggcaggccagctgggtgtggaattctttgatgaaaagctgaattctttatgtatggcttggctcgtggaccatgtatacgccatccgagaagctgccaccaacaacctcatgaaactagttcagaagtttggtacagagtgggcccaaaatactattgttcccaaagtgttagtaatggcaaatgatcctaattacttgcatagaatgaccactttattctgcattaatgcactgtctgaggcctgtggtcaggaaataactactaagcaaatgctgcccatcgtattaaaaatggcaggagaccaagtagcaaatgttcgcttcaatgtggccaaatctctacaaaagattggaccaattctagataccaatgctttacagggagaagtgaagccagtactacagaagttaggtcaagatgaagacatggatgtcaaatactttgcacaggaagctataagtgttcttgcattggcataatgaggagcaggagggaaaaggcctttactagattcttgtcacaaatttctagtcaatgtgttcttaactgggtggagaa

SEQ ID NO: 171155 - DNA, 1888 bp, Homo sapiens
  Payload ID: 13676
  Gene Symbol: PPP2R1B
  Gene Name: protein phosphatase 2, regulatory subunit A, beta
  Uniprot ID: P30154
  ENST ID: ENST00000426998
  CDS Start-End: 26-1837
gaccagcagcaggaggagaaagaacatggcgggcgcatcagagctcgggaccggcccaggagcagcgggtggagatggagatgattcgctatacccgatcgcggttttaatcgacgagctccgcaatgaagacgtgcagcctcctttggaaaatctggcaactgtggaagagactgttgttcgtgacaaggctgtggagtccctgagacagatctcccaggagcatactcctgttgctctggaagcttattttgtacctctggtgaaacgcttagcaagtggggattggttcacctctcgcacatctgcatgtggtttgttcagcgtttgctatcccagggcatcaaatgctgttaaagcagaaatcagacagcaattccgttccttgtgctcagatgacacaccaatggtacgacgtgctgctgcttccaaattgggtgaatttgcaaaagttttggaattagacagtgtgaaaagtgaaattgttccactgttcactagtctagcttcagatgaacaggattcagtgcgcctccttgctgtggaagcttgtgtcagtattgcccagttattgtctcaggatgaccttgagactttggtgatgcctacacttcgacaagcagcagaagataaatcttggcgcgttcgctatatggtggctgacagattttcagagctccagaaagccatgggtcctaaaatcaccctaaatgacctcatccccgcctttcagaacctacttaaagactgtgaagctgaagtccgggcagctgctgcccacaaagtaaaagaacttggtgagaacttgcccattgaagatagagagaccataattatgaatcaaattctgccttatataaaggaattagtatccgataccaatcaacatgtcaaatcggctctagcttctgtaattatgggattgtctactattttgggcaaagaaaataccattgaacatcttctacctcttttcttagctcagttaaaggatgagtgtcctgacgttcgtttgaatatcatctccaatttggattgtgtaaatgaagtgattggaatccgtcagctctctcagtctctccttcctgccatagtggagctggcagaagatgccaaatggagggtccgcctggccatcattgagtatatgccgctgctggcaggccagctgggtgtggaattctttgatgaaaagctgaattctttatgtatggcttggctcgtggaccatgtatacgccatccgagaagctgccaccaacaacctcatgaaactagttcagaagtttggtacagagtgggcccaaaatactattgttcccaaagtgttagtaatggcaaatgatcctaattacttgcatagaatgaccactttattctgcattaatgcactgtctgaggcctgtggtcaggaaataactactaagcaaatgctgcccatcgtattaaaaatggcaggagaccaagtagcaaatgttcgcttcaatgtggccaaatctctacaaaagattggaccaattctagataccaatgctttacagggagaagtgaagccagtactacagaagttaggtcaagatgaagacatggatgtcaaatactttgcacaggaagctataagtgtggtggcacaaaggctgaggaagctagaatttcctgtgaaggacagtggagaacccagtgtccctcgggctgacaagaaccacttcccaagacccacagtgcctggagaggacatggggaagggaccagtgtatcagttgcgtggagatactagagacacacttgcccagctgggaattgcagagctagtgcatttctcccaaagcacagactaataccccagatttaaaaaaagaacataaaaaataaagtaccacacatattgc

SEQ ID NO: 171156 - DNA, 582 bp, Homo sapiens
  Payload ID: 13676
  Gene Symbol: PPP2R1B
  Gene Name: protein phosphatase 2, regulatory subunit A, beta
  ENST ID: ENST00000534500
  CDS Start-End: 7-258
aagaacatggcgggcgcatcagagctcgggaccggcccaggagcagcgggtggagatggagatgattcgctatacccgatcgcggttttaatcgacgagctccgcaatgaagacgtgcagctccgactcaacagtattaagaagttatcaacaattgccctagcacttggagtagaaaggacccgaagtgaattgttgccatttcttacagcctcctttggaaaatctggcaactgtggaagagactgttgttcgtgacaaggctgtggagtccctgagacagatctcccaggagcatactcctgttgctctggaagcttattttgtacctctggtgaaacgcttagcaagtggggattggttcacctctcgcacatctgcatgtggtttgttcagcgtttgctatcccagggcatcaaatgctgttaaagcagaaatcagacagcaattccgttccttgtgctcagatgacacaccaatggtacgacgtgctgctgcttccaaattgggtgaatttgcaaaagttttggaattagacagtgtgaaaagtgaaattgttccactgttcactagtctagcttc

SEQ ID NO: 171157 - DNA, 670 bp, Homo sapiens
  Payload ID: 13676
  Gene Symbol: PPP2R1B
  Gene Name: protein phosphatase 2, regulatory subunit A, beta
  ENST ID: ENST00000531890
  CDS Start-End: 1-670
gaacctacttaaagactgtgaagctgaagtccgggcagctgctgcccacaaagtaaaagaacttggtgagaacttgcccattgaagatagagagaccataattatgaatcaaattctgccttatataaaggaattagtatccgataccaatcaacatgtcaaatcggctctagcttctgtaattatgggattgtctactattttgggcaaagaaaataccattgaacatcttctacctcttttcttagctcagttaaaggatgagtgtcctgacgttcgtttgaatatcatctccaatttggattgtgtaaatgaagtgattggaatccgtcagctctctcagtctctccttcctgccatagtggagctggcagaagatgccaaatggagggtccgcctggccatcattgagtatatgccgctgctggcaggccagctggcactgtctgaggcctgtggtcaggaaataactactaagcaaatgctgcccatcgtattaaaaatggcaggagaccaagtagcaaatgttcgcttcaatgtggccaaatctctacaaaagattggaccaattctagataccaatgctttacagggagaagtgaagccagtactacagaagttaggtcaagatgaagacatggatgtcaaatactttgcacaggaagctata

SEQ ID NO: 171158 - DNA, 553 bp, Homo sapiens
  Payload ID: 13676
  Gene Symbol: PPP2R1B
  Gene Name: protein phosphatase 2, regulatory subunit A, beta
  ENST ID: ENST00000531373
  CDS Start-End: 197-553
acctctctagtaaccttgcttcggaccccctgaggcgtccgcccggagccttgcccttcccgggcggttgtcggggaacccgcttcccgcctgggcgccccatccgggccgtgaggtggccgcgtctcttgggcgagggagcaggagaagcgcggtgccaggccgagacggggctggagcggctgaggggcgcaggatgcccagaagccctttgaagtgcccctggatcccttcatctcggcttggaactggctcggcttgttggctccgactcaacagtattaagaagttatcaacaattgccctagcacttggagtagaaaggacccgaagtgaattgttgccatttcttacagatacaatttatgatgaagatgaggtactattagctcttgctgagcagctgggaaatttcactggcctagtgggaggtcctgactttgcccactgtctgctgcctcctttggaaaatctggcaactgtggaagagactgttgttcgtgacaaggctgtggagtccctgagacagatctcccaggagcatactcctgtt

SEQ ID NO: 171159 - DNA, 2294 bp, Homo sapiens
  Payload ID: 13676
  Gene Symbol: PPP2R1B
  Gene Name: protein phosphatase 2, regulatory subunit A, beta
  ENST ID: ENST00000534521
  CDS Start-End: 8-415
aaagaacatggcgggcgcatcagagctcgggaccggcccaggagcagcgggtggagatggagatgattcgctatacccgatcgcggttttaatcgacgagctccgcaatgaagacgtgcagctccgactcaacagtattaagaagttatcaacaattgccctagcacttggagtagaaaggacccgaagtgaattgttgccatttcttacagatacaatttatgatgaagatgaggtactattagctcttgctgagcagctgggaaatttcactggcctagtgggaggtcctgactttgcccactgtctgctgacaccatctgggaattgccatctgggacacgagatcttggcttttctacagaagtcgtgtctttgggttggccgcaccatatgttatcactgtgtgagctgaaagtaaccatttggtatgatgcagctaacattctggttacgtgtaccacctcccttcagtcactttaaaaggcaattccgttccttgtgctcagatgacacaccaatggtacgacgtgctgctgcttccaaattgggtgaatttgcaaaagttttggaattagacagtgtgaaaagtgaaattgttccactgttcactagtctagcttcagatgaacaggattcagtgcgcctccttgctgtggaagcttgtgtcagtattgcccagttattgtctcaggatgaccttgagactttggtgatgcctacacttcgacaagcagcagaagataaatcttggcgcgttcgctatatggtggctgacagattttcagagctccagaaagccatgggtcctaaaatcaccctaaatgacctcatccccgcctttcagaacctacttaaagactgtgaagctgaagtccgggcagctgctgcccacaaagtaaaagaacttggtgagaacttgcccattgaagatagagagaccataattatgaatcaaattctgccttatataaaggaattagtatccgataccaatcaacatgtcaaatcggctctagcttctgtaattatgggattgtctactattttgggcaaagaaaataccattgaacatcttctacctcttttcttagctcagttaaaggatgagtgtcctgacgttcgtttgaatatcatctccaatttggattgtgtaaatgaagtgattggaatccgtcagctctctcagtctctccttcctgccatagtggagctggcagaagatgccaaatggagggtccgcctggccatcattgagtatatgccgctgctggcaggccagctgggtgtggaattctttgatgaaaagctgaattctttatgtatggcttggctcgtggaccatgtatacgccatccgagaagctgccaccaacaacctcatgaaactagttcagaagtttggtacagagtgggcccaaaatactattgttcccaaagtgttagtaatggcaaatgatcctaattacttgcatagaatgaccactttattctgcattaatgcactgtctgaggcctgtggtcaggaaataactactaagcaaatgctgcccatcgtattaaaaatggcaggagaccaagtagcaaatgttcgcttcaatgtggccaaatctctacaaaagattggaccaattctagataccaatgctttacagggagaagtgaagccagtactacagaagttaggtcaagatgaagacatggatgtcaaatactttgcacaggaagctataagtgttcttgcattggcataatgaggagcaggagggaaaaggcctttactagattcttgtcacaaatttctagtcaatgtgttcttaactgggtggagaaagaatggaaaaccttcaagatctcatccaagcaaatggcaacaacttagaagaaatcatttagtgacttaattctttctaaagatgaaatgggattgttttttactcgtcttccttgttaaatcattatttaagccgttcttattgaccaattcctgacacttgattgtctcctaatgctttatccatcaccacctgggctcctgcatcctcactgtggaatcaggcaccagccacataatgttccagacaaagcctggaagggtgtggacccagacgtggagtggagtgattctcttgacgtttacatatatctctgtgtctctccatcattccaaagctaaatgtacatgtttagaataacttattttataaactcttcgggagacatgttgagatttgaccgtaatgaaagccacattttcctgaattatgatggtctgcattagtctcatgtgaaagg

SEQ ID NO: 171160 - DNA, 5587 bp, Homo sapiens
  Payload ID: 13676
  Gene Symbol: PPP2R1B
  Gene Name: protein phosphatase 2, regulatory subunit A, beta
  Uniprot ID: P30154
  ENST ID: ENST00000527614
  CDS Start-End: 67-1872
ctgggcgcggggcggggcctgggcgcggggcgggaggcggtgaccagcagcaggaggagaaagaacatggcgggcgcatcagagctcgggaccggcccaggagcagcgggtggagatggagatgattcgctatacccgatcgcggttttaatcgacgagctccgcaatgaagacgtgcagctccgactcaacagtattaagaagttatcaacaattgccctagcacttggagtagaaaggacccgaagtgaattgttgccatttcttacagatacaatttatgatgaagatgaggtactattagctcttgctgagcagctgggaaatttcactggcctagtgggaggtcctgactttgcccactgtctgctgcctcctttggaaaatctggcaactgtggaagagactgttgttcgtgacaaggctgtggagtccctgagacagatctcccaggagcatactcctgttgctctggaagcttattttgtacctctggtgaaacgcttagcaagtggggattggttcacctctcgcacatctgcatgtggtttgttcagcgtttgctatcccagggcatcaaatgctgttaaagcagaaatcagacagcaattccgttccttgtgctcagatgacacaccaatggtacgacgtgctgctgcttccaaattgggtgaatttgcaaaagttttggaattagacagtgtgaaaagtgaaattgttccactgttcactagtctagcttcagatgaacaggattcagtgcgcctccttgctgtggaagcttgtgtcagtattgcccagttattgtctcaggatgaccttgagactttggtgatgcctacacttcgacaagcagcagaagataaatcttggcgcgttcgctatatggtggctgacagattttcagagctccagaaagccatgggtcctaaaatcaccctaaatgacctcatccccgcctttcagaacctacttaaagactgtgaagctgaagtccgggcagctgctgcccacaaagtaaaagaacttggtgagaacttgcccattgaagatagagagaccataattatgaatcaaattctgccttatataaaggaattagtatccgataccaatcaacatgtcaaatcggctctagcttctgtaattatgggattgtctactattttgggcaaagaaaataccattgaacatcttctacctcttttcttagctcagttaaaggatgagtgtcctgacgttcgtttgaatatcatctccaatttggattgtgtaaatgaagtgattggaatccgtcagctctctcagtctctccttcctgccatagtggagctggcagaagatgccaaatggagggtccgcctggccatcattgagtatatgccgctgctggcaggccagctgggtgtggaattctttgatgaaaagctgaattctttatgtatggcttggctcgtggaccatgtatacgccatccgagaagctgccaccaacaacctcatgaaactagttcagaagtttggtacagagtgggcccaaaatactattgttcccaaagtgttagtaatggcaaatgatcctaattacttgcatagaatgaccactttattctgcattaatgcactgtctgaggcctgtggtcaggaaataactactaagcaaatgctgcccatcgtattaaaaatggcaggagaccaagtagcaaatgttcgcttcaatgtggccaaatctctacaaaagattggaccaattctagataccaatgctttacagggagaagtgaagccagtactacagaagttaggtcaagatgaagacatggatgtcaaatactttgcacaggaagctataagtgttcttgcattggcataatgaggagcaggagggaaaaggcctttactagattcttgtcacaaatttctagtcaatgtgttcttaactgggtggagaaagaatggaaaaccttcaagatctcatccaagcaaatggcaacaacttagaagaaatcatttagtgacttaattctttctaaagatgaaatgggattgttttttactcgtcttccttgttaaatcattatttaagccgttcttattgaccaattcctgacacttgattgtctcctaatgctttatccatcaccacctgggctcctgcatcctcactgtggaatcaggcaccagccacataatgttccagacaaagcctggaagggtgtggacccagacgtggagtggagtgattctcttgacgtttacatatatctctgtgtctctccatcattccaaagctaaatgtacatgtttagaataacttattttataaactcttcgggagacatgttgagatttgaccgtaatgaaagccacattttcctgaattatgatggtctgcattagtctcatgtgaaaggggaatgtggaagctcagggttaatgtagtggttgttttggtttttatttgctcaattttgtctgtactcatgtcattcagaaacctgaagtgtggctgcatcttgctgctaatgtgtgatgttgacgcctaactgaatttgaacagctcaccactgtgcctacatttaaaaatacttctctctcttttctaaaaagctttaactgtagtgcctcctaataagcagtatgtttgtttcattgtgagattgcagttctgtatttcgaatgagtctaagaaccacagggataatactgtgcagatttcctgttctttacctggctctgcttccagcagtattgacacctagtccttgctgcattgtacagtagcttttcaaactgcagttttattgctaagtttttagtatgggtgatactggagtcttatcatttgaagtgtttgcttttctacttttacagtaaaacctcattaattctgaaatttaagataatgagttaagctgaagagtttactgaagcaaattaatagtgaggaagcctatttgaactacttaaacagtattaaagccctttttaaaaagcacctatttgggatcatttgaggtcaagaattcgagatcagcctgaccaacatggtgaaaccccatctctactaaaaatacaaaaaagttagctgggcgtggtggcacacacctgtagtcccagctactcaggaggctgaggcaggagaattgcttgaacctgggaggtagaggttgcactgagccgagatcgcgccactgcactctagcctgggccatagagcgagagtccatctcaaaaaaaaacaactatttttcacataatcaaactcaccttgtctcatgacttttggttaagggggttttcccatagtttatttttctctcagtgcatcttgctatgaggtttgcttgttacccttttggtttttgaattgttgattttgttcacaacctcttttaaatctaacaagtcctgttctgtttagtgaaggcccaaagactcctctaagactttgtatatttgttacataaaaccaagttttactaaatactttaaaatttgtcctacattcgaaaaatagaaattgtaaatcagaggttatctgtctgcattttaaactgccaaattaccttatagtaagtttctattttatgactttgggccaagaattaagtattttcctaagcacaaatctttttctatattctcattttaatatcttatgctattattctgtaaacattttaattttagtttcatgagtctttattttttgttacctgcaagttatgttcttcttcattgaatttcatatttgagagacatttgtcttcatgaagcagatttgcactggaaccattgctttactctggttggaaatgccattgttttggggacagacttttaaaatgcccttgtgtctcccagtgaggagccctaagcattgacttctctaccctaaaactgtttgagagagggagagtgggccctggctttctcaagcatgggtcgggggttcagcggggcctctgtcttttgtggtgacccctcaggggtttcattgtttccttctgacttaagcaatagagagagaatttgttttggtactcttcagaggaattgtgctttggctcataacttggccatgttctccatgaattagttctcctatttttttttttaactaccttaaacttaagggaaaagttctcctatcttgatttcactggaatataggctttaggagctctgtaaggctggtatttttgtctgttttatcttctactgtatcgccagtgcctggaacagtgtctggtgcacataataggtgctcaataaaaatgtgttcaatggatgaatttctaaaatatcctccaatgtgtgcatggaacaaataatcaaaagaaccagactgtgtcttattctcccactgacagaaagattttcctgctttcaggaaacaagctttatgtggcccttttctggtcccctggcttagactacagttctgtgtggatttgtctgattgcttcagacatgtaatgttgtttttcatccttggcagcttacatcagttgtttgtttgattagaaaaatgaagcagacacacacacacacacacacacacacacacacacacacacacaaacatataacctatgccaataaaaatgtctcagcaacagtggaattcaccttggtgtttctctctgtaatttgtgtggggtttacccctcacaggtttaagagaccaggtcttgtttctctctctgtgctaccaagaagatgtgaacctgaggatgcatcttgtttcataagaaggaaggcaggtgaatatgtggtttctaacgaggtcttgttgaaataacgggctgccctcagctcacagaaataccacagctcagccactgtgatgcagagccccaggggtctttgccagacaacttgtcctgactcaacagagacggcagcctgacctttgagctggcttgtccaggcattcaggttgcttgcgtagacttccagggaagcaagcctgtccttcctgacccggcggttaacctggtgcacttttgttcctttgttaactgttgtgttgtcactaaactgaaaggctggggcttgcccttagacgtcacattggctctgtccctgtggcgatggcagggcagggtggccaaacaggtcaggtgcttgttctgtcctcttgccttttacttaaattcctctgacttttaaaaatggtgacactcttatcgtaaagcttcttatttttctccactgcttggatatgaaactgtagagggagaggccctgttgcccagtgttctcctggtttagcagctgaggtgactgcagtctgatgtgatgtaactgtttccctttgattctccagtattcctgtttccatccagttccttactctcctctttcctcttccctcgcatgtctccctccagtcctctgtacctagaatagtctcactgtcccccgtttgcctccacgagcctgctgtttccaggaaattacataacgttcagttgggatggaaatcttccggaggacgaatagagtttaattactcattgcgtcggaaagccaagccatttctgtctccagagttgttctcttaaactgatatgagttct

SEQ ID NO: 171161 - DNA, 1878 bp, Homo sapiens
  Payload ID: 13677
  Gene Symbol: PPP2R2A
  Gene Name: protein phosphatase 2, regulatory subunit B, alpha
  Uniprot ID: P63151
  ENST ID: ENST00000315985
  CDS Start-End: 32-1405
atatgaatcattactccttacccaggcagtaatgttcccgaagttttctcttcgttctatgtttcatggagctggaggagggaatgatattcagtggtgtttttctcaggtgaaaggagcagtagatgatgatgtagcagaagcagatataatttctacagtagaatttaatcattctggagaattactagcaacaggagataaaggtggtagagttgtcatctttcaacaggagcaggagaacaaaatccagtctcatagcagaggagaatataatgtttacagcaccttccagagccatgaaccagagtttgactacttgaaaagtttagaaatagaagaaaagatcaacaaaattaggtggttaccccagaaaaatgctgctcagtttttattgtctaccaatgataaaacaataaaattatggaaaatcagtgaaagggacaaaagaccagaagggtataacttgaaagaggaggatggaaggtatagagatcctactacagttactacactacgagtgccagtctttaggcctatggatctaatggttgaggccagtccacgaagaatatttgccaatgctcatacatatcacatcaactcaatttctattaatagtgattatgaaacatatttatctgcagatgatttgcggattaatctttggcatctggaaattacagacaggagttttaacattgtggatatcaagcctgccaatatggaagagctaacagaggtgattacagcagcagaatttcatccaaacagctgtaacacatttgtatacagcagcagtaaaggaactattcggctatgtgacatgagggcatctgccctctgtgatagacattctaaattgtttgaagaacctgaagatcccagtaacaggtcatttttttccgaaatcatctcctctatttcggatgtaaaattcagccatagtggtcgatatatgatgactagagactatttgtcagtcaaaatttgggacttaaatatggaaaacaggcctgtggaaacataccaggtgcatgaatacctcagaagtaaactctgttcactgtatgaaaatgactgcatatttgacaaatttgaatgttgttggaatggatctgacagtgttgtcatgactggatcttacaataatttcttcagaatgtttgacagaaacacaaagcgagacataaccctagaagcatcgcgggaaaacaataagcctcgcacagttctgaagcctcgcaaagtctgtgcaagtggcaagcgaaagaaagatgaaataagtgttgacagcctagacttcaataagaaaatccttcacacagcctggcaccccaaggaaaatatcattgccgtagctactacaaacaatctgtatatatttcaagacaaagtgaattagggttggcattcctagcagaagaacccacttcctgcttagttgagatagttgaatctagcattcgttcctataaaagagagaggtccattgtggcgcccctttccagtgtttgacagtgtgccattcgacaacacattgttatagctacatggagaaagctctgtggattcatcactgtggtgttctccatgtctgctagccatttaggtaagggtagggcacttttaatttaaatgacttcttgcaccatcttgcctaatggactagattggactgtatcaacattgatttactccactttttatgccttccattgtgatgacgtcaaacacagtgaaagccttcagtcatgctatgggatttaattgtgtatcctcattactgtatcatttgtggggtacaccccttccccctttttttaaattaaatacagctcattcttactgtggcttgtagcattcctcctcttctgg

SEQ ID NO: 171162 - DNA, 3940 bp, Homo sapiens
  Payload ID: 13677
  Gene Symbol: PPP2R2A
  Gene Name: protein phosphatase 2, regulatory subunit B, alpha
  Uniprot ID: P63151
  ENST ID: ENST00000380737
  CDS Start-End: 330-1673
aggtgacgtcactggccaggccagccggcgccattttgaaagtggagtcgcctgcccctgccgctgccgccgccgccgtcgctgtcgtagtcgccgccgccgctgccggagaaagagcacgagcggggaagccccagagtgaaatctagcatcctgccggctggtctgcccgcccctccttccttttccccccggcccccgtcccctccccccgcaggtgccatccgccgccatccgccctctctacccccccatccccaggtgaggggggtgagttcaggaagcggagaccccgaggaacccagcagggtcaccatttgcagcgcaacatggcaggagctggaggagggaatgatattcagtggtgtttttctcaggtgaaaggagcagtagatgatgatgtagcagaagcagatataatttctacagtagaatttaatcattctggagaattactagcaacaggagataaaggtggtagagttgtcatctttcaacaggagcaggagaacaaaatccagtctcatagcagaggagaatataatgtttacagcaccttccagagccatgaaccagagtttgactacttgaaaagtttagaaatagaagaaaagatcaacaaaattaggtggttaccccagaaaaatgctgctcagtttttattgtctaccaatgataaaacaataaaattatggaaaatcagtgaaagggacaaaagaccagaagggtataacttgaaagaggaggatggaaggtatagagatcctactacagttactacactacgagtgccagtctttaggcctatggatctaatggttgaggccagtccacgaagaatatttgccaatgctcatacatatcacatcaactcaatttctattaatagtgattatgaaacatatttatctgcagatgatttgcggattaatctttggcatctggaaattacagacaggagttttaacattgtggatatcaagcctgccaatatggaagagctaacagaggtgattacagcagcagaatttcatccaaacagctgtaacacatttgtatacagcagcagtaaaggaactattcggctatgtgacatgagggcatctgccctctgtgatagacattctaaattgtttgaagaacctgaagatcccagtaacaggtcatttttttccgaaatcatctcctctatttcggatgtaaaattcagccatagtggtcgatatatgatgactagagactatttgtcagtcaaaatttgggacttaaatatggaaaacaggcctgtggaaacataccaggtgcatgaatacctcagaagtaaactctgttcactgtatgaaaatgactgcatatttgacaaatttgaatgttgttggaatggatctgacagtgttgtcatgactggatcttacaataatttcttcagaatgtttgacagaaacacaaagcgagacataaccctagaagcatcgcgggaaaacaataagcctcgcacagttctgaagcctcgcaaagtctgtgcaagtggcaagcgaaagaaagatgaaataagtgttgacagcctagacttcaataagaaaatccttcacacagcctggcaccccaaggaaaatatcattgccgtagctactacaaacaatctgtatatatttcaagacaaagtgaattagggttggcattcctagcagaagaacccacttcctgcttagttgagatagttgaatctagcattcgttcctataaaagagagaggtccattgtggcgcccctttccagtgtttgacagtgtgccattcgacaacacattgttatagctacatggagaaagctctgtggattcatcactgtggtgttctccatgtctgctagccatttaggtaagggtagggcacttttaatttaaatgacttcttgcaccatcttgcctaatggactagattggactgtatcaacattgatttactccactttttatgccttccattgtgatgacgtcaaacacagtgaaagccttcagtcatgctatgggatttaattgtgtatcctcattactgtatcatttgtggggtacaccccttccccctttttttaaattaaatacagctcattcttactgtggcttgtagcattcctcctcttctggcctcctggactgctccccttcatctcttacccttgccccctccacccggtcttggtggtggtatattaaaaaaagaaagaatgaaagcacacaaaatgagtcagtttggggtcagtggtataaagggggtatatgttgcaaacaaatgttttagtaacagttggctgtaatcactcctcgccgtgtctggcactgaaaataaggaaaaaaaacctactactgaataaaagtgacaaagaatggagaatctggttttctttttctttttaacctacctcttgtagccaatattttgtgtcatacctttgggcacagtgaaacaaaatgggttttcattgtttattggtatttttgttaattatttttaacaagtgttcttttacatgcaggaggagaggtattggttctctatgaacatattttgaatataggttttattaaggatttcacaatctataaatgctactagtttttttttttttttttaccatcatgagggtattggatacattgtgtctctatttaactcattatgtgttaatgaaattgttgtaaatgggaaccaaatttgtagaacttaatttctactttttagagtgcttaatttcatttttgccttactaaatagtcaaagacttataaaacatttttaacaagttagaacttttttgttattcagtcatataaaatagcagaaaactaacatcaagtgacactgcactaaatactttttttgtattttactgctatcaaatcagaatgaaatatactttaccatagatatttttcttctatttttggttttccaaagctatatgaaagacaaatttttaaaggtacagcgttcaaaaagtgcttaatgaactccaacagctgcctcaaataaaaatctgtatatgaatacattttccctaagcggtgatacattatccaaagatgaagagtgctcctatttttaataggtagaatgtacctttgtcagtcttgcagaaactttaatggagaagaaatggactttatttttgaaaggtgaaatgaacaggcatttatattattagagaatggtagtcttattttggtggaacataatgtaacaaccttgaatttcagaggactctgagtgcttctatgtccactacctattgttctattcttcaataatgaaaaagaattcaacgagccgaccgtgattccctctactacaaatattatgtcttgtaagttagcatttttagcacacaggagaaattttatgtaataaaattactgtatcttttggatttaacaaatttgtatttgaaacacattctatgtctgataattcttaatggcacttttactaatttatttggggatcttgggtacattcttaatttgtgtttattcttcacgcttgacttgcaagtgggatattcccctgccacaagtgtcaaacagtgatattcttcctgtgttgtgactggacagttttccagatcttttttgggagattttcctacagcttggttgtatgtcttgagataacaccaccaaacagctctcagaaattcttttttgattgatcagtagctatgatgattctcctccatgacactaaggattagtttatatatttaagagaaataattgctaaaattaaaatgcctctatcaaggaatgctattataaattattgttaacattctcaagtattaattttttaatttcattggtgtagcaaactctaagcccagccactcattttacatggccatggttaatctttttattaataaaaattatacttagaataaa

SEQ ID NO: 171163 - DNA, 755 bp, Homo sapiens
  Payload ID: 13677
  Gene Symbol: PPP2R2A
  Gene Name: protein phosphatase 2, regulatory subunit B, alpha
  ENST ID: ENST00000518254
  CDS Start-End: 293-448
gaaagtggagtcgcctgcccctgccgctgccgccgccgccgtcgctgtcgtagtcgccgccgccgctgccggagaaagagcacgagcggggaagccccagagtgaaatctagcatcctgccggctggtctgcccgcccctccttccttttccccccggcccccgtcccctccccccgcaggtgccatccgccgccatccgccctctctacccccccatccccaggtgaggggggtgagttcaggaagcggagaccccgaggaacccagcagggtcaccatttgcagcgcaacatggcaggagctggaggagggaatgatattcagtggtgtttttctcaggtgaaaggagcagtagatgatgatgtagcagaaggtaagaaagcgtttaatgcaaaatttggatatataatttttgcagaaatgtttcctactggaggatttccttgaagccgagactgctataaattcaagatgattttgttgtccaagaaatcagatataatttctacagtagaatttaatcattctggagaattactagcaacaggagataaaggtggtagagttgtcatctttcaacaggagcaggagaacaaaatccagtctcatagcagaggagaatataatgtttacagcaccttccagagccatgaaccagagtttgactacttgaaaagtttagaaatagaagaaaagatcaacaaaattaggtggttaccccagaaaaatgctgctcagtttttattgtctacca

SEQ ID NO: 171164 - DNA, 601 bp, Homo sapiens
  Payload ID: 13677
  Gene Symbol: PPP2R2A
  Gene Name: protein phosphatase 2, regulatory subunit B, alpha
  ENST ID: ENST00000521557
  CDS Start-End: 560-601
ctttctaatgcagtaccaagtattggggactaacctctttccaaactggtgctcttggtggtagttgtatgtgtgggcagaactaggctgagctggaggagggaatgatattcagtggtgtttttctcaggtgaaaggagcagtagatgatgatgtagcagaagcagatataatttctacagtagaatttaatcattctggagaattactagcaacaggagataaaggtggtagagttgtcatctttcaacaggagcaggagaacaaaatccagtctcatagcagaggagaatataatgtttacagcaccttccagagccatgaaccagagtttgactacttgaaaagtttagaaatagaagaaaagatcaacaaaattaggtggttaccccagaaaaatgctgctcagtttttattgtctaccaatgataaaacaataaaattatggaaaatcagtgaaagggacaaaagaccagaagggtataacttgaaagaggaggatggaaggtatagagatcctactacagttactacactacgagtgccagtctttaggcctatggatctaatggttgaggccagtccacgaagaatatttgcc

SEQ ID NO: 171165 - DNA, 836 bp, Homo sapiens
  Payload ID: 13677
  Gene Symbol: PPP2R2A
  Gene Name: protein phosphatase 2, regulatory subunit B, alpha
  ENST ID: ENST00000520329
  CDS Start-End: 293-394
gaaagtggagtcgcctgcccctgccgctgccgccgccgccgtcgctgtcgtagtcgccgccgccgctgccggagaaagagcacgagcggggaagccccagagtgaaatctagcatcctgccggctggtctgcccgcccctccttccttttccccccggcccccgtcccctccccccgcaggtgccatccgccgccatccgccctctctacccccccatccccaggtgaggggggtgagttcaggaagcggagaccccgaggaacccagcagggtcaccatttgcagcgcaacatggcaggagctggaggagggaatgatattcagtggtgtttttctcaggtgaaaggagcagtagatgatgatgtagcagaagatcacttatttgagacatagtcctcaagtggaattatgaaatcaaagagtgactccataaagtgcctcacaacacaagagctgagcagatataatttctacagtagaatttaatcattctggagaattactagcaacaggagataaaggtggtagagttgtcatctttcaacaggagcaggagaacaaaatccagtctcatagcagaggagaatataatgtttacagcaccttccagagccatgaaccagagtttgactacttgaaaagtttagaaatagaagaaaagatcaacaaaattaggtggttaccccagaaaaatgctgctcagtttttattgtctaccaatgataaaacaataaaattatggaaaatcagtgaaagggacaaaagaccagaagggtataacttgaaagaggaggatggaaggtatagagatcctactacagttactacactacga

SEQ ID NO: 171166 - DNA, 653 bp, Homo sapiens
  Payload ID: 13677
  Gene Symbol: PPP2R2A
  Gene Name: protein phosphatase 2, regulatory subunit B, alpha
  ENST ID: ENST00000522535
  CDS Start-End: 644-653
gaaatccccctcgccccctgacaaggcaccgcttccttattcctccctccatcaccccctagcgaccgcccgcgcctcgcgcagagccacagggcgcccctcgggtttgagggagtagggtccagaggggtggggtgggggcggggagggctcccgggaggcaagtggtcacggagctggaggagggaatgatattcagtggtgtttttctcaggtgaaaggagcagtagatgatgatgtagcagaagcagatataatttctacagtagaatttaatcattctggagaattactagcaacaggagataaaggtggtagagttgtcatctttcaacaggagcaggagaacaaaatccagtctcatagcagaggagaatataatgtttacagcaccttccagagccatgaaccagagtttgactacttgaaaagtttagaaatagaagaaaagatcaacaaaattaggtggttaccccagaaaaatgctgctcagtttttattgtctaccaatgataaaacaataaaattatggaaaatcagtgaaagggacaaaagaccagaagggtataacttgaaagaggaggatggaaggtatagagatcctactacagttactacactacgagtgccagtctttaggcctatggatctaa

SEQ ID NO: 171167 - DNA, 529 bp, Homo sapiens
  Payload ID: 13677
  Gene Symbol: PPP2R2A
  Gene Name: protein phosphatase 2, regulatory subunit B, alpha
  ENST ID: ENST00000523925
  CDS Start-End: 514-529
tttcggtttcttttcctctctgtctggagccagtgatttgctggagctggaggagggaatgatattcagtggtgtttttctcaggtgaaaggagcagtagatgatgatgtagcagaagcagatataatttctacagtagaatttaatcattctggagaattactagcaacaggagataaaggtggtagagttgtcatctttcaacaggagcaggagaacaaaatccagtctcatagcagaggagaatataatgtttacagcaccttccagagccatgaaccagagtttgactacttgaaaagtttagaaatagaagaaaagatcaacaaaattaggtggttaccccagaaaaatgctgctcagtttttattgtctaccaatgataaaacaataaaattatggaaaatcagtgaaagggacaaaagaccagaagggtataacttgaaagaggaggatggaaggtatagagatcctactacagttactacactacgagtgccagtctttaggcctatggatctaatggttg

SEQ ID NO: 171168 - DNA, 830 bp, Homo sapiens
  Payload ID: 13677
  Gene Symbol: PPP2R2A
  Gene Name: protein phosphatase 2, regulatory subunit B, alpha
  ENST ID: ENST00000518397
  CDS Start-End: 207-605
cggggaagccccagagtgaaatctagcatcctgccggctggtctgcccgcccctccttccttttccccccggcccccgtcccctccccccgcaggtgccatccgccgccatccgccctctctacccccccatccccaggtgaggggggtgagttcaggaagcggagaccccgaggaacccagcagggtcaccatttgcagcgcaacatggcaggagctggaggagggaatgatattcagtggtgtttttctcaggtgaaaggagcagtagatgatgatgtagcagaagcagatataatttctacagtagaatttaatcattctggagaattactagcaacaggagataaaggtggtagagttgtcatctttcaacaggagcaggagaacaaaatccagtctcatagcagaggagaatataatgtttacagcaccttccagagccatgaaccagagtttgactacttgaaaagtttagaaatagaagaaaagatcaacaaaattaggtggttaccccagaaaaatgctgctcagtttttattgtctaccaatgtacaggctggatttagtgactcacttccaaagaacagaatatggcaagggtgaaagagtcattgtatagtggagaagcctggcaaacattgtcttaaccaaatgacccaagttaacgccaccagctataaaacaataaaattatggaaaatcagtgaaagggacaaaagaccagaagggtataacttgaaagaggaggatggaaggtatagagatcctactacagttactacactacgagtgccagtctttaggcctatggatctaatggttgaggcc

SEQ ID NO: 171169 - DNA, 784 bp, Homo sapiens
  Payload ID: 13677
  Gene Symbol: PPP2R2A
  Gene Name: protein phosphatase 2, regulatory subunit B, alpha
  ENST ID: ENST00000524169
  CDS Start-End: 193-784
cgcctgcccctgccgctgccgccgccgccgtcgctgtcgtagtcgccgccgccgctgccggagaaagagcacgagcggggaagccccagagtgaaatctagcatcctgccggctgatgatttgcggattaatctttggcatctggaaattacagacaggagttttaacattgtggatatcaagcctgccaatatggaagagctaacagaggtgattacagcagcagaatttcatccaaacagctgtaacacatttgtatacagcagcagtaaaggaactattcggctatgtgacatgagggcatctgccctctgtgatagacattctaaattgtttgaagaacctgaagatcccagtaacaggtcatttttttccgaaatcatctcctctatttcggatgtaaaattcagccatagtggtcgatatatgatgactagagactatttgtcagtcaaaatttgggacttaaatatggaaaacaggcctgtggaaacataccaggtgcatgaatacctcagaagtaaactctgttcactgtatgaaaatgactgcatatttgacaaatttgaatgttgttggaatggatctgacagtgttgtcatgactggatcttacaataatttcttcagaatgtttgacagaaacacaaagcgagacataaccctagaagcatcgcgggaaaacaataagcctcgcacagttctgaagcctcgcaaagtctgtgcaagtggcaagcgaaagaaagatgaaataagtgttgacagcctagacttcaataagaaaa

SEQ ID NO: 171170 - DNA, 99 bp, Homo sapiens
  Payload ID: 13677
  Gene Symbol: PPP2R2A
  Gene Name: protein phosphatase 2, regulatory subunit B, alpha
  ENST ID: ENST00000630149
  CDS Start-End: 1-99
tttccaggagctggaggagggaatgatattcagtggtgtttttctcaggtgaaaggagcagtagatgatgatgtagcagaagtaggaattttccaaaca

SEQ ID NO: 171171 - DNA, 3128 bp, Homo sapiens
  Payload ID: 13678
  Gene Symbol: PPP2R5A
  Gene Name: protein phosphatase 2, regulatory subunit B', alpha
  Uniprot ID: Q15172
  ENST ID: ENST00000261461
  CDS Start-End: 575-2035
cgcagagggccggggctacggggcagcgccccgggcgatgaggggccggcgttgaccgggaagagcgggcaccgcggcagtggctccgaggggacccgcgatggcagcgccctgagaggaggctccaggcagggcgggctgcgctggcagcggccgctgaggtgctggccggccggctggctggcgacgggggcagaagcgacgagaggcgcgctcggcacccgcacccccgtgcccccgcctcagttgtctaaacttcgggctctcttccacccgctctgcgcgcccagagtcaacaacttcttcacccccctccgcccccgcccttccctccgtcagccccgggagctcgccgcgcgccggggaccaggaacctccagcgctgagatgtggccgtgaggcgttggcgggcggcgaggagaagctcggcggcgtcccggggccggagggccgtggggccggggcgcaggggcgcgagcaccccgcgcctctcccccgcctcctcctgccgtctccgccgctgcccgtgccttgcaagcagcagccggagctgccaagcgtcagggccgcggagatgtcgtcgtcgtcgccgccggcgggggctgccagcgccgccatctcggcctcggagaaagtggacggcttcacccggaaatcggtccgcaaggcgcagaggcagaagcgctcccagggctcgtcgcagtttcgcagccagggcagccaggcagagctgcacccgctgccccagctcaaagatgccacttcaaatgaacaacaagagcttttctgtcagaagttgcagcagtgttgtatactgtttgatttcatggactctgtttcagacttgaagagcaaagaaattaaaagagcaacactgaatgaactggttgagtatgtttcaactaatcgtggtgtaattgttgaatcagcgtattctgatatagtaaaaatgatcagtgctaacatcttccgtacacttcctccaagtgataatccagattttgatccagaagaggatgaacccacgcttgaggcctcttggcctcacatacagttggtatatgaattcttcttgagatttttggagagccctgatttccagcctagcattgcaaaacgatacattgatcagaaattcgtacaacagctcctggagctttttgatagtgaagatcccagagaacgtgacttcctgaagactgttctgcaccgaatttatgggaaatttcttggattaagagcattcatcagaaaacaaattaacaacattttcctcaggtttatatatgaaacagaacatttcaatggtgttgctgaacttcttgaaatattaggaagtattatcaatggctttgcattgccactgaaagcagaacataaacaatttctaatgaaggttcttattcctatgcatactgcaaaaggattagctttgtttcatgctcagctagcatattgtgttgtacagttcctggagaaagatacaacactaacagagccagtgatcagaggactgctgaaattttggccaaaaacctgcagtcagaaagaggtgatgtttttaggagaaattgaagaaatcttagatgtcattgaaccaacacagttcaaaaaaattgaagagccacttttcaagcagatatccaagtgtgtatccagttctcattttcaggttgcagaaagggcattgtacttctggaataacgaatatattcttagtttgattgaggagaacattgataaaattctgccaattatgtttgccagtttgtacaaaatttccaaagaacactggaatccgaccattgtagcactggtatacaatgtgctgaaaaccctaatggaaatgaatggcaagcttttcgatgaccttactagctcatacaaagctgaaagacagagagagaaaaagaaggaattggaacgtgaagaattatggaaaaaattagaggagctaaagctaaagaaagctctagaaaaacagaatagtgcttacaacatgcacagtattctcagcaatacaagtgccgaataaaaaaaaagcctcccacctctgccggataggcagagttttgtatgcttttttgaaatatgtaaaaattacaaaacaaacctcatcagtataatataattaaaaggccaattttttctggcaactgtaaatggaaaaatatatggactaaacgtagccctgtgctgtatcatggccatagtatattgtaacctttgtctaatcattggatttattgtgtcacttctgaagtttcacagaaatgaatgaattttatcatctatgatatgagtgagataattatgggagtggtaagaattatgacttgaattcttctttgattgtgttgcacatagatatggtagtctgctctgtatatttttcccttttataatgtgcttttcacactgctgcaaaccttagttacatcctaggaaaaaatacttcctaaaataaaactaaggtatcatccttacccttctctttgtctcacccagaaatatgatggggggaattacctgccctaacccctccctcaataaatacattactgtactctggaatttaggcaaaaccttaaatctccaggctttttaaagcacaaaatataaataaaagctgggaaagtaaaccaaaattcttcagattgttcctcatgaatatcccccttcctctgcaattctccagagtggtaacagatgggtagaggcagctcaggtgaattacccagcttgcctctcaattcattcctcctcttcctctcaaaggctgaaggcagggcctttccagtcctcacaacctgtccttcacctagtccctcctgacccagggatggaggctttgagtcccacagtgtggtgatacagagcactagttgtcactgcctggctttatttaaaggaactgcagtaggcttcctctgtagagctctgaaaaggttgactatatagaggtcttgtatgtttttacttggtcaagtatttctcacatcttttgttatcagagtaccattccaatctcttaacttgcagttgtgtggaaaactgttttgtaatgaaagatcttcattgggggattgagcagcatttaataaagtctatgtttgtattttgcctta

SEQ ID NO: 171172 - DNA, 1719 bp, Homo sapiens
  Payload ID: 13678
  Gene Symbol: PPP2R5A
  Gene Name: protein phosphatase 2, regulatory subunit B', alpha
  Uniprot ID: Q15172
  ENST ID: ENST00000537030
  CDS Start-End: 278-1567
atgatacagtgcttgttctataatttgtagcatgaatcctatatgagatcttactttagatttcaagtatgttagcagcagtaattagggatgttttcctctaaggaaaattatagttataaaattattatttgttagaaatgattcctgctacttcaaattatttatccttaaatgtagaggattaacaatgaacaacttgaaataacttggttatcacctcagaagtttagtttatcactgatttaatgaagaagggcaagaagaggaaggctttatgataatgaatgccacttcaaatgaacaacaagagcttttctgtcagaagttgcagcagtgttgtatactgtttgatttcatggactctgtttcagacttgaagagcaaagaaattaaaagagcaacactgaatgaactggttgagtatgtttcaactaatcgtggtgtaattgttgaatcagcgtattctgatatagtaaaaatgatcagtgctaacatcttccgtacacttcctccaagtgataatccagattttgatccagaagaggatgaacccacgcttgaggcctcttggcctcacatacagttggtatatgaattcttcttgagatttttggagagccctgatttccagcctagcattgcaaaacgatacattgatcagaaattcgtacaacagctcctggagctttttgatagtgaagatcccagagaacgtgacttcctgaagactgttctgcaccgaatttatgggaaatttcttggattaagagcattcatcagaaaacaaattaacaacattttcctcaggtttatatatgaaacagaacatttcaatggtgttgctgaacttcttgaaatattaggaagtattatcaatggctttgcattgccactgaaagcagaacataaacaatttctaatgaaggttcttattcctatgcatactgcaaaaggattagctttgtttcatgctcagctagcatattgtgttgtacagttcctggagaaagatacaacactaacagagccagtgatcagaggactgctgaaattttggccaaaaacctgcagtcagaaagaggtgatgtttttaggagaaattgaagaaatcttagatgtcattgaaccaacacagttcaaaaaaattgaagagccacttttcaagcagatatccaagtgtgtatccagttctcattttcaggttgcagaaagggcattgtacttctggaataacgaatatattcttagtttgattgaggagaacattgataaaattctgccaattatgtttgccagtttgtacaaaatttccaaagaacactggaatccgaccattgtagcactggtatacaatgtgctgaaaaccctaatggaaatgaatggcaagcttttcgatgaccttactagctcatacaaagctgaaagacagagagagaaaaagaaggaattggaacgtgaagaattatggaaaaaattagaggagctaaagctaaagaaagctctagaaaaacagaatagtgcttacaacatgcacagtattctcagcaatacaagtgccgaataaaaaaaaagcctcccacctctgccggataggcagagttttgtatgcttttttgaaatatgtaaaaattacaaaacaaacctcatcagtataatataattaaaaggccaattttttctggcaactgtaaatggaaaaatatatggactaaacgt

SEQ ID NO: 171173 - DNA, 6795 bp, Homo sapiens
  Payload ID: 13679
  Gene Symbol: PPP2R3A
  Gene Name: protein phosphatase 2, regulatory subunit B'', alpha
  Uniprot ID: Q06190
  ENST ID: ENST00000264977
  CDS Start-End: 618-4070
aggaggaggaggaggaggagaaggaggtaggggcctgcgggtggctgggcggggcgcgctcgggcctccgctcttcacgcgccgcattcgtagcccgagagtccgcgccgcggggaggcttggaggcaagcgctgcccgcgagctgagccgccggaggaggagccgcgggcaacgaggtttctctgtcattcacagaaaaatgaatcatttaaacctttggaggactcagttatcacaatacttctctactaccaactaagatttatgatagtaaatttatgagagcaaatttccatgttatagaactgttgaagaactaaaagaggatattctttcatcaaaataattctgcagtatcataatattactaaataaaattaaaaagcacaattattaaattattaaatttgccacacatgtgcagcagctactgtatcctgatagtgaccaaacctcaaatataaatggtttcccttcatgggaaaagccattatatttggaagaaaccactgaacattgttattaaatatattttcagctaactgtcatttaggagaattttcatgaaacaagttctagaaagttccaagtcccaccagtaagtggatttgatattatggcagcaacttacagacttgtggttagtactgtgaaccactacagcagcgtggtgatagaccggcgttttgaacaagctatacattattgcactggaacctgccacaccttcacacatggaattgactgcattgtggtacaccatagtgtttgtgcagacctcttgcacatccctgtgtctcagttcaaagatgcagatctgaactctatgtttctaccccatgaaaatgggctttcttcggctgaaggagactatccccaacaggccttcacaggcatacccagggtcaagagaggatctacatttcagaatacctacaacttaaaggatattgcaggagaagcaatcagttttgccagtgggaaaataaaagaattttcctttgaaaaactcaaaaactctaaccatgcagcttacagaaagggaaggaaagttaagtctgactcatttaataggaggtcagttgatttggacttgctttgtggccattataacaacgatgggaacgccccatcctttggtttactgcggagttcctcagttgaggaaaaacctttgtctcatagaaactcactggatacgaacctgacttccatgtttcttcaaaacttttctgaagaagacttggttactcagattttggaaaaacataaaatagataatttttcttctgggacagacataaagatgtgcttggacatcttattgaaatgctccgaggatttaaaaaaatgcacagacatcataaaacaatgcataaagaaaaaatcagggagtagcatcagtgaaggaagtggtaatgatacaatttctagctctgaaactgtctatatgaatgtaatgaccaggttagcatcctatctgaaaaagttaccatttgaattcatgcagtctgggaataatgaggctctagatttaacagaactgatcagtaatatgcctagcttacaactgactcccttctccccagtgtttggcactgaacaaccccctaaatatgaagatgttgtccagctctcagcttctgactctggacgatttcaaactattgaattgcaaaatgacaagcctaattctaggaagatggacactgtacaatccattccaaacaactccacaaattccttatataacttagaggtaaatgatcctagaactctaaaagctgtccaggtccaatcacagtcattaaccatgaatcctttagaaaatgtttcttctgacgacttaatggaaactctttatattgaagaagagtcagatggaaagaaagcattagataaaggacaaaagacagagaatggacctagtcatgagttattaaaggtaaatgaacatagagcagaatttccagaacatgctactcatcttaaaaaatgccccaccccaatgcaaaatgaaattggtaagatatttgagaaatcatttgttaatctacctaaggaagactgtaaatcaaaagtttctaaatttgaagagggagaccagagagattttacaaattccagtagccaggaagagatagataaattgttaatggatttggaatctttttcacagaagatggagacctctctaagagagccacttgcgaagggtaaaaactctaattttttaaatagtcacagtcagttgaccggtcagacccttgtagatcttgagcctaaatctaaagtctcttcacccatagaaaaagtctcaccttcctgtctaacaaggattattgaaaccaatggacacaaaatagaggaagaggatcgagccctcttactgcgaatcctggaaagcattgaagactttgctcaagaactagttgaatgcaaatcaagcagagggagcctatcacaagaaaaggaaatgatgcaaattctacaggaaaccttgacaacttcctcccaggccaatttatcagtctgtagaagtcctgttggtgataaagccaaagatactacttcagcagttttgattcagcagactccagaggtgatcaagattcaaaataaaccagaaaagaaacctggaacaccactcccacctccagccacctctccaagtagtccccgacctctctccccggttccccatgtgaataatgttgtgaatgcgccattgtccataaacattccacggttctactttcctgaaggactcccagatacctgtagtaatcatgaacaaactctaagcagaattgaaactgctttcatggatattgaagaacagaaagcagacatttatgaaatggggaaaattgcaaaggtctgtggctgtcctctctattggaaagcccccatgttcagggctgcagggggagagaagacaggatttgtgacagcacagtcattcattgccatgtggagaaagttgctgaataaccatcatgatgatgcctctaaattcatctgtcttctagcaaagcccaactgcagctctctagaacaggaggatttcatccctctacttcaggatgtggtggatacccaccctggtctcacgttcctgaaagatgctccagaattccactcccgctacatcaccacggttattcagagaatattctacacagtcaacagatcttggagtggaaaaattacttcgacagagataagaaaaagcaactttttgcaaaccctagcacttttggaagaagaggaagatataaaccaaattacagattacttctcctatgaacatttctatgttatttattgtaaattctgggaactagatactgatcacgacctctacatcagccaggccgatctgtctcgatacaatgaccaggcttcatcaagcaggattattgaaaggatattctctggtgcagtaacaaggggaaaaacaatacagaaagagggaagaatgagctatgcagattttgtttggtttttgatctctgaagaagacaaaaggaatcctaccagcattgagtattggttccgctgcatggatgtggatggagacggtgtactctccatgtatgagctggagtacttctatgaggagcagtgtgaacggatggaagccatgggaattgagcccttgccattccatgatttactgtgccagatgcttgacctagtgaagccagctgttgatggcaaaataactctaagagatctgaagaggtgcagaatggctcacatcttctatgacactttctttaatctggagaaatacttagaccatgaacagagagatccctttgcggtccagaaggatgttgagaacgatgggcctgagccctcagactgggaccggtttgccgctgaggagtatgagacgcttgttgcagaggaatctgcccaagcacaattccaggaaggctttgaagattatgaaacagatgaacctgcctctccctctgaatttggaaacaaaagcaataaaatattaagtgcaagccttccagagaaatgtggaaagcttcaatcagtggatgaagaatagctgccggtgtctacaatgaaacgaagatgtgtattttaaatgtttctttcttgtgaagagatgttctcgtttgcatactgctttttaaagactttgatttctccaagtgtgtatcatctgcactaggaactttgtttttaagcaataggtctggatacacatttaacttaggaggctcctccaatttgcctcaaacctcttacggagcttctcctcagaagtggtaccatcgccttccaaagtcagcactctacactcttgaatgtaccaaggatctcttggcgacagtaccaagcacggttctctacacaggtgactgaagttgcctctgtgttggctggcatccctgagtcccctccgggctcctatggagcctagaagaaaccttcacttgcagaaaacttgagtcagaaaattctggaacttgaaaaagtagtaagggcctccagaattgacttagccctagtaataaaagcactgccaaaacatctcagagacttcttttatgtatactggagttcaaagatctttaacttacctggcttaatgtaatttcacagttacctgccaaactactagtcactttacatcctcaggtattgtaaccactgggccttccaactttgctggcaagctctggtaacctccctgactgtggatcttatataaaatctcaagataaaaaaacacttcttaaatgaagtatagaatttgactcatacttggaaaaagcccttttaacttttatcttttattcattgaactattgaatgatgtatttaatatccaaattagttgataactgttttcacttcctatcagaaggcctgcttgaagacataaaggaataatgatacattaaaattcttactagatagatatattccttcctcccaggagtattagactagctaatagtaaaggcctcaacgttattctttacttcatgttgaaaacaattactacagatatttcatccacctcagtatttatcaaggaaatggaaaatgatacagctataaaagaaagctgttatttactgtagttgtagatgtattcactacagaatcctacatttttcagcaggccacagtccagccaaatcctataatatccttgaaaagaaactattaaaaaggatagacatttctgatgtaagtaaaacccccaagcaacttaatatccatctgtcagtcatcaacttttcccctagattttttttttaactagttctgaaagtgtcaagaatagcttccctttccaccctacctaggttccctccttgctggcataaaggccaagcagtgaaatgaaccttgggttagagttatggtaggcaaaaagaaaaggagaatttaggaaataaatatgctataaacaaggtacagtacagtgagagttaacaatcctaggaatcctgcctgtcacaagctcccagttccctgtcattttatcttcatgattagaactgatcttccatttaactattacagaaagcagtaactattgcaactatctaatagttcacacaaaagaattaaaagcttaaaaataatttttaggaaacacaatattcaaaatctaaacacactgataaattattaagattaagattatttatgtgataaatgaaatctcctaccaatccatccagcctttaccagggaagaaaagcaattatttcatttcagatagaaatacaaaaaaaaaaaaaatacttttcttagaagccagatatggtttaaatgttttattatccataatgatctaaactaataagattcaccaaaaagtaaaaattcaattttacaatatacatttttttttttaactatttggctttacctttttaccttggttctccttactgaagtcctcttgctttcactttgatctggtttttgaagtctcttaattattggctgggcatggtgactcatgcctgtaatcccggcactttgggaggccaagggaggtgatcacttgagcccaggagtaaagaccagcctgggcaacatagtgagactccgtctctacaaaaaataaatttagctgggcatggtggtgcacatctgtagtcctaccaacttgggaggctgaggcaggagaatcgcttgagccccaggcttcgaggctgcagtgagctatgattacgacactgcactccagcctaggcgacagagcaagaccccattctcttacaaagtctctattataaaagtacatccatcaataccattccatttaaaatgggctattgtaatttacccacattatcacattttcaggaattataagaatgtgttttattgtactccttccttggagctgaatgcaaggaatgtgaattctgaggaattaaggtagaatatatttgactttctggtaaagatcatggttaagtataatcattactgccaaactggaattttcaagttattataatatcccaggccccttgataaaagctgagggttatcatgaccttaatgctaattcaatgagaaatgagtttaatagcataacattaccaaggtaatcaaactaataaaattccatatatcttccctgcatcttgtcactgtgtaccattcaaagtgtttataaaactctagattcatcaaatgagatttgctcagctttttgaaatgttaagatgtgtttggagaaggctgcatgactttgtttttcccttttagcaaaactaaataaagttgtcaaatat

SEQ ID NO: 171174 - DNA, 2196 bp, Homo sapiens
  Payload ID: 13679
  Gene Symbol: PPP2R3A
  Gene Name: protein phosphatase 2, regulatory subunit B'', alpha
  Uniprot ID: Q06190
  ENST ID: ENST00000334546
  CDS Start-End: 336-1925
ctttcccagaaggctccatattctcaacatgtgcaggtcaatttgacataaagctaccaacaaggagcaacaggcccactgcaggctgtgtttataacttgaaaattatgagcaggtattgggagccacagactgtatttgggaaccagctgcatgtcaggacaagcatagattgtggtctgtggaggctgggagagcacaatgcttgaatttcatttctttgggagataagaagaaaaaataccttcctacctgacaagattgacaacttgctaaatctgattatcttcagaagtgtgctggacagttgcgaagtaaacatttacttttcaaagatgatgatcaaggaaacatctctacgaagggacccggatttaaggggagagctagctttcctggcaaggggctgtgattttgttctcccttcacggtttaagaagcggctgaagtcatttcagcagacacagattcaaaataaaccagaaaagaaacctggaacaccactcccacctccagccacctctccaagtagtccccgacctctctccccggttccccatgtgaataatgttgtgaatgcgccattgtccataaacattccacggttctactttcctgaaggactcccagatacctgtagtaatcatgaacaaactctaagcagaattgaaactgctttcatggatattgaagaacagaaagcagacatttatgaaatggggaaaattgcaaaggtctgtggctgtcctctctattggaaagcccccatgttcagggctgcagggggagagaagacaggatttgtgacagcacagtcattcattgccatgtggagaaagttgctgaataaccatcatgatgatgcctctaaattcatctgtcttctagcaaagcccaactgcagctctctagaacaggaggatttcatccctctacttcaggatgtggtggatacccaccctggtctcacgttcctgaaagatgctccagaattccactcccgctacatcaccacggttattcagagaatattctacacagtcaacagatcttggagtggaaaaattacttcgacagagataagaaaaagcaactttttgcaaaccctagcacttttggaagaagaggaagatataaaccaaattacagattacttctcctatgaacatttctatgttatttattgtaaattctgggaactagatactgatcacgacctctacatcagccaggccgatctgtctcgatacaatgaccaggcttcatcaagcaggattattgaaaggatattctctggtgcagtaacaaggggaaaaacaatacagaaagagggaagaatgagctatgcagattttgtttggtttttgatctctgaagaagacaaaaggaatcctaccagcattgagtattggttccgctgcatggatgtggatggagacggtgtactctccatgtatgagctggagtacttctatgaggagcagtgtgaacggatggaagccatgggaattgagcccttgccattccatgatttactgtgccagatgcttgacctagtgaagccagctgttgatggcaaaataactctaagagatctgaagaggtgcagaatggctcacatcttctatgacactttctttaatctggagaaatacttagaccatgaacagagagatccctttgcggtccagaaggatgttgagaacgatgggcctgagccctcagactgggaccggtttgccgctgaggagtatgagacgcttgttgcagaggaatctgcccaagcacaattccaggaaggctttgaagattatgaaacagatgaacctgcctctccctctgaatttggaaacaaaagcaataaaatattaagtgcaagccttccagagaaatgtggaaagcttcaatcagtggatgaagaatagctgccggtgtctacaatgaaacgaagatgtgtattttaaatgtttctttcttgtgaagagatgttctcgtttgcatactgctttttaaagactttgatttctccaagtgtgtatcatctgcactaggaactttgtttttaagcaataggtctggatacacatttaacttaggaggctcctccaatttgcctcaaacctcttacggagcttctcctcagaagtggtaccatcgccttccaaagtcagcactctacactcttgaatgtaccaa

SEQ ID NO: 171175 - DNA, 806 bp, Homo sapiens
  Payload ID: 13679
  Gene Symbol: PPP2R3A
  Gene Name: protein phosphatase 2, regulatory subunit B'', alpha
  ENST ID: ENST00000447251
  CDS Start-End: 1-574
aaacattccacggttctactttcctgaaggactcccagatacctgtagtaatcatgaacaaactctaagcagaattgaaactgctttcatggatattgaagaacagaaagcagacatttatgaaatggggaaaattgcaaaggtctgtggctgtcctctctattggaaagcccccatgttcagggctgcagggggagagaagacaggatttgtgacagcacagtcattcattgccatgtggagaaagttgctgaataaccatcatgatgatgcctctaaattcatctgtcttctagcaaagcccaactgcagctctctagaacaggaggatttcatccctctacttcaggatgtggtggatacccaccctggtctcacgttcctgaaagatgctccagaattccactcccgctacatcaccacggttattcagagaatattctacacagtcaacagatcttggagtggaaaaattacttcgacagagataagaaaaagcaactttttgcaaagtaatgaagacttggcaaaattagcagtccatgatggatatacaaacatttttttattctaaaatgaacagtcatcatcacagtcagtgttgatatttattgaacacctgatgcctgcctgggctctcagtagaccctagcacttttggaagaagaggaagatataaaccaaattacagattacttctcctatgaacatttctatgttatttattgtaaattctgggaactagatactgatcacgacctctacatcagccaggccgatctgtctcgatacaatgaccaggcttc

SEQ ID NO: 171176 - DNA, 1782 bp, Homo sapiens
  Payload ID: 13679
  Gene Symbol: PPP2R3A
  Gene Name: protein phosphatase 2, regulatory subunit B'', alpha
  Uniprot ID: Q06190
  ENST ID: ENST00000490467
  CDS Start-End: 320-1564
tcttcacgcgccgcattcgtagcccgagagtccgcgccgcggggaggcttggaggcaagcgctgcccgcgagctgagccgccggaggaggagccgcgggcaacgagattcaaaataaaccagaaaagaaacctggaacaccactcccacctccagccacctctccaagtagtccccgacctctctccccggttccccatgtgaataatgttgtgaatgcgccattgtccataaacattccacggttctactttcctgaaggactcccagatacctgtagtaatcatgaacaaactctaagcagaattgaaactgctttcatggatattgaagaacagaaagcagacatttatgaaatggggaaaattgcaaaggtctgtggctgtcctctctattggaaagcccccatgttcagggctgcagggggagagaagacaggatttgtgacagcacagtcattcattgccatgtggagaaagttgctgaataaccatcatgatgatgcctctaaattcatctgtcttctagcaaagcccaactgcagctctctagaacaggaggatttcatccctctacttcaggatgtggtggatacccaccctggtctcacgttcctgaaagatgctccagaattccactcccgctacatcaccacggttattcagagaatattctacacagtcaacagatcttggagtggaaaaattacttcgacagagataagaaaaagcaactttttgcaaaccctagcacttttggaagaagaggaagatataaaccaaattacagattacttctcctatgaacatttctatgttatttattgtaaattctgggaactagatactgatcacgacctctacatcagccaggccgatctgtctcgatacaatgaccaggcttcatcaagcaggattattgaaaggatattctctggtgcagtaacaaggggaaaaacaatacagaaagagggaagaatgagctatgcagattttgtttggtttttgatctctgaagaagacaaaaggaatcctaccagcattgagtattggttccgctgcatggatgtggatggagacggtgtactctccatgtatgagctggagtacttctatgaggagcagtgtgaacggatggaagccatgggaattgagcccttgccattccatgatttactgtgccagatgcttgacctagtgaagccagctgttgatggcaaaataactctaagagatctgaagaggtgcagaatggctcacatcttctatgacactttctttaatctggagaaatacttagaccatgaacagagagatccctttgcggtccagaaggatgttgagaacgatgggcctgagccctcagactgggaccggtttgccgctgaggagtatgagacgcttgttgcagaggaatctgcccaagcacaattccaggaaggctttgaagattatgaaacagatgaacctgcctctccctctgaatttggaaacaaaagcaataaaatattaagtgcaagccttccagagaaatgtggaaagcttcaatcagtggatgaagaatagctgccggtgtctacaatgaaacgaagatgtgtattttaaatgtttctttcttgtgaagagatgttctcgtttgcatactgctttttaaagactttgatttctccaagtgtgtatcatctgcactaggaactttgtttttaagcaataggtctggatacacatttaacttaggaggctcctccaatttgcctcaaacctcttacggagcttctcctcag

SEQ ID NO: 171177 - DNA, 2008 bp, Homo sapiens
  Payload ID: 13680
  Gene Symbol: PPP2R2B
  Gene Name: protein phosphatase 2, regulatory subunit B, beta
  Uniprot ID: Q00005
  ENST ID: ENST00000336640
  CDS Start-End: 232-1572
cttgggggcttctgagtttgagctgcatgcagaaatgtaaggcagtgcttcctggcgctgatggcaaaatgggacccatctccagttattcctcgggcaccccagctttgcaaatctgggaaagaacctacataaacatattggtgatgtagccagcttaaaaggccgagagaatccttatggattcaggagactgtttttttatttagatttttattttttatttggaagatgaaatgcttctctcgttacctgccttacatcttcagacctccgaacaccatcctttcttccagctgccacacagaagctgacattatctctacggtagaattcaaccacacgggagaattactagcgacaggggacaaggggggtcgggttgtaatatttcaacgagagcaggagagtaaaaatcaggttcatcgtaggggtgaatacaatgtttacagcacattccagagccatgaacccgagttcgattacctgaagagtttagaaatagaagaaaaaatcaataaaataagatggctcccccagcagaatgcagcttactttcttctgtctactaatgataaaactgtgaagctgtggaaagtcagcgagcgtgataagaggccagaaggctacaatctgaaagatgaggagggccggctccgggatcctgccaccatcacaaccctgcgggtgcctgtcctgagacccatggacctgatggtggaggccaccccacgaagagtatttgccaacgcacacacatatcacatcaactccatatctgtcaacagcgactatgaaacctacatgtccgctgatgacctgaggattaacctatggaactttgaaataaccaatcaaagttttaatattgtggacattaagccagccaacatggaggagctcacggaggtgatcacagcagccgagttccacccccatcattgcaacaccttcgtgtacagcagcagcaaagggacaatccggctgtgtgacatgcgggcatctgccctgtgtgacaggcacaccaaattttttgaagagccggaagatccaagcaacagatcatttttctctgaaattatctcttcgatttcggatgtgaagttcagccacagtgggaggtatatcatgaccagggactacttgaccgtcaaagtctgggatctcaacatggaaaaccgccccatcgagacttaccaggttcatgactacctccgcagcaagctgtgttccctctatgaaaatgactgcatttttgataaatttgagtgtgtgtggaatgggtcagacagtgtcatcatgacaggctcctacaacaacttcttcaggatgttcgacagaaacaccaagcgtgatgtgacccttgaggcttcgagggaaaacagcaagccccgggctatcctcaaaccccgaaaagtgtgtgtggggggcaagcggagaaaagacgagatcagtgtcgacagtctggactttagcaaaaagatcttgcatacagcttggcatccttcagaaaatattatagcagtggcggctacaaataacctatatatattccaggacaaggttaactaggtggacaagttattacttaataatctcacatactgaatactagtcaaacaagtttttaaatgtttctttgggtcttcatttgatgcattgactttaatttccctatacaggaaatgattggaatagaattaaaaggagtccaacattcccagctccccagttctaagaaacttttgtcaaacccaataggtttgggacacttctgtttagaattgaaagctgccagctaacagtaattcttccatagttgacttgaacttctgatgcttttattgcccagttttctctggtgggtccagtgttttgttcctaggtgtctgctgcgataaaatgaggttgtctgtagtatttaaggagaaaagagataagttttttttaattaagcaattccatttgattgaaaaaaatcaacaaaaaataaacaccgtttactctt

SEQ ID NO: 171178 - DNA, 10704 bp, Homo sapiens
  Payload ID: 13680
  Gene Symbol: PPP2R2B
  Gene Name: protein phosphatase 2, regulatory subunit B, beta
  Uniprot ID: Q00005
  ENST ID: ENST00000394409
  CDS Start-End: 572-1903
cccgcctgccggagccgccctcccgtgggaccagcaccctcattccggccaggcaagcctgaatcctgtccctgccatctcgccactgcagctcgggtccagaaaggcaccattttgtcgcggctgcccgctctcccagggggaggagggatcttttttgcattttggagcggctgccaaggaggggaacctgttgggcatctccccagacccgcttgtgagcgcctccggggcgggcgggcgggaccagacccctcggggcacggcgtatcttggcacccggaggcagcggaggcaggcgcagcatcctcgctgggaactggagctggagtgagcgcaccgcgcgggaggagccgccgcagcctcgcagaacccgagtggaggaggtgacagctccattgccgggtttttattttttttctctccgcctccccgtctcctcctcaggctcggaccatggtgcagtcccactggctcccctgcccccctctcctgtgagactggctgcggggagggatcatggatacttgtctgccggcttctggttcccacgcaagtaagcctgctgtcaatggaggaggacattgatacccgcaaaatcaacaacagtttcctgcgcgaccacagctatgcgaccgaagctgacattatctctacggtagaattcaaccacacgggagaattactagcgacaggggacaaggggggtcgggttgtaatatttcaacgagagcaggagagtaaaaatcaggttcatcgtaggggtgaatacaatgtttacagcacattccagagccatgaacccgagttcgattacctgaagagtttagaaatagaagaaaaaatcaataaaataagatggctcccccagcagaatgcagcttactttcttctgtctactaatgataaaactgtgaagctgtggaaagtcagcgagcgtgataagaggccagaaggctacaatctgaaagatgaggagggccggctccgggatcctgccaccatcacaaccctgcgggtgcctgtcctgagacccatggacctgatggtggaggccaccccacgaagagtatttgccaacgcacacacatatcacatcaactccatatctgtcaacagcgactatgaaacctacatgtccgctgatgacctgaggattaacctatggaactttgaaataaccaatcaaagttttaatattgtggacattaagccagccaacatggaggagctcacggaggtgatcacagcagccgagttccacccccatcattgcaacaccttcgtgtacagcagcagcaaagggacaatccggctgtgtgacatgcgggcatctgccctgtgtgacaggcacaccaaattttttgaagagccggaagatccaagcaacagatcatttttctctgaaattatctcttcgatttcggatgtgaagttcagccacagtgggaggtatatcatgaccagggactacttgaccgtcaaagtctgggatctcaacatggaaaaccgccccatcgagacttaccaggttcatgactacctccgcagcaagctgtgttccctctatgaaaatgactgcatttttgataaatttgagtgtgtgtggaatgggtcagacagtgtcatcatgacaggctcctacaacaacttcttcaggatgttcgacagaaacaccaagcgtgatgtgacccttgaggcttcgagggaaaacagcaagccccgggctatcctcaaaccccgaaaagtgtgtgtggggggcaagcggagaaaagacgagatcagtgtcgacagtctggactttagcaaaaagatcttgcatacagcttggcatccttcagaaaatattatagcagtggcggctacaaataacctatatatattccaggacaaggttaactaggtggacaagttattacttaataatctcacatactgaatactagtcaaacaagtttttaaatgtttctttgggtcttcatttgatgcattgactttaatttccctatacaggaaatgattggaatagaattaaaaggagtccaacattcccagctccccagttctaagaaacttttgtcaaacccaataggtttgggacacttctgtttagaattgaaagctgccagctaacagtaattcttccatagttgacttgaacttctgatgcttttattgcccagttttctctggtgggtccagtgttttgttcctaggtgtctgctgcgataaaatgaggttgtctgtagtatttaaggagaaaagagataagttttttttaattaagcaattccatttgattgaaaaaaatcaacaaaaaataaacaccgtttactcttagacaaattcttcttgttttgtgaaaaaccagaactagtcagtatctcctgcccctccaccatttttttttccattttccattttcctttgaacaatttcatttaagccagagatttattgcatgaagctgagaagaggatgcagaatgacaaggaaagggcacatcaaccctgctatgctctttttttgtaagctccatagaaacagcctgagaatttggctagggaacttgaatgcttcaggggacagaaagagagcactttcgacacagtgcttcccagagtgagcttggcagggccaggcggggccaaattccatctgctgccttgttactcttgctttttgtgctcttaaatggctccatataatcttctacttacatgttccttggcttttttctcttcaaccttttccagcttatttattccattgacttctaaaggccgagtcctgggtgcttattatctggtgttctaaatgaagcagtaagttggaagcagtgccaccacccctgagtccctgagaaaggctggtctgttctttttgggtgtttctcctaagcagcaccctcccctcctcctggttttggtaaccaaaagtaacaatccatcaacctccattgtacctagaacaaaaatagccaataaaaacgctgagttgtgaagtccaatcaggcacttctaactcaccccaagctcgccatctggaaaaacagaccagaaggctctcttctacagaaatgaactgtggggaaatcaagcagctgtgacatgaagtgaatgaagtccacttgaagctgtggaagatggttcatccttttccccagttgaggatccagatttataacttctagaaagccatttccagaaggttctatgtggcacacccctaggaaaggcactaaatgcatgcaaaggatttataaacttaggaaagtagatgggtggagtccagaaaactggttctgggttaatatctctacatctgtcttgatgactcatttctcctaactcccatttagtgcagggtaaatggtttgagatgagagtttttcaatgaaagggaaattttctttcagtttacagatgtattagaagtcctgactttcaagtgtaatttgctttggaggaggaaaaaatagtgaaagaatcattttatctcaattctaagctactatccatttactaatagctttttggcaaggaaataactgtcaccttaggtaaaaacagtcttgttagatgcagcccaatttcaggaacattaaaatgtaaaaaagtacgtctcagaattgagggagcatgggaacaaagacgagactttctcagtatttctcatttttcctgcaaggaaagcctcgccttaggcatctcaagtaaagtggctaaggtgtaaactctctgggcaagatttctgtcctgactgggacagtgttcttggaggagacatgagagagtcagaaacttctgccagtcatagagagtgatgattttgcagaaggccactgggttattggcctacatttaccaccgacttcctttatggccttttctccacttctccggactcagctcctctgtctgtaccacgtcgggggttgggaccaatcattgtatctcaaacttaagaatcaactcacatttgtactattactcatgtaacatttttttaagtcaccttttcttaaaagcaagacttagcctcctccaaagaaataatatgcatgaaatttcaactctgatatgctaggtttttccctaacattaatcacataattatcaatgtaacaaacatgcacccacataccacctgaaatcattttgtgaaccaccaggagcatgtgtatcaaactttgggaccctgagtaactgatatgacagaagatttatgcccttaggggcatcaaagatggtggttcttcacatattagagtcagcagggctgcccataacacacacaggaataatttttgtcatggtttaaggagttcataggcccctttgcagtttatctgcgaactccaaataaaagcccctacactagtccaacacccttagcatatagatgtacaaactgggatccagagtaggatgagtttgccagagaagaaagagcagagggcagccatcctctcctccatcccctgcaaaggatgcattagagcaaacacccaagactcctggacgggaacaggaggggaaagccctagagattaggcctcagggagcaataaccaccacgatgtttcacaaattaactgttctttaccaggtactgaactaggtattttacatgtgtgatctttcagccccagtactggcaatatttcttagttagtggcacatagaagtcagtctgttttcctgctgacactaaaaactacttgaaggctgatttgctaccttgcaacagttggttcgattctaagggccctatactactttaccccacaaggcctgctgcttggtaagagccatcagattacaactggagggtgtcagttgaatgaaggaaaatggaagccacgccatccctggcttttacaaaaaccatccttgcgcaacattcagttcctgacgttaaaaacaagtaatgcaaaaagctgaactttggtagacattcgtactcttctgtcaggaggaggaagattagttagaaaaaacaaaaaaggaagatactagccagcatcaagaagtgggatatataaaggcagatgggcagtgggaatcaagttgcttcttaactccttcaagtttggctcctgcctttactcttccattgaaaaaaaagcacctttaaacctctcattgatcttgtaattaattcaaccaaatcaacttctattaggcaaccagcatatataagatggaacaattgcaaggtggaataaagatgaagctaaaattctgctagctcagtggcccaatgaaataagtcagctatctccactaaacttcctttgaatattctagggtccattataataaaaggtacacactcaaatgcccaatttctaaggacttgaaaagccataatttccctcccttcaagcctacagagcaactgcctaaagcttccctccccagacaaccccaggcctcatttctttttcagtccctttgctagctgcctgcagggctcaagaaagccctggtaggcctcataatgaggatttagggatgacactatagtccacagcctgaatggtggaacccttactaattttccctcttccgtgatgaatgtgtggatgaagccggtgtgtttttaataatgccaccccacttccaaaacaaatcccctgacacagtctttggacataccaccctgaatgcacccgatctcatctgatcttggaagtgaaatggagtcaggcctggttagtctttggatgggggaagtctagacacaccactgagaaacattcacactgcaacctgattcactgtgcatccaacatgccttcatccacctcttccccctgaacttctaagtcaactctcagggactgctttccaagggagcaaccaacctggtcagtggaaaaaggatgagactgggagacaggaaacgtgggtcctgctcctggtaaccatggaacttaagctacccactcagtccctatgtcagtgtcatcacctgtaaaatggccagaaagacatctatcctagctcagagaattgttattgggagaacaagaaatccatttacttacaactattttgataggtttaaagcaccataaactaataatagcaacaacagtgatgggtaatatactattgctttccatgcctcatctcattatctcctctcccagaccccatggtggcattagtatttccattttgcaaatgagaaaatagactcaagttgtcaacctagccaagggcacaaagcccgagagagatggaaccaggactccaactcaaggtatctgactctaaagccagagctgttaaaatacagctctaacatacaatagttgctaacatttattgagcacttattataagccaggctttgttctacaaatttcacatgtattgacttatttacccctaaaactccagatgcagatactattgttgttctcattttatagatacagaaacagatgaatgacaaccaaatttacacagttcacaagtgacaaagccaggcagttttagttaaagttcttatccactatccccatcatacattatgtgtgtgtgtgtgtgtgtgtgtgtgtgtgtgtgtgtgtgtgtatgcatgtagatggaagttactgatcagaaaacaagccccagtaatgacccataagctcaatgaattaaagattcattggttgcctgggatgtgtcaggcagccaggttctagacaaggggctggagttactaagatatttaaaccactggcccctgccctccaagagatgacactcacataggagaaagtgcatatttgcatactgtaaacatttttacaatgagatatctatgaagggcagaagtcatacagaggaagaaatagttaatcaatgagtgataagaaaaggttctcagaatgtgtcatctaagcagaattttaactaaatttgctcaacaaagcatgatacagcgtttccaataggtagaccaacatataccagaatatgaagcaaaatccatatggcatggaaacagaaagccaatgtttctctccttccattagaaacacattttcgacatactagaactagcctacccctttttccttttgttcatccaataacaaatatttattaaaccttattttaagcactgtatttaagtgtaaagtagacggaaagaataaaaggaaaccaatatttcctgagtagttattgcaatgacaggcattgggagaggcactgttttaaatcattgttaatcacctgataggtagatgtattattccatttttatagcgagaaacagactcaaaagggttagatgacgtagcaggaagttttatctagatctatcctgttccagatcctatacttcttccatcacagttattggtaatgcagagttaccttggcttgattattttccctagcgtggatactcacaaacacgccatttctctgtgactaaatattgcctgacagctgaccaagaatacaaatttggtctgtcatcaaagcagagagtgaagtcaagtggctcacaggtctccaacttctgactttgaccttattatgactgattaactgtcccccaatttagatattccatgccccattggttaaactgctggtggcagaaccatcatgatctgccatctccgctgatccctgcctcagctgcaatcaaagcaatgatcactgtcaggccagaagaaggggcttagccactgccaagacagatcccagtccactcccagccttcccgcccctgctgctcattccccaaaaagtcaacctgggttttcctgggtgaacagtgcccactgaacagctcctgcttgcccatctcaagccctctcagttgccactccaatcattttggctgctgtatttggtttgagaaagagtggagaggacacttcttcataactcatatttgacagaaacccagaaattgtaggaacaagccatgattgctgtgattcttgctctggttggctagggatgccctcccttccagccagagtaatacatacttgtgggagtcatggaagactgaggaagctggagtagaagggaacaggggctttcctcagtggtaaaaggaaaagcaacattttggaactctaaacagttgctcagttgggcgaatttcatgcattcattcattcatttactaaatggttaatgattgttcatgtactgcctgccaagcccatgccagggtggtctgtggaagcagcagtgacagctccatcttcacacagctcacagatagcgggaggtgcagacaaactcacaggcaatggtggcagtggaatgtcaagagcccaggataccgagcctgccagcctgcctgcctgggttaaaatctgagctccaccatgtaaaagctgagcaacctagaaaaatgacaacctctctgtgcctcgattttctcattatgagataaggataaaaacgacatctatctcataaaattgctgtgaagattgcatgatttaatatgcacaaagctcttagaaggatgcctggcccacaaatatgcattcagtgcacatttcttgctacagttctgctaatcctataaaacatatgcactatgatggatgtgtctgggtgccaggaggacacaaaggagcactaactcatccagaccagaagcttcccagaggaggtgattcccaaggtgaaatccgaaagataaagggagtgagttatccaggagaagagaaaggaaaagcatattccagacatcaggataggacagtggaggcaaaacagcatatgctatatatatatggaattcacaacactctggtatgactgattagtaaaaagtaggaaggcagaccaagagaaataaggagacatggtaaggtgagtgggcaataatgcatgatctgaaaaataataatgcatggacttagtgtggttcacatatcaggagcttctccaatagccaggctatgaggcactaaaatgaggaaatatggtttccaaacttcgcaaatacttatagtccagccacaggggatatactgataaactcagctcaaatgtcacctcctcagagatgctttctcaaccacccttagttccatgaggactgcatcattgtttaggccactcctgtatccccagagcacagaacattgtctggctcatagtaggtgctcaaaagttttgttgaatgaatgaacaaataaacgtgtaaggaagtcaggcacagcacttgcccacaggaagcttataagatgagcggcatgccattgggagtttgaatgatatatggagatccaaacagggcatcagaggactgctcagaggagtcagggaattaagaaaaaattgggagccagtgagccaagatgtgttaaaagcaagtgatcaagcttagattgcagtgttagttaatagagcatatgtgtccctgcctgatgcattaccttccctgcagtagttagccttctgggaccctgaaaagcatgcagaaaggttgacagcttacaatcaataccatgttcactgatgcaggaagcaacattatcacatccaagatattgcccccacacccaggctgcagcactaaatattccccataacaaggcaaagggaagtgacaagagctattattctcaaccctcccacttggaaacaagaggtgagacaaaccttcccctagatgttcttagggaaaggcaagacccccaaagaaatctttcagagctgagcacatgcctaatacagcaagacagggatgggagaagattggcattttcatttgcctgggtgtccacaatattgcaggggaagctctgtgggcagctgggaaatacaacaataaattggagggggatgaacaatagggtcagtggggctgtgtgctgagtgaatgctggattttattctacatgcccaattcactccaataagataaacttgacttcctccagtgtggctttcttatttcagcttctctgactgtggcataattgaaagtcatatttcatctagaccattggttttcaactccaaatgcaggtggcttatgaagactcagcctgaatatataaagagaacagcaaacaatcatagttgcatattaaagacaatctatttctccgtaaaggaaagtaaagtgagtcatattacatacaagccacaatacagaactgatctgaaatacactgcggaatggcctttcagtctatgctggactctaacaggaaaaaggcagaaggtggtcaatggtgcatttatttaaacccctcatttcctccctgacgagaagaaggacaacagttcttatttttcatattatttttgaaaaggcagaaaggttaattatatattgacatgatttggatctgtgtcctcaccataatctcatgtcaaattgtaatccccagtgtttgaggtggggccaggtgggaggtgattggatcgtggaggtggatttctcatgcatggtttagcaccatcttcttggtgctattctcgtgatagtgagtaagttctcacgagatctggttgtttaaaggtgtgaagaacctcccctctgtctctcttgctcctgttcctgccatgtaagatatgctggctccccctttgccttctgccatgattgtaagtatccagaggcctctccagaagctgagcagatgtcagcaccatgcttcctgtacagcctgtggaaccatgagccaattaaacctcattcctttac

SEQ ID NO: 171179 - DNA, 2071 bp, Homo sapiens
  Payload ID: 13680
  Gene Symbol: PPP2R2B
  Gene Name: protein phosphatase 2, regulatory subunit B, beta
  Uniprot ID: Q00005
  ENST ID: ENST00000394411
  CDS Start-End: 300-1631
cctcctgcagcagcagcagcagcagcagcagcagcagctgcgagtgcgcgcgtgtgggtgtgagggtgagtgcgctggcgccggctgcagcgccctgcccagctccccgccagcttccctacccccgcctgccggagccgccctcccgtgggaccagcaccctcattccggccaggctcggaccatggtgcagtcccactggctcccctgcccccctctcctgtgagactggctgcggggagggatcatggatacttgtctgccggcttctggttcccacgcaagtaagcctgctgtcaatggaggaggacattgatacccgcaaaatcaacaacagtttcctgcgcgaccacagctatgcgaccgaagctgacattatctctacggtagaattcaaccacacgggagaattactagcgacaggggacaaggggggtcgggttgtaatatttcaacgagagcaggagagtaaaaatcaggttcatcgtaggggtgaatacaatgtttacagcacattccagagccatgaacccgagttcgattacctgaagagtttagaaatagaagaaaaaatcaataaaataagatggctcccccagcagaatgcagcttactttcttctgtctactaatgataaaactgtgaagctgtggaaagtcagcgagcgtgataagaggccagaaggctacaatctgaaagatgaggagggccggctccgggatcctgccaccatcacaaccctgcgggtgcctgtcctgagacccatggacctgatggtggaggccaccccacgaagagtatttgccaacgcacacacatatcacatcaactccatatctgtcaacagcgactatgaaacctacatgtccgctgatgacctgaggattaacctatggaactttgaaataaccaatcaaagttttaatattgtggacattaagccagccaacatggaggagctcacggaggtgatcacagcagccgagttccacccccatcattgcaacaccttcgtgtacagcagcagcaaagggacaatccggctgtgtgacatgcgggcatctgccctgtgtgacaggcacaccaaattttttgaagagccggaagatccaagcaacagatcatttttctctgaaattatctcttcgatttcggatgtgaagttcagccacagtgggaggtatatcatgaccagggactacttgaccgtcaaagtctgggatctcaacatggaaaaccgccccatcgagacttaccaggttcatgactacctccgcagcaagctgtgttccctctatgaaaatgactgcatttttgataaatttgagtgtgtgtggaatgggtcagacagtgtcatcatgacaggctcctacaacaacttcttcaggatgttcgacagaaacaccaagcgtgatgtgacccttgaggcttcgagggaaaacagcaagccccgggctatcctcaaaccccgaaaagtgtgtgtggggggcaagcggagaaaagacgagatcagtgtcgacagtctggactttagcaaaaagatcttgcatacagcttggcatccttcagaaaatattatagcagtggcggctacaaataacctatatatattccaggacaaggttaactaggtggacaagttattacttaataatctcacatactgaatactagtcaaacaagtttttaaatgtttctttgggtcttcatttgatgcattgactttaatttccctatacaggaaatgattggaatagaattaaaaggagtccaacattcccagctccccagttctaagaaacttttgtcaaacccaataggtttgggacacttctgtttagaattgaaagctgccagctaacagtaattcttccatagttgacttgaacttctgatgcttttattgcccagttttctctggtgggtccagtgttttgttcctaggtgtctgctgcgataaaatgaggttgtctgtagtatttaaggagaaaagagataagttttttttaattaagcaattccatttgattgaaaaaaatcaacaaaaaataaacaccgtttactcttagac

SEQ ID NO: 171180 - DNA, 1982 bp, Homo sapiens
  Payload ID: 13680
  Gene Symbol: PPP2R2B
  Gene Name: protein phosphatase 2, regulatory subunit B, beta
  Uniprot ID: Q00005
  ENST ID: ENST00000394413
  CDS Start-End: 202-1707
aggacgctgccagggcctgagaagggacaaactccaattgctccagttcaaactggtcctggcctggtcaaacggaggagacagagcagtgattcacagcaggacgtggtacttgcagactgaccgtcctctcaggactcactagggtctcttctctgacgagatgatacctggaattgggacactcacccaggacacactatggtgcttcagccaagtgaaaggcactatcgagattggaaccacagaaggctcggaccatggtgcagtcccactggctcccctgcccccctctcctgtgagactggctgcggggagggatcatggatacttgtctgccggcttctggttcccacgcaagtaagcctgctgtcaatggaggaggacattgatacccgcaaaatcaacaacagtttcctgcgcgaccacagctatgcgaccgaagctgacattatctctacggtagaattcaaccacacgggagaattactagcgacaggggacaaggggggtcgggttgtaatatttcaacgagagcaggagagtaaaaatcaggttcatcgtaggggtgaatacaatgtttacagcacattccagagccatgaacccgagttcgattacctgaagagtttagaaatagaagaaaaaatcaataaaataagatggctcccccagcagaatgcagcttactttcttctgtctactaatgataaaactgtgaagctgtggaaagtcagcgagcgtgataagaggccagaaggctacaatctgaaagatgaggagggccggctccgggatcctgccaccatcacaaccctgcgggtgcctgtcctgagacccatggacctgatggtggaggccaccccacgaagagtatttgccaacgcacacacatatcacatcaactccatatctgtcaacagcgactatgaaacctacatgtccgctgatgacctgaggattaacctatggaactttgaaataaccaatcaaagttttaatattgtggacattaagccagccaacatggaggagctcacggaggtgatcacagcagccgagttccacccccatcattgcaacaccttcgtgtacagcagcagcaaagggacaatccggctgtgtgacatgcgggcatctgccctgtgtgacaggcacaccaaattttttgaagagccggaagatccaagcaacagatcatttttctctgaaattatctcttcgatttcggatgtgaagttcagccacagtgggaggtatatcatgaccagggactacttgaccgtcaaagtctgggatctcaacatggaaaaccgccccatcgagacttaccaggttcatgactacctccgcagcaagctgtgttccctctatgaaaatgactgcatttttgataaatttgagtgtgtgtggaatgggtcagacagtgtcatcatgacaggctcctacaacaacttcttcaggatgttcgacagaaacaccaagcgtgatgtgacccttgaggcttcgagggaaaacagcaagccccgggctatcctcaaaccccgaaaagtgtgtgtggggggcaagcggagaaaagacgagatcagtgtcgacagtctggactttagcaaaaagatcttgcatacagcttggcatccttcagaaaatattatagcagtggcggctacaaataacctatatatattccaggacaaggttaactaggtggacaagttattacttaataatctcacatactgaatactagtcaaacaagtttttaaatgtttctttgggtcttcatttgatgcattgactttaatttccctatacaggaaatgattggaatagaattaaaaggagtccaacattcccagctccccagttctaagaaacttttgtcaaacccaataggtttgggacacttctgtttagaattgaaagctgccagctaacagtaattcttccatagttgacttgaacttctgatgcttttattg

SEQ ID NO: 171181 - DNA, 2262 bp, Homo sapiens
  Payload ID: 13680
  Gene Symbol: PPP2R2B
  Gene Name: protein phosphatase 2, regulatory subunit B, beta
  Uniprot ID: Q00005
  ENST ID: ENST00000394414
  CDS Start-End: 290-1819
gcaaatcctgttcagaggagcttcagccaatgaagaggctatatcccggcttgcttgggggcttctgagtttgagctgcatgcagaaatgtaaggcagtgcttcctggcgctgatggcaaaatgggacccatctccagttattcctcgggcaccccagctttgcaaatctgggaaagaacctacataaacatattggtgatgtagccagcttaaaaggccgagagaatccttatggattcaggagactgtttttttatttagatttttattttttatttggaagatgaaatgcttctctcgttacctgccttacatcttcagacctccgaacaccatcctttcttccagctgccacacagaaggctcggaccatggtgcagtcccactggctcccctgcccccctctcctgtgagactggctgcggggagggatcatggatacttgtctgccggcttctggttcccacgcaagtaagcctgctgtcaatggaggaggacattgatacccgcaaaatcaacaacagtttcctgcgcgaccacagctatgcgaccgaagctgacattatctctacggtagaattcaaccacacgggagaattactagcgacaggggacaaggggggtcgggttgtaatatttcaacgagagcaggagagtaaaaatcaggttcatcgtaggggtgaatacaatgtttacagcacattccagagccatgaacccgagttcgattacctgaagagtttagaaatagaagaaaaaatcaataaaataagatggctcccccagcagaatgcagcttactttcttctgtctactaatgataaaactgtgaagctgtggaaagtcagcgagcgtgataagaggccagaaggctacaatctgaaagatgaggagggccggctccgggatcctgccaccatcacaaccctgcgggtgcctgtcctgagacccatggacctgatggtggaggccaccccacgaagagtatttgccaacgcacacacatatcacatcaactccatatctgtcaacagcgactatgaaacctacatgtccgctgatgacctgaggattaacctatggaactttgaaataaccaatcaaagttttaatattgtggacattaagccagccaacatggaggagctcacggaggtgatcacagcagccgagttccacccccatcattgcaacaccttcgtgtacagcagcagcaaagggacaatccggctgtgtgacatgcgggcatctgccctgtgtgacaggcacaccaaattttttgaagagccggaagatccaagcaacagatcatttttctctgaaattatctcttcgatttcggatgtgaagttcagccacagtgggaggtatatcatgaccagggactacttgaccgtcaaagtctgggatctcaacatggaaaaccgccccatcgagacttaccaggttcatgactacctccgcagcaagctgtgttccctctatgaaaatgactgcatttttgataaatttgagtgtgtgtggaatgggtcagacagtgtcatcatgacaggctcctacaacaacttcttcaggatgttcgacagaaacaccaagcgtgatgtgacccttgaggcttcgagggaaaacagcaagccccgggctatcctcaaaccccgaaaagtgtgtgtggggggcaagcggagaaaagacgagatcagtgtcgacagtctggactttagcaaaaagatcttgcatacagcttggcatccttcagaaaatattatagcagtggcggctacaaataacctatatatattccaggacaaggttaactaggtggacaagttattacttaataatctcacatactgaatactagtcaaacaagtttttaaatgtttctttgggtcttcatttgatgcattgactttaatttccctatacaggaaatgattggaatagaattaaaaggagtccaacattcccagctccccagttctaagaaacttttgtcaaacccaataggtttgggacacttctgtttagaattgaaagctgccagctaacagtaattcttccatagttgacttgaacttctgatgcttttattgcccagttttctctggtgggtccagtgttttgttcctaggtgtctgctgcgataaaatgaggttgtctgtagtatttaaggagaaaagagataagttttttttaattaagcaattccatttgattgaaaaaaatcaacaaaaaataaacaccgtttactcttagacaaa

SEQ ID NO: 171182 - DNA, 2569 bp, Homo sapiens
  Payload ID: 13680
  Gene Symbol: PPP2R2B
  Gene Name: protein phosphatase 2, regulatory subunit B, beta
  Uniprot ID: Q00005
  ENST ID: ENST00000453001
  CDS Start-End: 833-2131
aatgcaccagccgcctccagcctcctgcagcagcagcagcagcagcagcagcagcagctgcgagtgcgcgcgtgtgggtgtgagggtgagtgcgctggcgccggctgcagcgccctgcccagctccccgccagcttccctacccccgcctgccggagccgccctcccgtgggaccagcaccctcattccggccaggcaagcctgaatcctgtccctgccatctcgccactgcagctcgggtccagaaaggcaccattttgtcgcggctgcccgctctcccagggggaggagggatcttttttgcattttggagcggctgccaaggaggggaacctgttgggcatctccccagacccgcttgtgagcgcctccggggcgggcgggcgggaccagacccctcggggcacggcgtatcttggcacccggaggcagcggaggcaggcgcagcatcctcgctgggaactggagctggagtgagcgcaccgcgcgggaggagccgccgcagcctcgcagaacccgagtggaggaggtgacagctccattgccgggtttttattttttttctctccgcctccccgtctcctcctcaggctcggaccatggtgcagtcccactggctcccctgcccccctctcctgtgagactggctgcggggagggatcatggatacttgtctgccggcttctggttcccacgcaagtaagcctgctgtcaatggaggaggacattgatacccgcaaaatcaacaacagtttcctgcgcgaccacagctatgcgaccgaaggagccaagggagaacccaagacagagaatagtggcccaataatgaagcatgaattatccagatgaaaacacctatggaaataaagctgacattatctctacggtagaattcaaccacacgggagaattactagcgacaggggacaaggggggtcgggttgtaatatttcaacgagagcaggagagtaaaaatcaggttcatcgtaggggtgaatacaatgtttacagcacattccagagccatgaacccgagttcgattacctgaagagtttagaaatagaagaaaaaatcaataaaataagatggctcccccagcagaatgcagcttactttcttctgtctactaatgataaaactgtgaagctgtggaaagtcagcgagcgtgataagaggccagaaggctacaatctgaaagatgaggagggccggctccgggatcctgccaccatcacaaccctgcgggtgcctgtcctgagacccatggacctgatggtggaggccaccccacgaagagtatttgccaacgcacacacatatcacatcaactccatatctgtcaacagcgactatgaaacctacatgtccgctgatgacctgaggattaacctatggaactttgaaataaccaatcaaagttttaatattgtggacattaagccagccaacatggaggagctcacggaggtgatcacagcagccgagttccacccccatcattgcaacaccttcgtgtacagcagcagcaaagggacaatccggctgtgtgacatgcgggcatctgccctgtgtgacaggcacaccaaattttttgaagagccggaagatccaagcaacagatcatttttctctgaaattatctcttcgatttcggatgtgaagttcagccacagtgggaggtatatcatgaccagggactacttgaccgtcaaagtctgggatctcaacatggaaaaccgccccatcgagacttaccaggttcatgactacctccgcagcaagctgtgttccctctatgaaaatgactgcatttttgataaatttgagtgtgtgtggaatgggtcagacagtgtcatcatgacaggctcctacaacaacttcttcaggatgttcgacagaaacaccaagcgtgatgtgacccttgaggcttcgagggaaaacagcaagccccgggctatcctcaaaccccgaaaagtgtgtgtggggggcaagcggagaaaagacgagatcagtgtcgacagtctggactttagcaaaaagatcttgcatacagcttggcatccttcagaaaatattatagcagtggcggctacaaataacctatatatattccaggacaaggttaactaggtggacaagttattacttaataatctcacatactgaatactagtcaaacaagtttttaaatgtttctttgggtcttcatttgatgcattgactttaatttccctatacaggaaatgattggaatagaattaaaaggagtccaacattcccagctccccagttctaagaaacttttgtcaaacccaataggtttgggacacttctgtttagaattgaaagctgccagctaacagtaattcttccatagttgacttgaacttctgatgcttttattgcccagttttctctggtgggtccagtgttttgttcctaggtgtctgctgcgataaaatgaggttgtctgtagtatttaaggagaaaagagataagttttttttaattaagcaattccatttgattgaaaaaaatcaacaaaaaataaacaccgtttactcttag

SEQ ID NO: 171183 - DNA, 553 bp, Homo sapiens
  Payload ID: 13680
  Gene Symbol: PPP2R2B
  Gene Name: protein phosphatase 2, regulatory subunit B, beta
  ENST ID: ENST00000508267
  CDS Start-End: 379-553
agtcacacaggggatgactgcaagtccttcgtaaccactccaggacgctgccagggcctgagaagggacaaactccaattgctccagttcaaactggtcctggcctggtcaaacggaggagacagagcagtgattcacagcaggacgtggaattgggacactcacccaggacacactatggtgcttcagccaagtgaaaggcactatcgagattggaaccacagaaggaaactcatcttttcttgaaattggccctatttacacacagaatgagctgaaaagacttcgctgttattaaaccttcaagaatgttctcatgtgccttgcttccccttcgccttctgccatgattgtaagtttcctgagacctccccagccatgcagaactctgacattatctctacggtagaattcaaccacacgggagaattactagcgacaggggacaaggggggtcgggttgtaatatttcaacgagagcaggagagtaaaaatcaggttcatcgtaggggtgaatacaatgtttacagcacattccagagccatgaacccg

SEQ ID NO: 171184 - DNA, 2011 bp, Homo sapiens
  Payload ID: 13680
  Gene Symbol: PPP2R2B
  Gene Name: protein phosphatase 2, regulatory subunit B, beta
  Uniprot ID: Q00005
  ENST ID: ENST00000504198
  CDS Start-End: 226-1575
agtattcccgtgaaaagggccagtcacacaggggatgactgcaagtccttcgtaaccactccaggacgctgccagggcctgagaagggacaaactccaattgctccagttcaaactggtcctggcctggtcaaacggaggagacagagcagtgattcacagcaggacgtggtacttgcagactgaccgtcctctcaggactcactagggtctcttctctgacgagatgatacctggaattgggacactcacccaggacacactatggtgcttcagccaagtgaaaggcactatcgagattggaaccacagaagctgacattatctctacggtagaattcaaccacacgggagaattactagcgacaggggacaaggggggtcgggttgtaatatttcaacgagagcaggagagtaaaaatcaggttcatcgtaggggtgaatacaatgtttacagcacattccagagccatgaacccgagttcgattacctgaagagtttagaaatagaagaaaaaatcaataaaataagatggctcccccagcagaatgcagcttactttcttctgtctactaatgataaaactgtgaagctgtggaaagtcagcgagcgtgataagaggccagaaggctacaatctgaaagatgaggagggccggctccgggatcctgccaccatcacaaccctgcgggtgcctgtcctgagacccatggacctgatggtggaggccaccccacgaagagtatttgccaacgcacacacatatcacatcaactccatatctgtcaacagcgactatgaaacctacatgtccgctgatgacctgaggattaacctatggaactttgaaataaccaatcaaagttttaatattgtggacattaagccagccaacatggaggagctcacggaggtgatcacagcagccgagttccacccccatcattgcaacaccttcgtgtacagcagcagcaaagggacaatccggctgtgtgacatgcgggcatctgccctgtgtgacaggcacaccaaattttttgaagagccggaagatccaagcaacagatcatttttctctgaaattatctcttcgatttcggatgtgaagttcagccacagtgggaggtatatcatgaccagggactacttgaccgtcaaagtctgggatctcaacatggaaaaccgccccatcgagacttaccaggttcatgactacctccgcagcaagctgtgttccctctatgaaaatgactgcatttttgataaatttgagtgtgtgtggaatgggtcagacagtgtcatcatgacaggctcctacaacaacttcttcaggatgttcgacagaaacaccaagcgtgatgtgacccttgaggcttcgagggaaaacagcaagccccgggctatcctcaaaccccgaaaagtgtgtgtggggggcaagcggagaaaagacgagatcagtgtcgacagtctggactttagcaaaaagatcttgcatacagcttggcatccttcagaaaatattatagcagtggcggctacaaataacctatatatattccaggacaaggttaactaggtggacaagttattacttaataatctcacatactgaatactagtcaaacaagtttttaaatgtttctttgggtcttcatttgatgcattgactttaatttccctatacaggaaatgattggaatagaattaaaaggagtccaacattcccagctccccagttctaagaaacttttgtcaaacccaataggtttgggacacttctgtttagaattgaaagctgccagctaacagtaattcttccatagttgacttgaacttctgatgcttttattgcccagttttctctggtgggtccagtgttttgttcctaggtgtctgctgcgataaaatgaggttgtctgtagtatttaaggagaaaagagataagttttttttaattaagcaattccatttgattgaaaaaaatcaacaaaaaataaacaccgtttactctt

SEQ ID NO: 171185 - DNA, 583 bp, Homo sapiens
  Payload ID: 13680
  Gene Symbol: PPP2R2B
  Gene Name: protein phosphatase 2, regulatory subunit B, beta
  ENST ID: ENST00000515880
  CDS Start-End: 217-330
gtttgagctgcatgcagaaatgtaaggcagtgcttcctggcgctgatggcaaaatgggacccatctccagttattcctcgggcaccccagctttgcaaatctgggaaagaacctacataaacatattggtgatgtagccagcttaaaaggccgagagaatccttatggattcaggagactgtttttttatttagatttttattttttatttggaagatgaaatgcttctctcgttacctgccttacatcttcagacctccgaacaccatcctttcttccagctgccacacagaaggtagaatcctgagactgggggctgtgtgtttataatgaaggaagcttgtattatatcataagctgacattatctctacggtagaattcaaccacacgggagaattactagcgacaggggacaaggggggtcgggttgtaatatttcaacgagagcaggagagtaaaaatcaggttcatcgtaggggtgaatacaatgtttacagcacattccagagccatgaacccgagttcgattacctgaagagtttagaaatagaagaaaaaatcaataaaataagatggctccc

SEQ ID NO: 171186 - DNA, 570 bp, Homo sapiens
  Payload ID: 13680
  Gene Symbol: PPP2R2B
  Gene Name: protein phosphatase 2, regulatory subunit B, beta
  ENST ID: ENST00000512011
  CDS Start-End: 189-338
agtgcttcctggcgctgatggcaaaatgggacccatctccagttattcctcgggcaccccagctttgcaaatctgggaaagaacctacataaacatattggtgatgtagccagcttaaaaggccgagagaatccttatggattcaggagactgtttttttatttagatttttattttttatttggaagatgaaatgcttctctcgttacctgccttacatcttcagacctccgaacaccatcctttcttccagctgccacacagaaggaaactcatcttttcttgaaattggccctatttacacacagaatgagctgaaaagacttcgctgttattaaaccttcaagaatgttctcctgacattatctctacggtagaattcaaccacacgggagaattactagcgacaggggacaaggggggtcgggttgtaatatttcaacgagagcaggagagtaaaaatcaggttcatcgtaggggtgaatacaatgtttacagcacattccagagccatgaacccgagttcgattacctgaagagtttagaaatagaagaaaaaatcaataaaat

SEQ ID NO: 171187 - DNA, 572 bp, Homo sapiens
  Payload ID: 13680
  Gene Symbol: PPP2R2B
  Gene Name: protein phosphatase 2, regulatory subunit B, beta
  ENST ID: ENST00000504565
  CDS Start-End: 298-420
actcactagggtctcttctctgacgagatgatacctggtgtgcaagtctccttttagaaatgcatagattctgctatatatttcttttcttgttggtctcttaagaacaactgggagctcttacctaacctgaagtgtctccttgtgttgttttcaggaattgggacactcacccaggacacactatggtgcttcagccaagtgaaaggcactatcgagattggaaccacagaagatgtgccttgcttccccttcgccttctgccatgattgtaagtttcctgagacctccccagccatgcagaactgctcggaccatggtgcagtcccactggctcccctgcccccctctcctgtgagactggctgcggggagggatcatggatacttgtctgccggcttctggttcccacgcaagtaagcctgctgtcaatggaggaggacattgatacccgcaaaatcaacaacagtttcctgcgcgaccacagctatgcgaccgaagctgacattatctctacggtagaattcaaccacacgggagaattactagcgacaggggacaaggggggtcgg

SEQ ID NO: 171188 - DNA, 512 bp, Homo sapiens
  Payload ID: 13680
  Gene Symbol: PPP2R2B
  Gene Name: protein phosphatase 2, regulatory subunit B, beta
  ENST ID: ENST00000512984
  CDS Start-End: 1-236
gtgggaggtatatcatgaccagggactacttgaccgtcaaagtctgggatctcaacatggaaaaccgccccatcgagacttaccaggttcatgactacctccgcagcaagctgtgttccctctatgaaaatgactgcatttttgataaatttgagtgtgtgtggaatgggtcagacaggcttggaaggagtctccacgtggcaaaggacccaagtcacactgaccagttggtataggacagagagcaaagcaactgtgacataagaacaaaatccaccatgggaaaaagaagccagccctctcattttattatttatttatagtgtcatcatgacaggctcctacaacaacttcttcaggatgttcgacagaaacaccaagcgtgatgtgacccttgaggcttcgagggaaaacagcaagccccgggctatcctcaaaccccgaaaagtgtgtgtggggggcaagcggagaaaagacgagatcagtgtcgacagtctggactttagcaaaaa

SEQ ID NO: 171189 - DNA, 1927 bp, Homo sapiens
  Payload ID: 13680
  Gene Symbol: PPP2R2B
  Gene Name: protein phosphatase 2, regulatory subunit B, beta
  ENST ID: ENST00000512639
  CDS Start-End: 511-645
aatcctgtccctgccatctcgccactgcagctcgggtccagaaaggcaccattttgtcgcggctgcccgctctcccagggggaggagggatcttttttgcattttggagcggctgccaaggaggggaacctgttgggcatctccccagacccgcttgtgagcgcctccggggcgggcgggcgggaccagacccctcggggcacggcgtatcttggcacccggaggcagcggaggcaggcgcagcatcctcgctgggaactggagctggagtgagcgcaccgcgcgggaggagccgccgcagcctcgcagaacccgagtggaggaggtgacagctccattgccgggtttttattttttttctctccgcctccccgtctcctcctcaggctcggaccatggtgcagtcccactggctcccctgcccccctctcctgtgagactggctgcggggagggatcatggatacttgtctgccggcttctggttcccacgcaagtaagcctgctgtcaatggaggaggacattgatacccgcaaaatcaacaacagtttcctgcgcgaccacagctatgcgaccgaaggagccaagggagaacccaagacagagaatagtggcccaataatgaagcatgaattatccagatgaaaacacctatggaaataaagctgacattatctctacggtagaattcaaccacacgggagaattactagcgacaggggacaaggggggtcgggttgtaatatttcaacgagagcaggagagtaaaaatcaggttcatcgtaggggtgaatacaatgtttacagcacattccagagccatgaacccgagttcgattacctgaagagtttagaaatagaagaaaaaatcaataaaataagatggctcccccagcagaatgcagcttactttcttctgtctactaatgataaaactgtgaagctgtggaaagtcagcgagcgtgataagaggccagaaggctacaatctgaaagatgaggagggccggctccgggatcctgccaccatcacaaccctgcgggtgcctgtcctgagacccatggacctgatggtggaggccaccccacgaagagtatttgccaacgcacacacatatcacatcaactccatatctgtcaacagcgactatgaaacctacatgtccgctgatgacctgaggattaacctatggaactttgaaataaccaatcaaagttttaatattgtggacattaagccagccaacatggaggagctcacggaggtgatcacagcagccgagttccacccccatcattgcaacaccttcgtgtacagcagcagcaaagggacaatccggctgtgtgacatgcgggcatctgccctgtgtgacaggcacaccaaattttttgaagagccggaagatccaagcaacagatcatttttctctgaaattatctcttcgatttcggatgtgaagttcagccacagtgggaggtatatcatgaccagggactacttgaccgtcaaagtctgggatctcaacatggaaaaccgccccatcgagacttaccaggttcatgactacctccgcagcaagctgtgttccctctatgaaaatgactgcatttttgataaatttgagtgtgtgtggaatgggtcagacagtgtcatcatgacaggctcctacaacaacttcttcaggatgttcgacagaaacaccaagcgtgatgtgacccttgaggcttcgagggaaaacagcaagccccgggctatcctcaaaccccgaaaagtgtgtgtggggggcaagcggagaaaagacgagatcagtgtcgacagtctggactttagcaaaaagatcttgcatacagcttggcatccttcagaaaatattatagcagtggcggctacaaataacctatatatattccaggacaaggttaactag

SEQ ID NO: 171190 - DNA, 2042 bp, Homo sapiens
  Payload ID: 13680
  Gene Symbol: PPP2R2B
  Gene Name: protein phosphatase 2, regulatory subunit B, beta
  Uniprot ID: Q00005
  ENST ID: ENST00000508545
  CDS Start-End: 301-1599
gtgaagtcagtggccaccagaccctgagctccccgccccatgtgctgtggagtctaggatgttgaagagagctgggaggagatgccaagaacactaggctgcttcctaccatctagcttacagtccaacatgtgagtaacaccaatacaaatgaaaagccatcaaatgtgtccaatagtgaatatcatcccggcagtctctgagctaggagggagagtcctggagaggtgtttattttctgatataaaaaaggagccaagggagaacccaagacagagaatagtggcccaataatgaagcatgaattatccagatgaaaacacctatggaaataaagctgacattatctctacggtagaattcaaccacacgggagaattactagcgacaggggacaaggggggtcgggttgtaatatttcaacgagagcaggagagtaaaaatcaggttcatcgtaggggtgaatacaatgtttacagcacattccagagccatgaacccgagttcgattacctgaagagtttagaaatagaagaaaaaatcaataaaataagatggctcccccagcagaatgcagcttactttcttctgtctactaatgataaaactgtgaagctgtggaaagtcagcgagcgtgataagaggccagaaggctacaatctgaaagatgaggagggccggctccgggatcctgccaccatcacaaccctgcgggtgcctgtcctgagacccatggacctgatggtggaggccaccccacgaagagtatttgccaacgcacacacatatcacatcaactccatatctgtcaacagcgactatgaaacctacatgtccgctgatgacctgaggattaacctatggaactttgaaataaccaatcaaagttttaatattgtggacattaagccagccaacatggaggagctcacggaggtgatcacagcagccgagttccacccccatcattgcaacaccttcgtgtacagcagcagcaaagggacaatccggctgtgtgacatgcgggcatctgccctgtgtgacaggcacaccaaattttttgaagagccggaagatccaagcaacagatcatttttctctgaaattatctcttcgatttcggatgtgaagttcagccacagtgggaggtatatcatgaccagggactacttgaccgtcaaagtctgggatctcaacatggaaaaccgccccatcgagacttaccaggttcatgactacctccgcagcaagctgtgttccctctatgaaaatgactgcatttttgataaatttgagtgtgtgtggaatgggtcagacagtgtcatcatgacaggctcctacaacaacttcttcaggatgttcgacagaaacaccaagcgtgatgtgacccttgaggcttcgagggaaaacagcaagccccgggctatcctcaaaccccgaaaagtgtgtgtggggggcaagcggagaaaagacgagatcagtgtcgacagtctggactttagcaaaaagatcttgcatacagcttggcatccttcagaaaatattatagcagtggcggctacaaataacctatatatattccaggacaaggttaactaggtggacaagttattacttaataatctcacatactgaatactagtcaaacaagtttttaaatgtttctttgggtcttcatttgatgcattgactttaatttccctatacaggaaatgattggaatagaattaaaaggagtccaacattcccagctccccagttctaagaaacttttgtcaaacccaataggtttgggacacttctgtttagaattgaaagctgccagctaacagtaattcttccatagttgacttgaacttctgatgcttttattgcccagttttctctggtgggtccagtgttttgttcctaggtgtctgctgcgataaaatgaggttgtctgtagtatttaaggagaaaagagataagttttttttaattaagcaattccatttgattgaaaaaaatcaacaaaaaataaacaccgtttactcttagacaaa

SEQ ID NO: 171191 - DNA, 609 bp, Homo sapiens
  Payload ID: 13680
  Gene Symbol: PPP2R2B
  Gene Name: protein phosphatase 2, regulatory subunit B, beta
  ENST ID: ENST00000528601
  CDS Start-End: 164-298
cctttaaattcaccaagggaccacatgcatcatataagggctcggaccatggtgcagtcccactggctcccctgcccccctctcctgtgagactggctgcggggagggatcatggatacttgtctgccggcttctggttcccacgcaagtaagcctgctgtcaatggaggaggacattgatacccgcaaaatcaacaacagtttcctgcgcgaccacagctatgcgaccgaaggagccaagggagaacccaagacagagaatagtggcccaataatgaagcatgaattatccagatgaaaacacctatggaaataaagctgacattatctctacggtagaattcaaccacacgggagaattactagcgacaggggacaaggggggtcgggttgtaatatttcaacgagagcaggagagtaaaaatcaggttcatcgtaggggtgaatacaatgtttacagcacattccagagccatgaacccgagttcgattacctgaagagtttagaaatagaagaaaaaatcaataaaataagatggctcccccagcagaatgcagcttactttcttctgtctactaatgataaaactgtgaagctgtggaaagtca

SEQ ID NO: 171192 - DNA, 567 bp, Homo sapiens
  Payload ID: 13680
  Gene Symbol: PPP2R2B
  Gene Name: protein phosphatase 2, regulatory subunit B, beta
  ENST ID: ENST00000532154
  CDS Start-End: 210-344
aatgcaccagccgcctccagcctcctgcagcagcagcagcagcagcagcagcagcagctgcgagtgcgcgcgtgtgggtgtgagggctcggaccatggtgcagtcccactggctcccctgcccccctctcctgtgagactggctgcggggagggatcatggatacttgtctgccggcttctggttcccacgcaagtaagcctgctgtcaatggaggaggacattgatacccgcaaaatcaacaacagtttcctgcgcgaccacagctatgcgaccgaaggagccaagggagaacccaagacagagaatagtggcccaataatgaagcatgaattatccagatgaaaacacctatggaaataaagctgacattatctctacggtagaattcaaccacacgggagaattactagcgacaggggacaaggggggtcgggttgtaatatttcaacgagagcaggagagtaaaaatcaggttcatcgtaggggtgaatacaatgtttacagcacattccagagccatgaacccgagttcgattacctgaagagtttagaaatagaagaaaaa

SEQ ID NO: 171193 - DNA, 2745 bp, Homo sapiens
  Payload ID: 13681
  Gene Symbol: PPP2R5B
  Gene Name: protein phosphatase 2, regulatory subunit B', beta
  Uniprot ID: Q15173
  ENST ID: ENST00000164133
  CDS Start-End: 623-2116
ggtggggggaggtgacttgatgtcatcctgagcagctgggcggcgggtgccggtgcgcacggagccgagccggggctcccgttgcgctgcaccgcgttgggtcggagtcccaggacttcagcggagatccgcgcgctgcgacggccggtgcagagcccgccgagcgcccagtcccggcccggggctgagttgggggcatgctctagccgcccccccggagcccgggagagaacccaggagcgccgccgcccagccccagcgccccgagcggaaccgctgcgaaggggccctgaacggccgtcgccctccctacgggcagcccccgggggttggcgaccgaagtctaggttttcgagaaagccagggtgggaaccctaactggactcttcgggacccccaggaaggatctgaggcctgagccatcctcctttctaccctgtctgccccccaggactgggcagttgcaggaggccctgggggggggcccaggactgtggttgtgccccccccccaaaggccggacaggatgggaccaagttagtctgtccagtctcacccagcacctcccaggcccagagagaacccccggggctctgaaagcttgccctgccgcctgaccgccatggagacgaagctgccccctgcaagcacccccactagcccctcctcccccgggctgtcgcctgtgcccccacccgacaaggtggacggcttctcccgccgttccctccgcagagcccggccccgccgctcccacagctcctctcagttccgctatcagagcaaccagcaagagctcacaccgctgcccctgctcaaagatgtgccggcttccgagctgcacgagctgctgagccggaagctggcccagtgtggggtgatgtttgacttcttggactgtgtggccgacctcaaggggaaggaggtgaagcgggcagccctcaacgagctggtggagtgtgtggggagcacccggggtgtcctcatcgagcccgtctacccagacatcatccgcatgatctcagtgaatatcttccggactctgccgcccagtgagaaccctgaatttgaccctgaagaggatgagcccaatcttgagccttcgtggccacacctgcagctggtatatgagtttttcctgcgtttcttggagagcccagacttccagccctccgtggccaagagatatgtggatcaaaagtttgtcctgatgctcctggagctatttgatagtgaggatccccgggagcgtgagtacctcaagaccatcctgcaccgggtctatggcaagttcctgggtctccgggcctacatccgcaaacagtgcaaccacatcttcctccggttcatctatgaattcgagcacttcaatggtgtggctgagctgctggagatcctaggaagcatcatcaatggctttgcgctgcccctgaagacggagcacaagcagttcctggttcgcgtcctgatccccctgcactctgtcaagtcgctgtctgtcttccatgcccagctggcatactgtgtggtgcagttcctggagaaggatgccactctgacagagcacgtgatccgggggctgctcaaatactggccaaaaacctgcacccagaaggaggtgatgtttctgggggagatggaagagattcttgatgtcatcgagccctcccagtttgtgaagatccaggagcccctttttaagcaggtggctcgctgtgtttccagcccccatttccaggttgcagagcgggctctgtatttctggaacaatgagtatatcctaagcctcattgaggacaactgccacactgtgctgcctgctgtgtttgggaccctctaccaagtctccaaggagcactggaaccaaaccatcgtatcactgatctacaatgtgctcaagaccttcatggagatgaatgggaagctgtttgatgagctcacagcctcctacaagctggaaaagcagcaggagcagcagaaggcccaggagcgtcaggagttatggcaaggtctggaggagctgcggctacgccggctacaggggacccagggggccaaggaggcccccctccagcggcttacaccccaggtggccgccagtgggggtcagagctagacagcacctcagaaggggaaaagctaaacccagagctgtcagtccctctatcccttctcctgtccaggggcccagagagaaacacacctacccctggccttgccagagtggcttctgaggactccctgcccagcccagctttcactggggggagacgaggagaggcaatggtggtcttggcaacagaatgctcagcccctcgtggcaggacttgacaagggcaagcttgaccaggaagctgccatcagggatcttcccctgccccgcaaagctaggctccagctgcaggcgggctcccaccctctgctcctggccttgggcaagggcactcagcgcctcgcctgcccctgccttggccaatgcgaggtccttccttatccccaccatggggtccatggtctatttattctcgcccagctcaccctctacacagacactgtcctgggtgcacactcctcccttccctcgctgtgtacttccttgtcccctttttatttattgggcagggggagggggagggcacaggcaagaagagattcacagtgtcctggggtaagggggggttcacagtaatcatggtctactcctctttccgtggctgggggtagacttaataaagagagaaattc

SEQ ID NO: 171194 - DNA, 786 bp, Homo sapiens
  Payload ID: 13681
  Gene Symbol: PPP2R5B
  Gene Name: protein phosphatase 2, regulatory subunit B', beta
  ENST ID: ENST00000532850
  CDS Start-End: 454-786
cggtgcgcacggagccgagccggggctcccgttgcgctgcaccgcgttgggtcggagtcccaggacttcagcggagatccgcgcgctgcgacggccggtgcagagcccgccgagcgcccagtcccggcccggggctgagttgggggcatgctctagccgcccccccggagcccgggagagaacccaggagcgccgccgcccagccccagcgccccgagcggaaccgctgcgaaggggccctgaacggccgtcgccctccctacgggcagcccccgggggttggcgaccgaagtctaggttttcgagaaagcccggccccgccgctcccacagctcctctcagttccgctatcagagcaaccagcaagagctcacaccgctgcccctgctcaaagatgtgccggcttccgagctgcacgagctgctgagccggaagctggcccagtgtggggtgatgtttgacttcttggactgtgtggccgacctcaaggggaaggaggtgaagcgggcagccctcaacgagctggtggagtgtgtggggagcacccggggtgtcctcatcgagcccgtctacccagacatcatccgcatgatctcagtgaatatcttccggactctgccgcccagtgagaaccctgaatttgaccctgaagaggatgagcccaatcttgagccttcgtggccacacctgcagctggtatatgagtttttcctgcgtttcttggagagcccagacttccagccctccgtggccaagagatatgtggatcaaaagtttgtcctgatg

SEQ ID NO: 171195 - DNA, 887 bp, Homo sapiens
  Payload ID: 13681
  Gene Symbol: PPP2R5B
  Gene Name: protein phosphatase 2, regulatory subunit B', beta
  ENST ID: ENST00000526559
  CDS Start-End: 307-887
ctcagtgcgcgatcttaagcgcgcatctgtggaaacaattaaagccagggtgggaaccctaactggactcttcgggacccccaggaaggatctgaggcctgagccatcctcctttctaccctgtctgccccccaggactgggcagttgcaggaggccctgggggggggcccaggactgtggttgtgccccccccccaaaggccggacaggatgggaccaagttagtctgtccagtctcacccagcacctcccaggcccagagagaacccccggggctctgaaagcttgccctgccgcctgaccgccatggagacgaagctgccccctgcaagcacccccactagcccctcctcccccgggctgtcgcctgtgcccccacccgacaaggtggacggcttctcccgccgttccctccgcagagcccggccccgccgctcccacagctcctctcagttccgctatcagagcaaccagcaagagctcacaccgctgcccctgctcaaagatgtgccggcttccgagctgcacgagctgctgagccggaagctggcccagtgtggggtgatgtttgacttcttggactgtgtggccgacctcaaggggaaggaggtgaagcgggcagccctcaacgagctggtggagtgtgtggggagcacccggggtgtcctcatcgagcccgtctacccagacatcatccgcatgatctcagtgaatatcttccggactctgccgcccagtgagaaccctgaatttgaccctgaagaggatgagcccaatcttgagccttcgtggccacacctgcagctggtatatgagtttttcctgcgtttcttggagagcccagacttccagccctccgtggccaagagatatgtggatcaaaagtt

SEQ ID NO: 171196 - DNA, 782 bp, Homo sapiens
  Payload ID: 13682
  Gene Symbol: PPP2R3B
  Gene Name: protein phosphatase 2, regulatory subunit B'', beta
  ENST ID: ENST00000381625
  CDS Start-End: 274-782
tgacggctgccgcggtgcagaaagcgcccccttgcccggccggacggcccagcccggagcgaacggggagaggagagaagaggaccggagggagcggagggcagtgcagggagcggagaaggaggagaggagagcagcgccgggagcagccgggtctgcacagtcgcgggtcgggagaggcggccgcccccacccccggcgccatgcgccctcctcagcctgaggaatgcgcgcggcgcgggccccggccccagagcgcctggcgggcgacgcatggagcgcgctgagcccgggccacgcctgcagcgccccgccggccccggcccggccctgccccgagagcgcggcgcccggcccggcccgcggagagccctgcgcgccggcggcatgcgactccgcgagcgctcgctgcgccaggaccccgacctgcgccaggagctggcctcactggcccgcggctgcgacttcgtgctgccctctcggttcaagaagcggctgaaggccttccagcaggttcagacacggaaagaagagcctctgcccccggccacgagccaaagcattccgaccttctacttccccagaggacgcccgcaggactccgtcaacgtggatgccgtcatcagcaagatcgagagcaccttcgcccggttcccccacgagagggccaccatggatgacatgggcctggtggccaaggcctgcggctgccccctctactggaaggggccgctcttctatggcgccggcggggagcgcacgggctccgtgtccgtccacaa

SEQ ID NO: 171197 - DNA, 2151 bp, Homo sapiens
  Payload ID: 13682
  Gene Symbol: PPP2R3B
  Gene Name: protein phosphatase 2, regulatory subunit B'', beta
  Uniprot ID: Q9Y5P8
  ENST ID: ENST00000390665
  CDS Start-End: 20-1747
cgcgggcccagcccccgccatgccgcccggcaaagtgctgcagccggtcctgaagatgaaggtggacgagctgttcctgtactggctcagcgaggccagcacgcagcggatgctgcaggactgcctgcgccggatcaaggcgcccgggcgggaccagccgaccccgggggacggggagcagcccggggcctggcccacagccccgctcgccgccccccggcccagcgggctcgaacccccgggaacccccgggccgggccctgcgctgcccctgggcgccgcctccagccccaggaacgcgccccacgttcgaggcacccgtagatccgcagggacgagagtagttcagacacggaaagaagagcctctgcccccggccacgagccaaagcattccgaccttctacttccccagaggacgcccgcaggactccgtcaacgtggatgccgtcatcagcaagatcgagagcaccttcgcccggttcccccacgagagggccaccatggatgacatgggcctggtggccaaggcctgcggctgccccctctactggaaggggccgctcttctatggcgccggcggggagcgcacgggctccgtgtccgtccacaagttcgtcgccatgtggagaaaaatcctccagaactgccacgacgacgcggccaagttcgtccatctgctcatgagccccggctgcaactacctggtgcaggaggactttgtccccttcttgcaggacgtggtgaacacgcacccggggctgtcgttcctgaaggaggcgtccgagttccactcgcgctacatcaccacggtcatccagcggatcttctacgccgtgaaccggtcctggtccggcaggatcacctgcgccgagctgcggaggagctccttcctgcagaatgtggcgctgctggaggaggaggcggacatcaaccagctgaccgaattcttctcgtacgagcatttctacgtcatctactgcaagttctgggagctggacacggaccacgacctgctcatcgacgcggacgacctggcgcggcacaatgaccacgccctttctaccaagatgatagacaggatcttctcaggagcagtcacacgaggcagaaaagtgcagaaggaagggaagatcagctatgccgactttgtctggtttttgatctctgaggaagacaaaaaaacaccgaccagcatcgagtactggttccgctgcatggacctggacggggacggcgccctgtccatgttcgagctcgagtacttctacgaggagcagtgccgaaggctggacagcatggccatcgaggccctgcccttccaggactgcctctgccagatgctggacctggtcaagccgaggactgaagggaagatcacgctgcaggacctgaagcgctgcaagctggctaacgtcttcttcgacaccttcttcaacatcgagaagtacctcgaccacgagcagaaagagcagatctccctgctcagggacggtgacagcggcggccccgagctctcggactgggagaagtacgcggccgaggagtacgacatcctggtggccgaggagactgcgggagagccctgggaggacgggttcgaggccgagctcagccctgtggagcagaagctgagtgcgctgcgctccccgctggcccagaggcccttcttcgaggcgccctcaccgctgggcgccgtggacctgtacgagtacgcatgcggggacgaggacctggagccgctgtgacgccgcccgcgagaacgccgccgcggggccgctccccacgtgccaccaccgggccaccgcggctcgtgtaaaaactgttgtggaaaatgagtgcgtttgtacggaatgataaacttttatttattcacagaagcgtgttgattgccgctgtgggttcgtggctggacctgcccagagctctgtgccagggggacacgtagggccgcgcgtgaatgggacgggttcccacacggacaccctctggcgcttgccgttcccgacccagcctgggttccggggcctgcgtctgtggaaagggtccgtgtgcgcacaacggtgaccggcggctcccgggcgcctcagtcctggacaggagcctccaccacaggctgtgtgaatgttttgtgtaaacgtacaaaaccgtt

SEQ ID NO: 171198 - DNA, 2151 bp, Homo sapiens
  Payload ID: 13682
  Gene Symbol: PPP2R3B
  Gene Name: protein phosphatase 2, regulatory subunit B'', beta
  ENST ID: ENST00000620224
  CDS Start-End: 20-1747
cgcgggcccagcccccgccatgccgcccggcaaagtgctgcagccggtcctgaagatgaaggtggacgagctgttcctgtactggctcagcgaggccagcacgcagcggatgctgcaggactgcctgcgccggatcaaggcgcccgggcgggaccagccgaccccgggggacggggagcagcccggggcctggcccacagccccgctcgccgccccccggcccagcgggctcgaacccccgggaacccccgggccgggccctgcgctgcccctgggcgccgcctccagccccaggaacgcgccccacgttcgaggcacccgtagatccgcagggacgagagtagttcagacacggaaagaagagcctctgcccccggccacgagccaaagcattccgaccttctacttccccagaggacgcccgcaggactccgtcaacgtggatgccgtcatcagcaagatcgagagcaccttcgcccggttcccccacgagagggccaccatggatgacatgggcctggtggccaaggcctgcggctgccccctctactggaaggggccgctcttctatggcgccggcggggagcgcacgggctccgtgtccgtccacaagttcgtcgccatgtggagaaaaatcctccagaactgccacgacgacgcggccaagttcgtccatctgctcatgagccccggctgcaactacctggtgcaggaggactttgtccccttcttgcaggacgtggtgaacacgcacccggggctgtcgttcctgaaggaggcgtccgagttccactcgcgctacatcaccacggtcatccagcggatcttctacgccgtgaaccggtcctggtccggcaggatcacctgcgccgagctgcggaggagctccttcctgcagaatgtggcgctgctggaggaggaggcggacatcaaccagctgaccgaattcttctcgtacgagcatttctacgtcatctactgcaagttcggggagctggacacggaccacgacctgctcatcgacgcggacgacctggcgcggcacaatgaccacgccctttctaccaagatgatagacaggatcttctcaggagcagtcacacgaggcagaaaagtgcagaaggaagggaagatcagctatgccgactttgtctggtttttgatctctgaggaagacaaaaaaacaccgaccagcatcgagtactggttccgctgcatggacctggacggggacggcgccctgtccatgttcgagctcgagtacttctacgaggagcagtgccgaaggctggacagcatggccatcgaggccctgcccttccaggactgcctctgccagatgctggacctggtcaagccgaggactgaagggaagatcacgctgcaggacctgaagcgctgcaagctggctaacgtcttcttcgacaccttcttcaacatcgagaagtacctcgaccacgagcagaaagagcagatctccctgctcagggacggtgacagcggcggccccgagctctcggactgggagaagtacgcggccgaggagtacgacatcctggtggccgaggagactgcgggagagccctgggaggacgggttcgaggccgagctcagccctgtggagcagaagctgagtgcgctgcgctccccgctggcccagaggcccttcttcgaggcgccctcaccgctgggcgccgtggacctgtacgagtacgcatgcggggacgaggacctggagccgctgtgacgccgcccgcgagaacgccgccgcggggccgctccccacgtgccaccaccgggccaccgcggctcgtgtaaaaactgttgtggaaaatgagtgcgtttgtacggaatgataaacttttatttattcacagaagcgtgttgattgccgctgtgggttcgtggctggacctgcccagagctctgtgccagggggacacgtagggccgcgcgtgaatgggacgggttcccacacggacaccctctggcgcttgccgttcccgacccagcctgggttccggggcctgcgtctgtggaaagggtccgtgtgcgcacaacggtgaccggcggctcccgggcgcttcagtcctggacaggagcctccaccacaggctgtgtgaatgttttgtgtaaacgtacaaaaccgtt

SEQ ID NO: 171199 - DNA, 2181 bp, Homo sapiens
  Payload ID: 13682
  Gene Symbol: PPP2R3B
  Gene Name: protein phosphatase 2, regulatory subunit B'', beta
  ENST ID: ENST00000612937
  CDS Start-End: 20-1747
cgcgggcccagcccccgccatgccgcccggcaaagtgctgcagccggtcctgaagatgaaggtggacgagctgttcctgtactggctcagcgaggccagcacgcagcggatgctgcaggactgcctgcgccggatcaaggcgcccgggcgggaccagccgaccccgggggacggggagcagcccggggcctggcccacagccccgctcgccgccccccggcccagcgggctcgaacccccgggaacccccgggccgggccctgcgctgcccctgggcgccgcctccagccccaggaacgcgccccacgttcgaggcacccgtagatccgcagggacgagagtagttcagacacggaaagaagagcctctgcccccggccacgagccaaagcattccgaccttctacttccccagaggacgcccgcaggactccgtcaacgtggatgccgtcatcagcaagatcgagagcaccttcgcccggttcccccacgagagggccaccatggatgacatgggcctggtggccaaggcctgcggctgccccctctactggaaggggccgctcttctatggcgccggcggggagcgcacgggctccgtgtccgtccacaagttcgtcgccatgtggagaaaaatcctccagaactgccacgacgacgcggccaagttcgtccatctgctcatgagccccggctgcaactacctggtgcaggaggactttgtccccttcttgcaggacgtggtgaacacgcacccggggctgtcgttcctgaaggaggcgtccgagttccactcgcgctacatcaccacggtcatccagcggatcttctacgccgtgaaccggtcctggtccggcaggatcacctgcgccgagctgcggaggagctccttcctgcagaatgtggcgctgctggaggaggaggcggacatcaaccagctgaccgaattcttctcgtacgagcatttctacgtcatctactgcaagttctgggagctggacacggaccacgacctgctcatcgacgcggacgacctggcgcggcacaatgaccacgccctttctaccaagatgatagacaggatcttctcaggagcagtcacacgaggcagaaaagtgcagaaggaagggaagatcagctatgccgactttgtctggtttttgatctctgaggaagacaaaaaaacaccgaccagcatcgagtactggttccgctgcatggacctggacggggacggcgccctgtccatgttcgagctcgagtacttctacgaggagcagtgccgaaggctggacagcatggccatcgaggccctgcccttccaggactgcctctgccagatgctggacctggtcaagccgaggactgaagggaagatcacgctgcaggacctgaagcgctgcaagctggccaacgtcttcttcgacaccttcttcaacatcgagaagtacctcgaccacgagcagaaagagcagatctccctgctcagggacggtgacagcggcggccccgagctctcggactgggagaagtacgcggccgaggagtacgacatcctggtggccgaggagaccgtgggagagccctgggaggacgggttcgaggccgagctcagccccgtggagcagaagctgagtgcgctgcgctccccgctggcccagaggcccttcttcgaggcgccctcaccgctgggcgccgtggacctgtacgagtacgcgtgcggggacgaggacctggagccgctgtgacgccacccgcgagaacgccgccgcggggccgccccccacgtgccaccaccgggccaccgcggctcgtgtaaaaactgttgtggaaaatgagtgcgtttgtacggaatgataaacttttatttattcacagaagcgtgttgattgccgctgtgggttcgtggctggacctgcccagagccctgtgcccgggggacacgtagggccgcgcgtgaatgggacgggttcccacacggacaccctccagcacttgccgttcccgacccggcctgggttccggggcctgcgtctgtggaaagggtccatgtgcgcacaacggtgaccggcggctcccgggcgcctcagtcctggacaggagcctccaccacaggctgtgtgaatgttttgtgtaaacgtacaaaaccgtttctggcgatcacgcttgtacgtttggagga

SEQ ID NO: 171200 - DNA, 782 bp, Homo sapiens; identical to SEQ ID NO: 171196
  Payload ID: 13682
  Gene Symbol: PPP2R3B
  Gene Name: protein phosphatase 2, regulatory subunit B'', beta
  ENST ID: ENST00000627126
  CDS Start-End: 274-782

SEQ ID NO: 171201 - DNA, 782 bp, Homo sapiens; identical to SEQ ID NO: 171196
  Payload ID: 13682
  Gene Symbol: PPP2R3B
  Gene Name: protein phosphatase 2, regulatory subunit B'', beta
  ENST ID: ENST00000626780
  CDS Start-End: 274-782

SEQ ID NO: 171202 - DNA, 5738 bp, Homo sapiens
  Payload ID: 13683
  Gene Symbol: PPP2R2D
  Gene Name: protein phosphatase 2, regulatory subunit B, delta
  Uniprot ID: Q66LE6
  ENST ID: ENST00000455566
  CDS Start-End: 506-1867
gtgtccggccaagcggcgccctgaaggcgtgtccggccgcagcttaggctctccgggagtccccggagagtaggggcggccggcggcgctagtcttctggggagcgccgggtgcacaccggaccactgcgggaggcctagggccgagggccgaggagctggcctgcgcccggcgaccccggcttccctccgcagtcgcccaggcgtcccttcccccctacagccgagcggcgccgggcgcaggcgcattgggcgcccccggcagcccccgcggcccgccccgtccgctgcccgtccgaggaggcggagggcgatgacgtcatcgagcggggcgacgggcattgggcgccattttgaaaagggaaaaaaatccctccccggcggcggcggcggcggcggcggcgccggcggtggtggcggccccggggctgagcgctcggctgcagcggcgcggaggccgtctccctggtctgccgcggtccccgcccgtcccgccgccggctgccatggcaggagccggaggcggcggctgccccgcgggcggcaacgacttccagtggtgcttctcgcaggtcaagggggccatcgacgaggacgtggccgaagcggacatcatttccaccgttgagtttaattactctggagatcttcttgcaacaggagacaagggcggcagagttgttatttttcagcgtgaacaagagaataaaagccgccctcattctaggggagaatataatgtttacagcacctttcaaagtcatgaaccggagtttgactatttgaaaagtctagaaattgaggaaaaaattaataaaattaggtggttaccacaacagaatgctgctcattttctactgtctacaaatgataaaactataaaattatggaaaataagtgaacgggataaaagagcagaaggttataacctgaaagacgaagatggaagacttcgagacccatttaggatcacggcgctacgggtcccaatattgaagcccatggatcttatggtagaagcgagtccacggcgaatttttgcaaatgctcacacatatcatataaattccatttcagtaaatagtgatcatgaaacatatctttctgcagatgacctgagaattaatttatggcacttagaaatcacagatagaagctttaacatcgtggacatcaagcctgctaacatggaggagctgaccgaagtcatcactgcagccgagttccacccgcaccagtgcaacgtgttcgtctacagcagtagcaaagggaccatccgcctgtgtgacatgcgctcctcggccctgtgcgacagacactccaagttttttgaagagcctgaagatcccagcagtaggtccttcttctcagaaataatttcatccatatccgatgtaaaattcagtcatagtgggcggtacatgatgaccagagactacctgtcggtgaaggtgtgggacctcaacatggagagcaggccggtggagacccaccaggtccacgagtacctgcgcagcaagctctgctctctctatgagaacgactgcatctttgacaagtttgagtgttgctggaacggttcggatagcgccatcatgaccgggtcctataacaacttcttcaggatgtttgatagagacacgcggagggatgtgaccctggaggcctcgagagagagcagcaaaccgcgcgccagcctcaaaccccggaaggtgtgtacggggggtaagcggaggaaagacgagatcagtgtggacagtctggacttcaacaagaagatcctgcacacagcctggcaccccgtggacaatgtcattgccgtggctgccaccaataacttgtacatattccaggacaaaatcaactagagacgcgaacgtgaggaccaagtcttgtcttgcatagttaagccggacatttttctgtcagagaaaaggcatcattgtccgctccattaagaacagtgacgcacctgctacttcccttcacagacacaggagaaagccgcctccgctggaggcccggtgtggttccgcctcggcgaggcgcgagacaggcgctgctgctcacgtggagacgctctcgaagcagagttgacggacactgctcccaaaaggtcattactcagaataaatgtatttatttcagtccgagccttcctttccaatttatagaccaaaaaattaacatccaagagaaaagttattgtcagataccgctctttctccaactttccctctttctctgccatcacacttgggccttcactgcagcgtggtgtggccaccgtccgtgtcctctcggccttcctccgagtccaggtggactctgtggatgtgtggatgtggcccgagcaggctcaggcggccccactcacccacagcatccgccgccaccccttcgggtgtgagcgctcaataaaaacaacacactataaagtgtttttaaatccaaacagaagtattgtctttttatttaattttattgcatagaatgaagttatgcagggttcttctttggaactaactgtttgagaaatgtgtgtccttctttggcagcgtgggggtatgtgtgcagcatttctgtccccaagctgctgcccgctgtgtttctgtagaagtagcccatcagatacaccaggtaaggtctgggaaaagccagaaccgaggccacctctgagaaagaaaattgcaaggaagaaccaaaattgctgccatccagtaagcctggtttaaagtagcttcaaattcactacagttgaagaaatacgtgcttgctttctaaggcttttgaaaaagcactttggggaaagtatactttttaaacattgctaaaattacatgcatgctaaatttcatcctgcatttcaagccagcaaaattaagcaattttaattacacgatgccaccagtacgttggtttattttcaaagtaggatctttgataccagaaatcaagattttccaagacaaataatacagagctgtaccaatgctgagtgaccagagcttgcttccgtgggatttaacacacgcccactacgtgtccccgaggggagtggggagtcgggctcccgtgcccctgtggagatggaggtgtgtgctgatcccccgtccgcctgtggagatgaaggtgtgtgttgattcctcctgctgctgtggagatggaggtgtgtgctgatcgcccgtcaccctgtctagatgaaggtatgtgctgattgcctgtgcccctgtggagaaggaggtgtgtgctgatcccctgtgccctgtggagatggaggtgtgtgctgctccctcgtgcccctgtggagatggaggtgtgtgctgatcccccatcccatccccctgtctagatgaaggtgtgtgctgattcctcatgcccctgtctggatgaaggtgtgtgctgatcccccgtccccctgtggagatgaaggtgtgtgctgatcccccgtgcccctgtggagatgaaggtgcgtgctgatcccccatctccctgtggagatgaaggtgtgtgctgatccccatccccctgtggagatgaagggatatgctgatcccctgtcccactgtggagatgaaggggtgtgctgatcccccgtccccctgtggagatgaaggtgtgtgctgatcccccatctccctgtggagatgaaggggtgtgccaatcccccgcgcccctgtggagatggaggcgtgtgctgatccccatccccctgtggagatgaaggtgtgtgctgatcccccatccccatgtggagatgaaggggtgtgttgatcccctgtccccctgtggagatggtgtgtgctgatccccgtccccctgtggagatgaaggtgtgtgctgatcccccatctccctgtgaagatgaaggggtgtgctgatcccccgtgcccctgtggacatggaggcgtgtgctgatcccccgtccccctgtggagatgaaggtgtgtgctgatcccccatccccatgtggagatgaaggggtgtgttgatcccccgtccccctgtggagatgaaggtgtgtgctgatccccgtccccctgtggagatgaaggggtgtgctgatcccccatgccctgtggagatggaggtgtgtgctgatccctcgtgcccctgtggagatagaggtgtgtactgatcccctgttcccctatctagatgaaggtgtgtactgctgatcccccgtccccctgtggagatgaaggtgtgtgctgatcccccatccccctgtggagatgaaggggtgtgctgatcccccgtcttcctgtggagatgaaggtgtgtgctgattcctcatgcccctgtggagatggaggtgtgtgctgatcccccatccccctgtggggatgaaggtgtgtgctgatcccccatccccctgtggagatgaaggggtatgctgatcccccgtccccctgtggagatgaaggtgtgtgctgatcccccatccccctgtggagatgaaggggtatgctgatcccctgtccccctgtggggatgaaggtgtgtgctgatctcttgtccccctgtggagatggaggtgtgtgctgatcccccatccccctgtggagatgaagatgtgtgctgatcccccgtcctcctgtggagatgaaggtgtgtgctgcttcctcgtgcccctgtggagatggaggtgtgtgctggtcccccgtccccctgtggagatggaggtgtgtgctgatcccccgtccccctgtggagatggaggcgtgtgctgatcccccatccccctgtggagatgaaggcgtgtgctgatccgccatcccactgtggagatgaaggcgtgtgctgatcccccatccccctgtggagataaaggtgtgtgctgatcccccatccccctgtggagatgaaggcgtgtgctgatccgccatcccactgtggagatgaaggcgtgtgctgatcccccatccccctgtggagatgaaggcgtgtgctcatcccccatccccctgtggagatgaaggcgtgtgctgatccgccatcccactgtggagatgaaggtgtgtgctgatcccccatccccctgtggagatgaaggtgtgtgctgatccccggtccccctgtggagatgaaggtgtgtgctgatcccccgtcctcctgtggagatgaaggcgtgtgctgatcccccgtccccctgtggagatgaaggcgtgtgctgatccgccgtccccctgtggagatgaaggcgtgtgctgatccgccatccccctgtggagatgaaggcgtgtgctcatcccccatccccctgtggagatgaaggcgtgtgctgatccgccatcccactgtggagatgaaggtgtgtgctgatcccccatccccctgtggagatgaaggcgtgtgctgatccccggtccccctgtggagatgaaggtgtgtgttgatcccccatccccctgtggaggtgaaggtgtgtgctgattactaatccacatgggcaagaacaggatgtccgtcattaccctgaatcaatgctaacacagtgccacttgagttcacattaagttagaaattgagaatctaaaggtacctttattttaactaaaaaataatttatatactgtatattgattgtgacacaatttacaaagtctgaggtgtggaacagttatttaagcattagtcaaccctggtccttaagacagttctagtaaaatgggattgtatatatttgttcaactattttgaccaaaaagttcaataaattttaaatgtttaactgga

SEQ ID NO: 171203 - DNA, 1792 bp, Homo sapiens
  Payload ID: 13683
  Gene Symbol: PPP2R2D
  Gene Name: protein phosphatase 2, regulatory subunit B, delta
  ENST ID: ENST00000482010
  CDS Start-End: 1-451
cggcaacgacttccagtggtgcttctcgcaggtcaagggggccatcgacgaggacgtggccgaagcggacatcatttccaccgttgagtttaattactctggagatcttcttgcaacaggagacaagggcggcagagttgttatttttcagcgtgaacaagagaataaaagccgccctcattctaggggagaatataatgtttacagcacctttcaaagtcatgaaccggagtttgactatttgaaaagtctagaaattgaggaaaaaattaataaaattaggtggttaccacaacagaatgctgctcattttctactgtctacaaatgataaaactataaaattatggaaaataagtgaacgggataaaagagcagaaggttataacctgaaagacgaagatggaagacttcgagacccatttaggatcacggcgctacggatgacctgagaattaatttatggcacttagaaatcacagatagaagctttaacatcgtggacatcaagcctgctaacatggaggagctgaccgaagtcatcactgcagccgagttccacccgcaccagtgcaacgtgttcgtctacagcagtagcaaagggaccatccgcctgtgtgacatgcgctcctcggccctgtgcgacagacactccaagttttttgaagagcctgaagatcccagcagtaggtccttcttctcagaaataatttcatccatatccgatgtaaaattcagtcatagtgggcggtacatgatgaccagagactacctgtcggtgaaggtgtgggacctcaacatggagagcaggccggtggagacccaccaggtccacgagtacctgcgcagcaagctctgctctctctatgagaacgactgcatctttgacaagtttgagtgttgctggaacggttcggatagcgccatcatgaccgggtcctataacaacttcttcaggatgtttgatagagacacgcggagggatgtgaccctggaggcctcgagagagagcagcaaaccgcgcgccagcctcaaaccccggaaggtgtgtacggggggtaagcggaggaaagacgagatcagtgtggacagtctggacttcaacaagaagatcctgcacacagcctggcaccccgtggacaatgtcattgccgtggctgccaccaataacttgtacatattccaggacaaaatcaactagagacgcgaacgtgaggaccaagtcttgtcttgcatagttaagccggacatttttctgtcagagaaaaggcatcattgtccgctccattaagaacagtgacgcacctgctacttcccttcacagacacaggagaaagccgcctccgctggaggcccggtgtggttccgcctcggcgaggcgcgagacaggcgctgctgctcacgtggagacgctctcgaagcagagttgacggacactgctcccaaaaggtcattactcagaataaatgtatttatttcagtccgagccttcctttccaatttatagaccaaaaaattaacatccaagagaaaagttattgtcagataccgctctttctccaactttccctctttctctgccatcacacttgggccttcactgcagcgtggtgtggccaccgtccgtgtcctctcggccttcctccgagtccaggtggactctgtggatgtgtggatgtggcccgagcaggctcaggcggccccactcacccacagcatccgccgccaccccttcgggtgtgagcgctcaataaaaacaacacactataaagtgtttttaaatccaaacagaa

SEQ ID NO: 171204 - DNA, 2058 bp, Homo sapiens
  Payload ID: 13683
  Gene Symbol: PPP2R2D
  Gene Name: protein phosphatase 2, regulatory subunit B, delta
  ENST ID: ENST00000616467
  CDS Start-End: 119-352
ggcggcggcggcggcgccggcggtggtggcggccccggggctgagcgctcggctgcagcggcgcggaggccgtctccctggtctgccgcggtccccgcccgtcccgccgccggctgccatggcaggagccggaggcggcggctgccccgcgggcggcaacgacttccagtggtgcttctcgcaggtcaagggggccatcgacgaggacgtggccgaagcggacatcatttccaccgttgagtttaattactctggagatcttcttgcaacaggagacaagggcggcagagttgttatttttcagcgtgaacaagaggtactggcccagccccgccgtcctgccctgccatgaagtgtgagcagctttctcagcacttcctgcagagaagtctggcaggggtgtgaattctctcttcccttcagggagagaataaaagccgccctcattctaggggagaatataatgtttacagcacctttcaaagtcatgaaccggagtttgactatttgaaaagtctagaaattgaggaaaaaattaataaaattaggtggttaccacaacagaatgctgctcattttctactgtctacaaatgataaaactataaaattatggaaaataagtgaacgggataaaagagcagaaggttataacctgaaagacgaagatggaagacttcgagacccatttaggatcacggcgctacggatgacctgagaattaatttatggcacttagaaatcacagatagaagctttaacatcgtggacatcaagcctgctaacatggaggagctgaccgaagtcatcactgcagccgagttccacccgcaccagtgcaacgtgttcgtctacagcagtagcaaagggaccatccgcctgtgtgacatgcgctcctcggccctgtgcgacagacactccaagttttttgaagagcctgaagatcccagcagtaggtccttcttctcagaaataatttcatccatatccgatgtaaaattcagtcatagtgggcggtacatgatgaccagagactacctgtcggtgaaggtgtgggacctcaacatggagagcaggccggtggagacccaccaggtccacgagtacctgcgcagcaagctctgctctctctatgagaacgactgcatctttgacaagtttgagtgttgctggaacggttcggatagcgccatcatgaccgggtcctataacaacttcttcaggatgtttgatagagacacgcggagggatgtgaccctggaggcctcgagagagagcagcaaaccgcgcgccagcctcaaaccccggaaggtgtgtacggggggtaagcggaggaaagacgagatcagtgtggacagtctggacttcaacaagaagatcctgcacacagcctggcaccccgtggacaatgtcattgccgtggctgccaccaataacttgtacatattccaggacaaaatcaactagagacgcgaacgtgaggaccaagtcttgtcttgcatagttaagccggacatttttctgtcagagaaaaggcatcattgtccgctccattaagaacagtgacgcacctgctacttcccttcacagacacaggagaaagccgcctccgctggaggcccggtgtggttccgcctcggcgaggcgcgagacaggcgctgctgctcacgtggagacgctctcgaagcagagttgacggacactgctcccaaaaggtcattactcagaataaatgtatttatttcagtccgagccttcctttccaatttatagaccaaaaaattaacatccaagagaaaagttattgtcagataccgctctttctccaactttccctctttctctgccatcacacttgggccttcactgcagcgtggtgtggccaccgtccgtgtcctctcggccttcctccgagtccaggtggactctgtggatgtgtggatgtggcccgagcaggctcaggcggccccactcacccacagcatccgccgccaccccttcgggtgtgagcgctcaataaaaacaacacactataaagtgtttttaaatccaaacagaa

SEQ ID NO: 171205 - DNA, 6203 bp, Homo sapiens
  Payload ID: 13683
  Gene Symbol: PPP2R2D
  Gene Name: protein phosphatase 2, regulatory subunit B, delta
  ENST ID: ENST00000470416
  CDS Start-End: 1-174
tcgcaggtcaagggggccatcgacgaggacgtggccgaagggcgtggagaggagagctcggggctgctgccacagatcatgctgagccgccagcagctccacctgcccttggctttgctcatccgtggaaatgacaacagcgtgaaaacggcagatgatgtacaaggattatgatgaaaatagtcttgacctcacggaccctctgagaggttcttgaccgttgcaccctcaagggcccacagaccgcactttgagaactgctgcttgaatgcaagctattagcagtaggagtgtcaaggacagggcagacttcaggattaactgttccttctcatctttaccagattgtactggttttgtctcaaaatacaaaaatagagtgtttattatgtaaagaaaatcaaatgatagaacagctgagaacagctggatcaagagcacagagcggaagttcctcttcatcccactgctgtcctggagtcttcctcaggacccactgctcctaactgtatctttgtagatcattttctatgtgtttatttatttatattttaaaacctagtttgtgtataagcaatcttttttaatccacaaatgtggaatcttattctagactttgaataagattttctgtattagtcagtattgttttttgctacttcttttcctttcctttccttttttggaaatagggtcttactcctctgtcacccaggctggagtgcagtggtgcgatcagagctcactgcagcctgatcaggctcaagcaatcctctccctgctcagcctcctgagtagctggaactataggcttgcactgccatgcccagcttttttctattttttgtagagacagggttttgctgtgttgcccaggatggtcttgaactcctggactcaagtgatcctcccacctcggcctcccaaaatgctgggaatacaagcatgagccatggcatgtggccgccacttgccttttttcattaagagtctataattggagatcttacagggaactgggctttctgctcagccatactcgagctcatttgacccccggccactgccccttgaaatcggacatcatttccaccgttgagtttaattactctggagatcttcttgcaacaggagacaagggcggcagagttgttatttttcagcgtgaacaagagaataaaagccgccctcattctaggggagaatataatgtttacagcacctttcaaagtcatgaaccggagtttgactatttgaaaagtctagaaattgaggaaaaaattaataaaattaggtggttaccacaacagaatgctgctcattttctactgtctacaaatgataaaactataaaattatggaaaataagtgaacgggataaaagagcagaaggttataacctgaaagacgaagatggaagacttcgagacccatttaggatcacggcgctacgggtcccaatattgaagcccatggatcttatggtagaagcgagtccacggcgaatttttgcaaatgctcacacatatcatataaattccatttcagtaaatagtgatcatgaaacatatctttctgcagatgacctgagaattaatttatggcacttagaaatcacagatagaagctttaacatcgtggacatcaagcctgctaacatggaggagctgaccgaagtcatcactgcagccgagttccacccgcaccagtgcaacgtgttcgtctacagcagtagcaaagggaccatccgcctgtgtgacatgcgctcctcggccctgtgcgacagacactccaagttttttgaagagcctgaagatcccagcagtaggtccttcttctcagaaataatttcatccatatccgatgtaaaattcagtcatagtgggcggtacatgatgaccagagactacctgtcggtgaaggtgtgggacctcaacatggagagcaggccggtggagacccaccaggtccacgagtacctgcgcagcaagctctgctctctctatgagaacgactgcatctttgacaagtttgagtgttgctggaacggttcggatagcgccatcatgaccgggtcctataacaacttcttcaggatgtttgatagagacacgcggagggatgtgaccctggaggcctcgagagagagcagcaaaccgcgcgccagcctcaaaccccggaaggtgtgtacggggggtaagcggaggaaagacgagatcagtgtggacagtctggacttcaacaagaagatcctgcacacagcctggcaccccgtggacaatgtcattgccgtggctgccaccaataacttgtacatattccaggacaaaatcaactagagacgcgaacgtgaggaccaagtcttgtcttgcatagttaagccggacatttttctgtcagagaaaaggcatcattgtccgctccattaagaacagtgacgcacctgctacttcccttcacagacacaggagaaagccgcctccgctggaggcccggtgtggttccgcctcggcgaggcgcgagacaggcgctgctgctcacgtggagacgctctcgaagcagagttgacggacactgctcccaaaaggtcattactcagaataaatgtatttatttcagtccgagccttcctttccaatttatagaccaaaaaattaacatccaagagaaaagttattgtcagataccgctctttctccaactttccctctttctctgccatcacacttgggccttcactgcagcgtggtgtggccaccgtccgtgtcctctcggccttcctccgagtccaggtggactctgtggatgtgtggatgtggcccgagcaggctcaggcggccccactcacccacagcatccgccgccaccccttcgggtgtgagcgctcaataaaaacaacacactataaagtgtttttaaatccaaacagaagtattgtctttttatttaattttattgcatagaatgaagttatgcagggttcttctttggaactaactgtttgagaaatgtgtgtccttctttggcagcgtgggggtatgtgtgcagcatttctgtccccaagctgctgcccgctgtgtttctgtagaagtagcccatcagatacaccaggtaaggtctgggaaaagccagaaccgaggccacctctgagaaagaaaattgcaaggaagaaccaaaattgctgccatccagtaagcctggtttaaagtagcttcaaattcactacagttgaagaaatacgtgcttgctttctaaggcttttgaaaaagcactttggggaaagtatactttttaaacattgctaaaattacatgcatgctaaatttcatcctgcatttcaagccagcaaaattaagcaattttaattacacgatgccaccagtacgttggtttattttcaaagtaggatctttgataccagaaatcaagattttccaagacaaataatacagagctgtaccaatgctgagtgaccagagcttgcttccgtgggatttaacacacgcccactacgtgtccccgaggggagtggggagtcgggctcccgtgcccctgtggagatggaggtgtgtgctgatcccccgtccgcctgtggagatgaaggtgtgtgttgattcctcctgctgctgtggagatggaggtgtgtgctgatcgcccgtcaccctgtctagatgaaggtatgtgctgattgcctgtgcccctgtggagaaggaggtgtgtgctgatcccctgtgccctgtggagatggaggtgtgtgctgctccctcgtgcccctgtggagatggaggtgtgtgctgatcccccatcccatccccctgtctagatgaaggtgtgtgctgattcctcatgcccctgtctggatgaaggtgtgtgctgatcccccgtccccctgtggagatgaaggtgtgtgctgatcccccgtgcccctgtggagatgaaggtgcgtgctgatcccccatctccctgtggagatgaaggtgtgtgctgatccccatccccctgtggagatgaagggatatgctgatcccctgtcccactgtggagatgaaggggtgtgctgatcccccgtccccctgtggagatgaaggtgtgtgctgatcccccatctccctgtggagatgaaggggtgtgccaatcccccgcgcccctgtggagatggaggcgtgtgctgatccccatccccctgtggagatgaaggtgtgtgctgatcccccatccccatgtggagatgaaggggtgtgttgatcccctgtccccctgtggagatggtgtgtgctgatccccgtccccctgtggagatgaaggtgtgtgctgatcccccatctccctgtgaagatgaaggggtgtgctgatcccccgtgcccctgtggacatggaggcgtgtgctgatcccccgtccccctgtggagatgaaggtgtgtgctgatcccccatccccatgtggagatgaaggggtgtgttgatcccccgtccccctgtggagatgaaggtgtgtgctgatccccgtccccctgtggagatgaaggggtgtgctgatcccccatgccctgtggagatggaggtgtgtgctgatccctcgtgcccctgtggagatagaggtgtgtactgatcccctgttcccctatctagatgaaggtgtgtactgctgatcccccgtccccctgtggagatgaaggtgtgtgctgatcccccatccccctgtggagatgaaggggtgtgctgatcccccgtcttcctgtggagatgaaggtgtgtgctgattcctcatgcccctgtggagatggaggtgtgtgctgatcccccatccccctgtggggatgaaggtgtgtgctgatcccccatccccctgtggagatgaaggggtatgctgatcccccgtccccctgtggagatgaaggtgtgtgctgatcccccatccccctgtggagatgaaggggtatgctgatcccctgtccccctgtggggatgaaggtgtgtgctgatctcttgtccccctgtggagatggaggtgtgtgctgatcccccatccccctgtggagatgaagatgtgtgctgatcccccgtcctcctgtggagatgaaggtgtgtgctgcttcctcgtgcccctgtggagatggaggtgtgtgctggtcccccgtccccctgtggagatggaggtgtgtgctgatcccccgtccccctgtggagatggaggcgtgtgctgatcccccatccccctgtggagatgaaggcgtgtgctgatccgccatcccactgtggagatgaaggcgtgtgctgatcccccatccccctgtggagataaaggtgtgtgctgatcccccatccccctgtggagatgaaggcgtgtgctgatccgccatcccactgtggagatgaaggcgtgtgctgatcccccatccccctgtggagatgaaggcgtgtgctcatcccccatccccctgtggagatgaaggcgtgtgctgatccgccatcccactgtggagatgaaggtgtgtgctgatcccccatccccctgtggagatgaaggtgtgtgctgatccccggtccccctgtggagatgaaggtgtgtgctgatcccccgtcctcctgtggagatgaaggcgtgtgctgatcccccgtccccctgtggagatgaaggcgtgtgctgatccgccgtccccctgtggagatgaaggcgtgtgctgatccgccatccccctgtggagatgaaggcgtgtgctcatcccccatccccctgtggagatgaaggcgtgtgctgatccgccatcccactgtggagatgaaggtgtgtgctgatcccccatccccctgtggagatgaaggcgtgtgctgatccccggtccccctgtggagatgaaggtgtgtgttgatcccccatccccctgtggaggtgaaggtgtgtgctgattactaatccacatgggcaagaacaggatgtccgtcattaccctgaatcaatgctaacacagtgccacttgagttcacattaagttagaaattgagaatctaaaggtacctttattttaactaaaaaataatttatatactgtatattgattgtgacacaatttacaaagtctgaggtgtggaacagttatttaagcattagtcaaccctggtccttaagacagttctagtaaaatgggattgtatatatttgttcaactattttgaccaaaaagttcaataaattttaaatgttt

SEQ ID NO: 171206 - DNA, 2958 bp, Homo sapiens
  Payload ID: 13684
  Gene Symbol: PPP2R5D
  Gene Name: protein phosphatase 2, regulatory subunit B', delta
  ENST ID: ENST00000230402
  CDS Start-End: 79-414
gagcgggccgagtgcggccgagcaaagccggagccggagcggggccgcaggagacgggccgggtccggacgggccgagatgccctataaactgaaaaaggagaaggagccccccaaggttgccaaatgcacagccaagcctagcagctcgggcaaggatggtggaggcgagaacactgaggaggtgacttgtttgaccaggcccagccgcagccccagccccagccccagccccaagcccagtctcagccaccgtcatccaacaagcgtcccagcaatagcacgccgccccccacgcagctcagcaaaatcaagtactcaggggggccccagattgtcaagaaggagcgacggcaaagctcctcccgcttcaacctcagcaagaatcgggagctgcagaagcttcctgccctgaaagattcgccaacccaggagcgggaggagctgtttatccagaagctacgccagtgctgtgtcctctttgacttcgtgtcagacccactcagtgacctcaaattcaaggaggtgaagcgggcaggactcaacgagatggtggagtacatcacccatagccgtgatgttgtcactgaggccatttaccctgaggctgtcaccatgttttcagtgaacctcttccggacgctgccaccttcatcgaatcccacaggggctgagtttgacccagaggaagatgagcccaccctggaagctgcttggccacatctccagctcgtgtatgagttcttcttacgtttccttgagtctcctgatttccagccaaacatagccaagaagtacatcgaccagaagtttgtacttgctctcctagacctatttgacagtgaggatcctcgagagcgggacttcctcaagaccattttgcatcgcatctatggcaagtttttggggctccgggcttatatccgtaggcagatcaaccacatcttctacaggttcatctacgagacggagcatcacaacgggattgctgagctcctggagatcctgggcagcatcatcaatggctttgccctgccccttaaagaagagcacaagatgttcctcatccgtgtcctacttccccttcacaaggtcaagtccctgagtgtctaccaccctcagctggcatactgtgtggtacaattcctggagaaggagagcagtctgactgagccggtaattgtgggacttctcaagttttggcccaagacccacagccccaaggaggtgatgttcttgaatgagctggaggagattctggacgtcattgaaccttctgagttcagcaaagtgatggaacccctcttccgccagctggccaagtgtgtctctagcccccatttccaggtggcagagcgtgctctctattactggaacaatgagtacatcatgagcctgataagtgacaatgctgcccgagtcctccccatcatgttccctgcactctacaggaactccaagagccactggaacaagacaatccatggactgatctataatgccctgaagttgtttatggaaatgaatcagaagctgtttgatgactgcacacaacaatacaaggcagagaagcagaagggccggttccgaatgaaggaaagggaagagatgtggcaaaaaatcgaggagctggcccggcttaatccccagtatcccatgttccgagcccctccaccactgccccctgtgtactcgatggagacagagacccccacagctgaggacatccagcttctgaagaggactgtggagactgaggctgttcagatgctaaaagacatcaagaaggagaaagtgctgctgcggaggaagtcggagctgccccaggacgtgtacaccatcaaggcactggaggcgcacaagcgggcggaagagttcctaactgccagccaggaggctctctgacccctcacgttcctaccacagggccacagcccacacagccctgggacactgccctggccctccatactctgctccctactggctgtcttgggggaaggcagcgcctctctagctactcaagggagggggatgtgggcacttgaagcagggacacccacagaatggtccctcttctccccaaaaggtgttcatgcctccctgtggctagtacaggctgagcactaagatgcttagtgctcagacaacctggggatgcctgtcccctacctgctcctcacccacagctacctgaggctgctctgagaagtacacacaggaatacatacgctcctctattcttcccttcatcctcatttgaacgccaggtatctcccctcctctctctcccctgcagaggcatgtagggaacagcaggagattattctcaccaaagttatgtcaagccccattggtcccagagtagctgaagggaagccaacccccctgcagcacaaataggccccccagtcccagccgtgtgctggcagatagggttgtattatttcttcttaccccatgcctgaccaagggaggtcaaaaggagaaaagtataggctgtggacaataactgatgaatatagggcccagatggaccaagtggggccggggagggatgaataaacaccctaccccgtgccctgtctttggtgagcagcagccctggggtcacagacatggaagggaccaccctggggctgactgcttttctgtgctgttggttcccaaaactagaaagaaggaagcagggagcggtgccccaagcatggctcctgccaacacctatttatttccttgtttgtgctatgctgggcaggccttctcttgtcccttataggtaccttggaggggccaggggctgaggaaggccggacccaggttccaggggcgcaggcagtgcggcttttggctgtgtacatagggtgctttattctccacagagtgatacatgctaaggtgggttgggcttggaccgatgtccccatatgtacagaactgaataaagtgggtctctgag

SEQ ID NO: 171207 - DNA, 2894 bp, Homo sapiens
  Payload ID: 13684
  Gene Symbol: PPP2R5D
  Gene Name: protein phosphatase 2, regulatory subunit B', delta
  Uniprot ID: Q14738
  ENST ID: ENST00000394110
  CDS Start-End: 126-1838
caccgctcgacccgggcgcagcgcgcaggcggtggcgaagagacgccgagcgggccgagtgcggccgagcaaagccggagccggagcggggccgcaggagacgggccgggtccggacgggccgagatgccctataaactgaaaaaggagaaggagccccccaaggttgccaaatgcacagccaagcctagcagctcgggcaaggatggtggaggcgagaacactgaggaggcccagccgcagccccagccccagccccagccccaagcccagtctcagccaccgtcatccaacaagcgtcccagcaatagcacgccgccccccacgcagctcagcaaaatcaagtactcaggggggccccagattgtcaagaaggagctgtttatccagaagctacgccagtgctgtgtcctctttgacttcgtgtcagacccactcagtgacctcaaattcaaggaggtgaagcgggcaggactcaacgagatggtggagtacatcacccatagccgtgatgttgtcactgaggccatttaccctgaggctgtcaccatgttttcagtgaacctcttccggacgctgccaccttcatcgaatcccacaggggctgagtttgacccagaggaagatgagcccaccctggaagctgcttggccacatctccagctcgtgtatgagttcttcttacgtttccttgagtctcctgatttccagccaaacatagccaagaagtacatcgaccagaagtttgtacttgctctcctagacctatttgacagtgaggatcctcgagagcgggacttcctcaagaccattttgcatcgcatctatggcaagtttttggggctccgggcttatatccgtaggcagatcaaccacatcttctacaggttcatctacgagacggagcatcacaacgggattgctgagctcctggagatcctgggcagcatcatcaatggctttgccctgccccttaaagaagagcacaagatgttcctcatccgtgtcctacttccccttcacaaggtcaagtccctgagtgtctaccaccctcagctggcatactgtgtggtacaattcctggagaaggagagcagtctgactgagccggtaattgtgggacttctcaagttttggcccaagacccacagccccaaggaggtgatgttcttgaatgagctggaggagattctggacgtcattgaaccttctgagttcagcaaagtgatggaacccctcttccgccagctggccaagtgtgtctctagcccccatttccaggtggcagagcgtgctctctattactggaacaatgagtacatcatgagcctgataagtgacaatgctgcccgagtcctccccatcatgttccctgcactctacaggaactccaagagccactggaacaagacaatccatggactgatctataatgccctgaagttgtttatggaaatgaatcagaagctgtttgatgactgcacacaacaatacaaggcagagaagcagaagggccggttccgaatgaaggaaagggaagagatgtggcaaaaaatcgaggagctggcccggcttaatccccagtatcccatgttccgagcccctccaccactgccccctgtgtactcgatggagacagagacccccacagctgaggacatccagcttctgaagaggactgtggagactgaggctgttcagatgctaaaagacatcaagaaggagaaagtgctgctgcggaggaagtcggagctgccccaggacgtgtacaccatcaaggcactggaggcgcacaagcgggcggaagagttcctaactgccagccaggaggctctctgacccctcacgttcctaccacagggccacagcccacacagccctgggacactgccctggccctccatactctgctccctactggctgtcttgggggaaggcagcgcctctctagctactcaagggagggggatgtgggcacttgaagcagggacacccacagaatggtccctcttctccccaaaaggtgttcatgcctccctgtggctagtacaggctgagcactaagatgcttagtgctcagacaacctggggatgcctgtcccctacctgctcctcacccacagctacctgaggctgctctgagaagtacacacaggaatacatacgctcctctattcttcccttcatcctcatttgaacgccaggtatctcccctcctctctctcccctgcagaggcatgtagggaacagcaggagattattctcaccaaagttatgtcaagccccattggtcccagagtagctgaagggaagccaacccccctgcagcacaaataggccccccagtcccagccgtgtgctggcagatagggttgtattatttcttcttaccccatgcctgaccaagggaggtcaaaaggagaaaagtataggctgtggacaataactgatgaatatagggcccagatggaccaagtggggccggggagggatgaataaacaccctaccccgtgccctgtctttggtgagcagcagccctggggtcacagacatggaagggaccaccctggggctgactgcttttctgtgctgttggttcccaaaactagaaagaaggaagcagggagcggtgccccaagcatggctcctgccaacacctatttatttccttgtttgtgctatgctgggcaggccttctcttgtcccttataggtaccttggaggggccaggggctgaggaaggccggacccaggttccaggggcgcaggcagtgcggcttttggctgtgtacatagggtgctttattctccacagagtgatacatgctaaggtgggttgggcttggaccgatgtccccatatgtacagaactgaataaagtgggtctctgagaa

SEQ ID NO: 171208 - DNA, 3044 bp, Homo sapiens
  Payload ID: 13684
  Gene Symbol: PPP2R5D
  Gene Name: protein phosphatase 2, regulatory subunit B', delta
  Uniprot ID: Q14738
  ENST ID: ENST00000485511
  CDS Start-End: 180-1988
ggcgcctggttgtcaggcagttttgtaggagttcgggccaattggaggcgcaggcaccgctcgacccgggcgcagcgcgcaggcggtggcgaagagacgccgagcgggccgagtgcggccgagcaaagccggagccggagcggggccgcaggagacgggccgggtccggacgggccgagatgccctataaactgaaaaaggagaaggagccccccaaggttgccaaatgcacagccaagcctagcagctcgggcaaggatggtggaggcgagaacactgaggaggcccagccgcagccccagccccagccccagccccaagcccagtctcagccaccgtcatccaacaagcgtcccagcaatagcacgccgccccccacgcagctcagcaaaatcaagtactcaggggggccccagattgtcaagaaggagcgacggcaaagctcctcccgcttcaacctcagcaagaatcgggagctgcagaagcttcctgccctgaaagattcgccaacccaggagcgggaggagctgtttatccagaagctacgccagtgctgtgtcctctttgacttcgtgtcagacccactcagtgacctcaaattcaaggaggtgaagcgggcaggactcaacgagatggtggagtacatcacccatagccgtgatgttgtcactgaggccatttaccctgaggctgtcaccatgttttcagtgaacctcttccggacgctgccaccttcatcgaatcccacaggggctgagtttgacccagaggaagatgagcccaccctggaagctgcttggccacatctccagctcgtgtatgagttcttcttacgtttccttgagtctcctgatttccagccaaacatagccaagaagtacatcgaccagaagtttgtacttgctctcctagacctatttgacagtgaggatcctcgagagcgggacttcctcaagaccattttgcatcgcatctatggcaagtttttggggctccgggcttatatccgtaggcagatcaaccacatcttctacaggttcatctacgagacggagcatcacaacgggattgctgagctcctggagatcctgggcagcatcatcaatggctttgccctgccccttaaagaagagcacaagatgttcctcatccgtgtcctacttccccttcacaaggtcaagtccctgagtgtctaccaccctcagctggcatactgtgtggtacaattcctggagaaggagagcagtctgactgagccggtaattgtgggacttctcaagttttggcccaagacccacagccccaaggaggtgatgttcttgaatgagctggaggagattctggacgtcattgaaccttctgagttcagcaaagtgatggaacccctcttccgccagctggccaagtgtgtctctagcccccatttccaggtggcagagcgtgctctctattactggaacaatgagtacatcatgagcctgataagtgacaatgctgcccgagtcctccccatcatgttccctgcactctacaggaactccaagagccactggaacaagacaatccatggactgatctataatgccctgaagttgtttatggaaatgaatcagaagctgtttgatgactgcacacaacaatacaaggcagagaagcagaagggccggttccgaatgaaggaaagggaagagatgtggcaaaaaatcgaggagctggcccggcttaatccccagtatcccatgttccgagcccctccaccactgccccctgtgtactcgatggagacagagacccccacagctgaggacatccagcttctgaagaggactgtggagactgaggctgttcagatgctaaaagacatcaagaaggagaaagtgctgctgcggaggaagtcggagctgccccaggacgtgtacaccatcaaggcactggaggcgcacaagcgggcggaagagttcctaactgccagccaggaggctctctgacccctcacgttcctaccacagggccacagcccacacagccctgggacactgccctggccctccatactctgctccctactggctgtcttgggggaaggcagcgcctctctagctactcaagggagggggatgtgggcacttgaagcagggacacccacagaatggtccctcttctccccaaaaggtgttcatgcctccctgtggctagtacaggctgagcactaagatgcttagtgctcagacaacctggggatgcctgtcccctacctgctcctcacccacagctacctgaggctgctctgagaagtacacacaggaatacatacgctcctctattcttcccttcatcctcatttgaacgccaggtatctcccctcctctctctcccctgcagaggcatgtagggaacagcaggagattattctcaccaaagttatgtcaagccccattggtcccagagtagctgaagggaagccaacccccctgcagcacaaataggccccccagtcccagccgtgtgctggcagatagggttgtattatttcttcttaccccatgcctgaccaagggaggtcaaaaggagaaaagtataggctgtggacaataactgatgaatatagggcccagatggaccaagtggggccggggagggatgaataaacaccctaccccgtgccctgtctttggtgagcagcagccctggggtcacagacatggaagggaccaccctggggctgactgcttttctgtgctgttggttcccaaaactagaaagaaggaagcagggagcggtgccccaagcatggctcctgccaacacctatttatttccttgtttgtgctatgctgggcaggccttctcttgtcccttataggtaccttggaggggccaggggctgaggaaggccggacccaggttccaggggcgcaggcagtgcggcttttggctgtgtacatagggtgctttattctccacagagtgatacatgctaaggtgggttgggcttggaccgatgtccccatatgtacagaactgaataaagtgggtctctgagaa

SEQ ID NO: 171209 - DNA, 2567 bp, Homo sapiens
  Payload ID: 13684
  Gene Symbol: PPP2R5D
  Gene Name: protein phosphatase 2, regulatory subunit B', delta
  ENST ID: ENST00000470467
  CDS Start-End: 1-1513
caagaaggagcgacggcaaagctcctcccgcttcaacctcagcaagaatcgggagctgcagaagcttcctgccctgaaagattcgccaacccaggagcgggaggagctgtttatccagaagctacgccagtgctgtgtcctctttgacttcgtgtcagacccactcagtgacctcaaattcaaggaggtgaagcgggcaggactcaacgagatggtggagtacatcacccatagccgtgatgttgtcactgaggccatttaccctgaggctgtcaccatgttttcagtgaacctcttccggacgctgccaccttcatcgaatcccacaggggctgagtttgacccagaggaagatgagcccaccctggaagctgcttggccacatctccagctcgtgtatgagttcttcttacgtttccttgagtctcctgatttccagccaaacatagccaagaagtacatcgaccagaagtttgtacttgctctcctagacctatttgacagtgaggatcctcgagagcgggacttcctcaagaccattttgcatcgcatctatggcaagtttttggggctccgggcttatatccgtaggcagatcaaccacatcttctacaggttcatctacgagacggagcatcacaacgggattgctgagctcctggagatcctgggcagcatcatcaatggctttgccctgccccttaaagaagagcacaagatgttcctcatccgtgtcctacttccccttcacaaggtcaagtccctgagtgtctaccaccctcaggtaattgtgggacttctcaagttttggcccaagacccacagccccaaggaggtgatgttcttgaatgagctggaggagattctggacgtcattgaaccttctgagttcagcaaagtgatggaacccctcttccgccagctggccaagtgtgtctctagcccccatttccaggtggcagagcgtgctctctattactggaacaatgagtacatcatgagcctgataagtgacaatgctgcccgagtcctccccatcatgttccctgcactctacaggaactccaagagccactggaacaagacaatccatggactgatctataatgccctgaagttgtttatggaaatgaatcagaagctgtttgatgactgcacacaacaatacaaggcagagaagcagaagggccggttccgaatgaaggaaagggaagagatgtggcaaaaaatcgaggagctggcccggcttaatccccagtatcccatgttccgagcccctccaccactgccccctgtgtactcgatggagacagagacccccacagctgaggacatccagcttctgaagaggactgtggagactgaggctgttcagatgctaaaagacatcaagaaggagaaagtgctgctgcggaggaagtcggagctgccccaggacgtgtacaccatcaaggcactggaggcgcacaagcgggcggaagagttcctaactgccagccaggaggctctctgacccctcacgttcctaccacagggccacagcccacacagccctgggacactgccctggccctccatactctgctccctactggctgtcttgggggaaggcagcgcctctctagctactcaagggagggggatgtgggcacttgaagcagggacacccacagaatggtccctcttctccccaaaaggtgttcatgcctccctgtggctagtacaggctgagcactaagatgcttagtgctcagacaacctggggatgcctgtcccctacctgctcctcacccacagctacctgaggctgctctgagaagtacacacaggaatacatacgctcctctattcttcccttcatcctcatttgaacgccaggtatctcccctcctctctctcccctgcagaggcatgtagggaacagcaggagattattctcaccaaagttatgtcaagccccattggtcccagagtagctgaagggaagccaacccccctgcagcacaaataggccccccagtcccagccgtgtgctggcagatagggttgtattatttcttcttaccccatgcctgaccaagggaggtcaaaaggagaaaagtataggctgtggacaataactgatgaatatagggcccagatggaccaagtggggccggggagggatgaataaacaccctaccccgtgccctgtctttggtgagcagcagccctggggtcacagacatggaagggaccaccctggggctgactgcttttctgtgctgttggttcccaaaactagaaagaaggaagcagggagcggtgccccaagcatggctcctgccaacacctatttatttccttgtttgtgctatgctgggcaggccttctcttgtcccttataggtaccttggaggggccaggggctgaggaaggccggacccaggttccaggggcgcaggcagtgcggcttttggctgtgtacatagggtgctttattctccacagagtgatacatgctaaggtgggttgggcttggaccgatgtccccatatgtacagaactgaataaagtgggtctctgag

SEQ ID NO: 171210 - DNA, 462 bp, Homo sapiens
  Payload ID: 13684
  Gene Symbol: PPP2R5D
  Gene Name: protein phosphatase 2, regulatory subunit B', delta
  ENST ID: ENST00000486843
  CDS Start-End: 1-462
gttcttgaatgagctggaggagattctggacgtcattgaaccttctgagttcagcaaagtgatggaacccctcttccgccagctggccaagtgtgtctctagcccccatttccaggtggcagagcgtgctctctattactggaacaatgagtacatcatgagcctgataagtgacaatgctgcccgagtcctccccatcatgttccctgcactctacaggaactccaagagccactggaacaagacaatccatggactgatctataatgccctgaagttgtttatggaaatgaatcagaagctgtttgatgactgcacacaacaatacaaggcagagaagcagaacccaaccccaatcctacttttgctcctcaggggccggttccgaatgaaggaaagggaagagatgtggcaaaaaatcgaggagctggcccggcttaatccccagtatcccatgttccg

SEQ ID NO: 171211 - DNA, 2963 bp, Homo sapiens
  Payload ID: 13684
  Gene Symbol: PPP2R5D
  Gene Name: protein phosphatase 2, regulatory subunit B', delta
  ENST ID: ENST00000472118
  CDS Start-End: 125-1909
accgctcgacccgggcgcagcgcgcaggcggtggcgaagagacgccgagcgggccgagtgcggccgagcaaagccggagccggagcggggccgcaggagacgggccgggtccggacgggccgagatgccctataaactgaaaaaggagaaggagccccccaaggttgccaaatgcacagccaagcctagcagctcgggcaaggatggtggaggcgagaacactgaggagccccagccccaagcccagtctcagccaccgtcatccaacaagcgtcccagcaatagcacgccgccccccacgcagctcagcaaaatcaagtactcaggggggccccagattgtcaagaaggagcgacggcaaagctcctcccgcttcaacctcagcaagaatcgggagctgcagaagcttcctgccctgaaagattcgccaacccaggagcgggaggagctgtttatccagaagctacgccagtgctgtgtcctctttgacttcgtgtcagacccactcagtgacctcaaattcaaggaggtgaagcgggcaggactcaacgagatggtggagtacatcacccatagccgtgatgttgtcactgaggccatttaccctgaggctgtcaccatgttttcagtgaacctcttccggacgctgccaccttcatcgaatcccacaggggctgagtttgacccagaggaagatgagcccaccctggaagctgcttggccacatctccagctcgtgtatgagttcttcttacgtttccttgagtctcctgatttccagccaaacatagccaagaagtacatcgaccagaagtttgtacttgctctcctagacctatttgacagtgaggatcctcgagagcgggacttcctcaagaccattttgcatcgcatctatggcaagtttttggggctccgggcttatatccgtaggcagatcaaccacatcttctacaggttcatctacgagacggagcatcacaacgggattgctgagctcctggagatcctgggcagcatcatcaatggctttgccctgccccttaaagaagagcacaagatgttcctcatccgtgtcctacttccccttcacaaggtcaagtccctgagtgtctaccaccctcagctggcatactgtgtggtacaattcctggagaaggagagcagtctgactgagccggtaattgtgggacttctcaagttttggcccaagacccacagccccaaggaggtgatgttcttgaatgagctggaggagattctggacgtcattgaaccttctgagttcagcaaagtgatggaacccctcttccgccagctggccaagtgtgtctctagcccccatttccaggtggcagagcgtgctctctattactggaacaatgagtacatcatgagcctgataagtgacaatgctgcccgagtcctccccatcatgttccctgcactctacaggaactccaagagccactggaacaagacaatccatggactgatctataatgccctgaagttgtttatggaaatgaatcagaagctgtttgatgactgcacacaacaatacaaggcagagaagcagaagggccggttccgaatgaaggaaagggaagagatgtggcaaaaaatcgaggagctggcccggcttaatccccagtatcccatgttccgagcccctccaccactgccccctgtgtactcgatggagacagagacccccacagctgaggacatccagcttctgaagaggactgtggagactgaggctgttcagatgctaaaagacatcaagaaggagaaagtgctgctgcggaggaagtcggagctgccccaggacgtgtacaccatcaaggcactggaggcgcacaagcgggcggaagagttcctaactgccagccaggaggctctctgacccctcacgttcctaccacagggccacagcccacacagccctgggacactgccctggccctccatactctgctccctactggctgtcttgggggaaggcagcgcctctctagctactcaagggagggggatgtgggcacttgaagcagggacacccacagaatggtccctcttctccccaaaaggtgttcatgcctccctgtggctagtacaggctgagcactaagatgcttagtgctcagacaacctggggatgcctgtcccctacctgctcctcacccacagctacctgaggctgctctgagaagtacacacaggaatacatacgctcctctattcttcccttcatcctcatttgaacgccaggtatctcccctcctctctctcccctgcagaggcatgtagggaacagcaggagattattctcaccaaagttatgtcaagccccattggtcccagagtagctgaagggaagccaacccccctgcagcacaaataggccccccagtcccagccgtgtgctggcagatagggttgtattatttcttcttaccccatgcctgaccaagggaggtcaaaaggagaaaagtataggctgtggacaataactgatgaatatagggcccagatggaccaagtggggccggggagggatgaataaacaccctaccccgtgccctgtctttggtgagcagcagccctggggtcacagacatggaagggaccaccctggggctgactgcttttctgtgctgttggttcccaaaactagaaagaaggaagcagggagcggtgccccaagcatggctcctgccaacacctatttatttccttgtttgtgctatgctgggcaggccttctcttgtcccttataggtaccttggaggggccaggggctgaggaaggccggacccaggttccaggggcgcaggcagtgcggcttttggctgtgtacatagggtgctttattctccacagagtgatacatgctaaggtgggttgggcttggaccgatgtccccatatgtacagaactgaataaagtgggtctctgag

SEQ ID NO: 171212 - DNA, 1558 bp, Homo sapiens
  Payload ID: 13684
  Gene Symbol: PPP2R5D
  Gene Name: protein phosphatase 2, regulatory subunit B', delta
  Uniprot ID: Q14738
  ENST ID: ENST00000461010
  CDS Start-End: 27-1517
gacgggccgggtccggacgggccgagatgccctataaactgaaaaaggagaaggagctgtttatccagaagctacgccagtgctgtgtcctctttgacttcgtgtcagacccactcagtgacctcaaattcaaggaggtgaagcgggcaggactcaacgagatggtggagtacatcacccatagccgtgatgttgtcactgaggccatttaccctgaggctgtcaccatgttttcagtgaacctcttccggacgctgccaccttcatcgaatcccacaggggctgagtttgacccagaggaagatgagcccaccctggaagctgcttggccacatctccagctcgtgtatgagttcttcttacgtttccttgagtctcctgatttccagccaaacatagccaagaagtacatcgaccagaagtttgtacttgctctcctagacctatttgacagtgaggatcctcgagagcgggacttcctcaagaccattttgcatcgcatctatggcaagtttttggggctccgggcttatatccgtaggcagatcaaccacatcttctacaggttcatctacgagacggagcatcacaacgggattgctgagctcctggagatcctgggcagcatcatcaatggctttgccctgccccttaaagaagagcacaagatgttcctcatccgtgtcctacttccccttcacaaggtcaagtccctgagtgtctaccaccctcagctggcatactgtgtggtacaattcctggagaaggagagcagtctgactgagccggtaattgtgggacttctcaagttttggcccaagacccacagccccaaggaggtgatgttcttgaatgagctggaggagattctggacgtcattgaaccttctgagttcagcaaagtgatggaacccctcttccgccagctggccaagtgtgtctctagcccccatttccaggtggcagagcgtgctctctattactggaacaatgagtacatcatgagcctgataagtgacaatgctgcccgagtcctccccatcatgttccctgcactctacaggaactccaagagccactggaacaagacaatccatggactgatctataatgccctgaagttgtttatggaaatgaatcagaagctgtttgatgactgcacacaacaatacaaggcagagaagcagaagggccggttccgaatgaaggaaagggaagagatgtggcaaaaaatcgaggagctggcccggcttaatccccagtatcccatgttccgagcccctccaccactgccccctgtgtactcgatggagacagagacccccacagctgaggacatccagcttctgaagaggactgtggagactgaggctgttcagatgctaaaagacatcaagaaggagaaagtgctgctgcggaggaagtcggagctgccccaggacgtgtacaccatcaaggcactggaggcgcacaagcgggcggaagagttcctaactgccagccaggaggctctctgacccctcacgttcctaccacagggccacagcccacacagccc

SEQ ID NO: 171213 - DNA, 6659 bp, Homo sapiens
  Payload ID: 13685
  Gene Symbol: PPP2R5E
  Gene Name: protein phosphatase 2, regulatory subunit B', epsilon isoform
  Uniprot ID: Q16537
  ENST ID: ENST00000337537
  CDS Start-End: 604-2007
ggccagaaggttcggttgcgcgtgtgccatggactcagccgcccggtgatattgacaataggagagagaaaggggcattgactgggacccaccgcgggtagcgaaaggtggctctggcagcggcggctccagctcctgcggctcctcctccttattctgtccccttctcttgctgccgctgcagatccagtcttcctccctcccttccccccctccccacgtcgtcgccgccgccgccgggtccggggcaacgagctgaggcgccgcccgccaggaatgtgagcgaggagccaccggcggagccgcaacggggtcggtgccgatttgatgggacgggcccgcgggggaggatcgtgaggccgccgccgccaccggaacgctgaggttcgggtccggccgtgaggcctagaggctccgccgccgcggaaccggagggaccccgtaccggacagccgtcgccccaggctccccgcagctgcccggacctccccctgcacgtcccggtcccgccgcccgcccccgctgcggccacctcgcccgtctcccgcccctccaagccacagatcatctttggattcttccccagaagcttcaagtagggatatgtcctcagcaccaactactcctccatcagtggataaagtagacggattttctcggaagtccgtcagaaaagccagacagaagaggtcgcaaagttcctcacagtttaggtctcaaggcaagcctattgagttaacacctctgccgctgctaaaagacgttccatcctcagagcagcctgaactgttcctaaagaaacttcagcagtgctgtgtcatttttgacttcatggacacgctatctgatcttaaaatgaaagaatacaagcgctccactcttaatgaactggtggactacattacaataagcagaggctgtttgacagagcagacttaccctgaagtagttagaatggtatcttgcaatatattcagaactctccctcctagtgacagcaatgaatttgatccagaagaagatgaacctacccttgaggcatcgtggccacacttacagcttgtatatgaatttttcatacgatttttggaaagccaagaattccaacccagcattgccaaaaaatatatagatcagaaatttgtattacagcttctggagctatttgacagcgaagaccctcgggaacgggactacttaaaaacagtcttacacagaatttatggcaagtttcttggtcttagagcatttatccgaaaacagattaacaatatttttctaaggtttgtttatgaaacagaacacttcaatggtgtagctgaactgctggaaatattaggaagtattatcaatggctttgctttacctcttaaggcagaacacaaacagtttctggtgaaagtattgatccctttacacactgtcaggagcttatcactcttccatgcacagctggcatattgtatagtacagtttctggagaaagatccttcactcacagaaccagttattagggggttaatgaaattttggcctaaaacatgtagtcaaaaagaggtcatgttccttggggaactggaagaaatattggatgtgattgaaccttcacaatttgttaaaatccaagaacctttgtttaaacaaatcgccaagtgtgtatctagcccccattttcaggtggcagaaagagcactctattattggaataatgaatacatcatgagtttgatagaagaaaactctaacgtcatccttcccatcatgttttccagcctttataggatttcaaaagaacattggaatccggctattgtggcgttggtgtacaatgtgttgaaggcatttatggaaatgaacagcaccatgtttgacgagctgacagccacatacaagtcagatcgtcagcgtgagaaaaagaaagaaaaggagcgtgaagaattgtggaaaaaattggaggatctggagttaaagagaggtcttagacgtgatggaataattccaacttaacaaaaacaatgacaacaacattactaacctgtggagtcacacgtttatgtagtagaagatggagcaacagttttctgtattgtgcaactttacagtagatttcacctttgtttcattattacagcagcactgtatatacctgtctctaagtaaaggaaaaaacaaaataaggacttcaatccaaagtttggacagtagatggacttctcagaactttgcaaacataatcattgttctcaccctcttttaaaaaaaaaaatcggtcttcaaagatctgttgatgaaattgctatgttaaaattccattatcgggagttccttatttatcactagcagagagtatgatacaattttcaaatgtgaacaatcttaaatttagcttgtctttctgctaagctgttaaatgtatttatagtaaaggaagaaaaaaagactgtcatttccttataagtttgtgtaacatcctcctctggataacttgactgtaatttaacatctttttcttttgcacatcttcctgagttgaatgtccacgtggaatggggtcatgaattataaaagtccctgataaaagttttgtttactggggtgaacatctttccagtaaccaggtagtcctggtactcctttagttttaaaattaggagttaagagagaagaggtgataaacatagtagggaagggaatatcggattcatgcatcagtttatggtgaatccaaatcaatgtcttgaatcctttgaaaacaggcactgggacatcacaggcttcagtacctgaccagtattagttgcatatatcattgaacacacataccagagatgttttagaaatgtgagaaaaacatccttttggaccatttgaaataagaaagacaaacactaaacaatacaaccatgaaattgatcaccgggattgcaaatctaattgggaaaagagttgagcaaacagcttggactgtttggagttgttgccttactttttaatatgtatttataaagtattccagcaaaagaggatgtagcctctgggaaaaaacaaacatgttacagtgttttttgtagattctcgttctatatctcatcacagcgccagccctgtttttagccggaaaggattcaggataaacattattatgcattctgaattggatgcatattcctaactactgtatttgttaccaaaagtggttctacaaatgctactgaaaaaaatctggaaattcctaatgtcctgagtattaataataaagtttaaaaatgcttttatatcaaaggtgcatcgtgaccaaattgtttaagaaaaaaaaacaaaaaaaacaaaatctagggctgtattttatatatatatatatatatatatatatatatatatcttattggctctctgctttgtatttaaatgaagaatcttacatcttgggtaggtaaactgctgataaaatttgtgtacagtatgtacttacctaatgcagttgcattattacgtactgaaagatatgtgtttggaggtttatttccaggatgcatttgcttgttttggtcatggcagcagtgagttggtaatcctaaaccatcacttccagcagtattcatggtatagagctgatctgtgttcatatgttgaattgtgatagtagcaaacatgaacatatgaactattgttgctcttaatagaaatacaatataaatatgggcttgtatattttcttccttacatttaaatataaagtagaatacgcagttttattattttcaagaaaaagaaagagaagctgctgacctttctcccccataaagtttttcaggatgatcaggtcacagtgtgtacgtaagagtcagctaattatggatattgtcatctcggtaactttgtaaaaaaacaaacaaaactggcattgttaattccaaaaagaaaaaaaaaagcagtaaaaaaaaaaagtcatatgcaacaccagacgcaacatggtttaatggaattaatagtttttttttttttttttttaaagaacattgatggggattcactgtaaagttggcagaggctgccaaagacgaaacaactgactttaaaaatgctggaacaatgtgataaaaaataaatttgtaacaaatcttctcctttttagcccttgtcattttagccctttagtttcaactctgcattatatttagtttatatagtgtaaacttttgtttgccattaattcatctttttaggtagaagacattaaaatcacaggtttatgaagaatctctgctcattggaatgaaatgcagtcatttgaaatgagaaaggccaggatccttttttgtaccttaccctgtcttcaagagtaaaggtgaacacttacagctctcctccttgatgtcaattttgtatgttgatcattccaaactgagaagaataaagccacattttagacatatttatagaatcaattaaagctatatgtctaaaattcgtagggcaacttctgagaagaaacaccgtctttttcttttttaatggaaagtgacaatgtgacattagtcatgttgtgtgcggtgacgcagagtaactgaggtaatctgactgttgcactatgtgacatatttcaggacgtacttgctgcatttgcagcagccctctctctctgtcccttcccacaattctgctgttgctgcaacttgagttaattgtgacaaatgcatctttgtgttatattttgtttgcttcataatttccagaactatatataaatatattttttaaatagcaaatattgtagttagtgagtgatgatcactccaaccttatccttaccatattggtttcagggataggattaagagtgtctttggaagagaaaaatacacacaaccctgtggtttagaatgacgctgaggccttaggctgtgggcctagaacaactatgtgagtgaattcacccatctcatactttgaatcaagcatgcattcctgtttctcattgtgaagtatccccagttgttttccttcagtgttgagtttttgtccttttaaattttattatattttgctctccctaacatttgactgttttttataaaagaaaagaaaaaaaaagaaataaataataccctcgatgccactggatactcacaagcagggttatgctccttcatcttgggcttgtttgcctaaatgaaagggtttaatttattttgtacctcctatgcgtgggatagtccagggtgcagagccaggacttgcttgtaattgcacctgctatacttaaatgtatagccctaggctcaatcacactatggaaagaaacaaaaaaagtatatttagagctttaaaagcttttttatttttttgtggggatgagggtgggatgggaaagggatgtatggatgttattggcatttttaagtgtttagagttttttggggtttggggtggttttttttccttgttttccttttttccttttaattggatgcactgacctggcccaggaaatgaagagattctcttttgatgctattaccaatgttatcataaagtgacagtcacctgtaacaaaaaggtggcaccagacatgatcactgatgttttatttgcacatcaatatttttatttttgtattctggctcagctgcttctctgagtggagttaaggaatgagccacaaagatttttgtagtaggtatattggcattgcattttatattcctctatatttaattttgaaaacctaaaagaaggattgtgcatcttgagagaaagttgagcaaattgtgatctagcggaatgttaatttgtgctgcttcttgtgcacgatagcagcagtagtatctctcttggaaataaacatcccatattatgatgtctatgaatataggtttccttttcttccttccctccctccttcccccacctttctcttttttttttctctctcagcttctcttttcctccttccctcttcccttcctctttctttactttttttgaaatcacttattgtaaataagttgtaatccaaacctcatgtatcaatggggaattttcaaatataaatattaccaatgcattttctggttgttgtctgatttttgattgaagtataatgagaatgacatgtctgttgcttttggtttgaggacttcgctttagcttcataaatcttttggtattttagtatttcattgttttagcaggagagggcagcaaaagttcattttccctgttagtaatgctgtggttcatgatcggttttaaatttagctgtgtgtgtgtttttttaaacagcatctctttgtgagtagaggtaaaaatgaaacatttttgatatgaaaagttgcatatgaaaattatagactggttcaaccagacagtgaagacttctgatccacatcaaacttaaaatgccacaaaacaatcttccacctctggctaaaacatgctacttccttttcaaacaccacaaaatacaagctgagtcttaaacacttggaatttaaaatgtttttctttggaaatgatttgctttcttcaaagtggtaacagaaacaaaaatgaaggtgctccccaaaaagaaatgtaaccttcccctttcacagatgtgtgagaggttctgtactgtgggtgcatcataataaagaagcagtgaagagttttcaggt

SEQ ID NO: 171214 - DNA, 3478 bp, Homo sapiens
  Payload ID: 13685
  Gene Symbol: PPP2R5E
  Gene Name: protein phosphatase 2, regulatory subunit B', epsilon isoform
  Uniprot ID: Q16537
  ENST ID: ENST00000422769
  CDS Start-End: 186-1361
aagcatttgtgtgcatagtggctccaaagaggtgtgtgaggtgtgcgaggagggaagagcacacacttggtaatgaaggcctgagagctgcaggggctggaagagaacactcgtacgttccatcctcagagcagcctgaactgttcctaaagaaacttcagcagtgctgtgtcatttttgacttcatggacacgctatctgatcttaaaatgaaagaatacaagcgctccactcttaatgaactggtggactacattacaataagcagaggctgtttgacagagcagacttaccctgaagtagttagaatggtatcttgcaatatattcagaactctccctcctagtgacagcaatgaatttgatccagaagaagatgaacctacccttgaggcatcgtggccacacttacagcttgtatatgaatttttcatacgatttttggaaagccaagaattccaacccagcattgccaaaaaatatatagatcagaaatttgtattacagcttctggagctatttgacagcgaagaccctcgggaacgggactacttaaaaacagtcttacacagaatttatggcaagtttcttggtcttagagcatttatccgaaaacagattaacaatatttttctaaggtttgtttatgaaacagaacacttcaatggtgtagctgaactgctggaaatattaggaagtattatcaatggctttgctttacctcttaaggcagaacacaaacagtttctggtgaaagtattgatccctttacacactgtcaggagcttatcactcttccatgcacagctggcatattgtatagtacagtttctggagaaagatccttcactcacagaaccagttattagggggttaatgaaattttggcctaaaacatgtagtcaaaaagaggtcatgttccttggggaactggaagaaatattggatgtgattgaaccttcacaatttgttaaaatccaagaacctttgtttaaacaaatcgccaagtgtgtatctagcccccattttcaggtggcagaaagagcactctattattggaataatgaatacatcatgagtttgatagaagaaaactctaacgtcatccttcccatcatgttttccagcctttataggatttcaaaagaacattggaatccggctattgtggcgttggtgtacaatgtgttgaaggcatttatggaaatgaacagcaccatgtttgacgagctgacagccacatacaagtcagatcgtcagcgtgagaaaaagaaagaaaaggagcgtgaagaattgtggaaaaaattggaggatctggagttaaagagaggtcttagacgtgatggaataattccaacttaacaaaaacaatgacaacaacattactaacctgtggagtcacacgtttatgtagtagaagatggagcaacagttttctgtattgtgcaactttacagtagatttcacctttgtttcattattacagcagcactgtatatacctgtctctaagtaaaggaaaaaacaaaataaggacttcaatccaaagtttggacagtagatggacttctcagaactttgcaaacataatcattgttctcaccctcttttaaaaaaaaaaatcggtcttcaaagatctgttgatgaaattgctatgttaaaattccattatcgggagttccttatttatcactagcagagagtatgatacaattttcaaatgtgaacaatcttaaatttagcttgtctttctgctaagctgttaaatgtatttatagtaaaggaagaaaaaaagactgtcatttccttataagtttgtgtaacatcctcctctggataacttgactgtaatttaacatctttttcttttgcacatcttcctgagttgaatgtccacgtggaatggggtcatgaattataaaagtccctgataaaagttttgtttactggggtgaacatctttccagtaaccaggtagtcctggtactcctttagttttaaaattaggagttaagagagaagaggtgataaacatagtagggaagggaatatcggattcatgcatcagtttatggtgaatccaaatcaatgtcttgaatcctttgaaaacaggcactgggacatcacaggcttcagtacctgaccagtattagttgcatatatcattgaacacacataccagagatgttttagaaatgtgagaaaaacatccttttggaccatttgaaataagaaagacaaacactaaacaatacaaccatgaaattgatcaccgggattgcaaatctaattgggaaaagagttgagcaaacagcttggactgtttggagttgttgccttactttttaatatgtatttataaagtattccagcaaaagaggatgtagcctctgggaaaaaacaaacatgttacagtgttttttgtagattctcgttctatatctcatcacagcgccagccctgtttttagccggaaaggattcaggataaacattattatgcattctgaattggatgcatattcctaactactgtatttgttaccaaaagtggttctacaaatgctactgaaaaaaatctggaaattcctaatgtcctgagtattaataataaagtttaaaaatgcttttatatcaaaggtgcatcgtgaccaaattgtttaagaaaaaaaaacaaaaaaaacaaaatctagggctgtattttatatatatatatatatatatatatatatatatatcttattggctctctgctttgtatttaaatgaagaatcttacatcttgggtaggtaaactgctgataaaatttgtgtacagtatgtacttacctaatgcagttgcattattacgtactgaaagatatgtgtttggaggtttatttccaggatgcatttgcttgttttggtcatggcagcagtgagttggtaatcctaaaccatcacttccagcagtattcatggtatagagctgatctgtgttcatatgttgaattgtgatagtagcaaacatgaacatatgaactattgttgctcttaatagaaatacaatataaatatgggcttgtatattttcttccttacatttaaatataaagtagaatacgcagttttattattttcaagaaaaagaaagagaagctgctgacctttctcccccataaagtttttcaggatgatcaggtcacagtgtgtacgtaagagtcagctaattatggatattgtcatctcggtaactttgtaaaaaaacaaacaaaactggcattgttaattccaaaaagaaaaaaaaaagcagtaaaaaaaaaaagtcatatgcaacaccagacgcaacatggtttaatggaattaatagtttttttttttttttttttaaagaacattgatggggattcactgtaaagttggcagaggctgccaaagacgaaacaactgactttaaaaatgctggaacaatgtgataaaaaataaatttgtaacaaatctt

SEQ ID NO: 171215 - DNA, 2164 bp, Homo sapiens
  Payload ID: 13685
  Gene Symbol: PPP2R5E
  Gene Name: protein phosphatase 2, regulatory subunit B', epsilon isoform
  Uniprot ID: Q16537
  ENST ID: ENST00000555899
  CDS Start-End: 528-1916
attgactgggacccaccgcgggtagcgaaaggtggctctggcagcggcggctccagctcctgcggctcctcctccttattctgtccccttctcttgctgccgctgcagatccagtcttcctccctcccttccccccctccccacgtcgtcgccgccgccgccgggtccggggcaacgagctgaggcgccgcccgccaggaatgtgagcgaggagccaccggcggagccgcaacggggtcggtgccgatttgatgggacgggcccgcgggggaggatcgtgaggccgccgccgccaccggaacgctgaggttcgggtccggccgtgaggcctagaggctccgccgccgcggaaccggagggaccccgtaccggacagccgtcgccccaggctccccgcagctgcccggacctccccctgcacgtcccggtcccgccgcccgcccccgctgcggccacctcgcccgtctcccgcccctccaagccacagatcatctttggattcttccccagaagcttcaagtagggatatgtcctcagcaccaactactcctccatcagtggataaagtagacggattttctcggaagtccgtcagaaaagccagacagaagaggtcgcaaagttcctcacagtttaggtctcaaggcaagcctattgagttaacacctctgccgctgctaaaagacgttccatcctcagagcagcctgaactgttcctaaagaaacttcagcagtgctgtgtcatttttgacttcatggacacgctatctgatcttaaaatgaaagaatacaagcgctccactcttaatgaactggtggactacattacaataagcagaggctgtttgacagagcagacttaccctgaagtagttagaatggtatcttgcaatatattcagaactctccctcctagtgacagcaatgaatttgatccagaagaagatgaacctacccttgaggcatcgtggccacacttacagcttgtatatgaatttttcatacgatttttggaaagccaagaattccaacccagcattgccaaaaaatatatagatcagaaatttgtattacagcttctggagctatttgacagcgaagaccctcgggaacgggactacttaaaaacagtcttacacagaatttatggcaagtttcttggtcttagagcatttatccgaaaacagattaacaatatttttctaaggtttgtttatgaaacagaacacttcaatggtgtagctgaactgctggaaatattaggaagtattatcaatggctttgctttacctcttaaggcagaacacaaacagtttctggtgaaagtattgatccctttacacactgtcaggagcttatcactcttccatgcacagctggcatattgtatagtacagtttctggagaaagatccttcactcacagaaccagttattagggggttaatgaaattttggcctaaaacatgtagtcaaaaagaggtcatgttccttggggaactggaagaaatattggatgtgattgaaccttcacaatttgttaaaatccaagaacctttgtttaaacaaatcgccaagtgtgtatctagcccccattttcaggtggcagaaagagcactctattattggaataatgaatacatcatgagtttgatagaagaaaactctaacgtcatccttcccatcatgttttccagcctttataggatttcaaaagaacattggaatccggctattgtggcgttggtgtacaatgtgttgaaggcatttatggaaatgaacagcaccatgtttgacgagctgacagccacatacaatgagaaaaagaaagaaaaggagcgtgaagaattgtggaaaaaattggaggatctggagttaaagagaggtcttagacgtgatggaataattccaacttaacaaaaacaatgacaacaacattactaacctgtggagtcacacgtttatgtagtagaagatggagcaacagttttctgtattgtgcaactttacagtagatttcacctttgtttcattattacagcagcactgtatatacctgtctctaagtaaaggaaaaaacaaaataaggacttcaatccaaagtttggacagtagatggacttctcagaactttgcaaacataatcattgttctcaccctctttt

SEQ ID NO: 171216 - DNA, 4092 bp, Homo sapiens
  Payload ID: 13686
  Gene Symbol: PPP2R2C
  Gene Name: protein phosphatase 2, regulatory subunit B, gamma
  Uniprot ID: Q9Y2T4
  ENST ID: ENST00000335585
  CDS Start-End: 25-1368
acatgcaaaaagtggggcctggagatggggctgtcttttttctccaaacacttgcccatccaggaaggccagccctgggcattgaagactccagctgacatcatctctaccgttgagttcaaccacacgggagagctgctggccacaggtgacaagggcggccgggtcgtcatcttccagcgggaaccagagagtaaaaatgcgccccacagccagggcgaatacgacgtgtacagcactttccagagccacgagccggagtttgactatctcaagagcctggagatagaggagaagatcaacaagatcaagtggctcccacagcagaacgccgcccactcactcctgtccaccaacgataaaactatcaaattatggaagattaccgaacgagataaaaggcccgaaggatacaacctgaaggatgaagaggggaaacttaaggacctgtccacggtgacgtcactgcaggtgccagtgctgaagcccatggatctgatggtggaggtgagccctcggaggatctttgccaatggccacacctaccacatcaactccatctccgtcaacagtgactgcgagacctacatgtcggcggatgacctgcgcatcaacctctggcacctggccatcaccgacaggagcttcaacatcgtggacatcaagccggccaacatggaggaccttacggaggtgatcacagcatctgagttccatccgcaccactgcaacctcttcgtctacagcagcagcaagggctccctgcggctctgcgacatgcgggcagctgccctgtgtgacaagcattccaagctctttgaagagcctgaggaccccagtaaccgctcattcttctcggaaatcatctcctccgtgtccgacgtgaagttcagccacagcggccgctacatgctcacccgggactaccttacagtcaaggtctgggacctgaacatggaggcaagacccatagagacctaccaggtccatgactaccttcggagcaagctctgttccctgtacgagaacgactgcattttcgacaagtttgaatgtgcctggaacgggagcgacagcgtcatcatgaccggggcctacaacaacttcttccgcatgttcgatcggaacaccaagcgggacgtgaccctggaggcctcgagggaaagcagcaagccccgggctgtgctcaagccacggcgcgtgtgcgtggggggcaagcgccggcgtgatgacatcagtgtggacagcttggacttcaccaagaagatcctgcacacggcctggcacccggctgagaacatcattgccatcgccgccaccaacaacctgtacatcttccaggacaaggtaaactctgacatgcactaggtatgtgcagttcccggcccctgccacccagcctcatgcaagtcatccccgacatgaccttcacgaccgcaatgcaaggaggggaagaaagtcacagcactgatgaggacagctgcagaggtggcagtgtgtggacacaggaagtttgggccccctccctgccccagctttcctaggccagaattgtgtttggcagtaattgtctgtttaaaaaaataaaaaggaaaggaagcgttcaccgccacaaatcataaaatggacatgactgtggagtcttacagttcagggttctttcattcacgtcccttcctgtctcggtctgcggtctttaccacatcaataggactttttatgcgtccgggttaatttttcactccagtgcgtcctgttgcagggaccggagctgatgggagctgcttctcccccatgcctcactggtcccagatcagggctccagggacagatgatgagtctcaaacgagccagccaggggttcttttggttataaatggggcaattcgccctgtctcagagctgatgacctcaccgttgttttttggatggtgaattcatgctgagaatttgcagatgcaagctcctctcctaggtcttctgaatgtcttgaaacatcccaggtcccaggtctggtgcggtttcccgagaggagcggagtggggtttgtcttctgtgtgcctgtgtcctcatctgattcacctgccatttgctgagcctctgctgtgtaccaggcgtggtgctcagccctagaggcagttgacttaccctctgcagccctccctgccgcctcacccttcagcattcactgggcaccttcccggagcggacactgactcccatgcacgattttttggaatcttcctcctgactgtgaggtgggtgttcattcatttcctccataaacaccaacttctcgaagcgtgccaggctctgggctggatgctggggataagcgggaacccttaggatcccctctgtccacgagaagaagctgaggctctgagcggatgcacaggtcacccatggcaggtgccgtgcagtggtgtcaggaacccgtccgggtcttcacacaaggttctctccagtccatctcgtgggcggctcatgttagagcgacattcaaatggaaggtttggaaaggaatgcctctgtcttgtgaagtaggacatggcagacttggcgacgacaagggtccaggagaactgagacgcaggatggaagacagagaagaccccccggagctcctcgctctgcttggtggcttcaggagtgtggccctccccaggactccacttcatcctgggcttgcaccctccttgagccaatgcactgaactgcctttgaaaggaaattgcatgttctgaccattttaggatacctttactttaaggaccacacagtcccagaggacacatccctcgggaactctgcccctctgacaatgagggccacagagaaggtggtgtttccatggtagatgctcctgttctggtgataccaaacctgcccacccctctgagtcgtctttgctcatggacttgcagcagagccacgtagtttggcattttgattcagaaagtggggagcagagacccagccaaatccaaactttttttttggttttgttttgttttgttttttacaagatataacataacccaggaaacagacccagctgaggttattctcagtggattacagtatacttttgtgtgtgtaaaagcacaaagtgcatgtgtactcacttctggccatataacatttacacagggaaatggatcattgatttttttttaatcaacgtgaatgaagaatgtttgtttatatatcactataaaatccagttgacctggacagtattatatgtacatatctattctaattaaatttaacaatcaaaggattggattacttttttcccccttgtaaagaggttcgagaatgtggtcaattgtatagatagcgtgttaaagccaaaacccagctctgagggccttacccattacttggatatttgctacgatccatctccctttgtgagtcaaatgttaagagaagaaacttgtatttgcagctagaggttactgtcacatcatagatttaacatttaccatcttcaaagtacaaatcttacatgtccttcaaaaggaggtcttaatacagttcctagttccttacttctgttttaaactttgggtaccaaaccaaaaagaagaaaaaagaaaggaaaagatcttctttgaagaaaagtatgtctctggatccctggaaaataatgatgtccaaagcaaattgtgaagatcaaatgtgtgttaagaaaaggtgtcgaggggagggacaaaaccagaaacggtggaaggaccagtgtaatagtcacagacttgcatcctggctctgcttacatttcctggtactctcgaatgtacgggcgttcacatagtcattgtgaagttgttggggtttttttggttttgtttttaatttagctcttctctgaggacgaagctgttggtggtggtggtggtgggggtggtggtgtgggatacatggtggtcaagttgtcagccctgatcagtttggactctgtaactcataggtgcattctttttttctttggtgtctcacaaattacccaattgttgaataaaactataaatatgttaataccagctttttccaataaaataacaaatgttacatcaaaaacga

SEQ ID NO: 171217 - DNA, 1807 bp, Homo sapiens
  Payload ID: 13686
  Gene Symbol: PPP2R2C
  Gene Name: protein phosphatase 2, regulatory subunit B, gamma
  Uniprot ID: Q9Y2T4
  ENST ID: ENST00000382599
  CDS Start-End: 218-1561
gcggccgccgcccgcccaccgcgcgctcgcttgaccgcggcgcccgcccccggccgcccccgcccgtccccctgccgcgatgccctcccttcggggccccggcggcccgcgcccctgctaggctgcggcggcatggcccgcgcgcccggcgcgacctctgcggattgcatcggtgtgtggcggcggggcatgcccagagcaccgggcacggccttcaatgggcgaggacacggacacgcggaaaattaaccacagcttcctgcgggaccacagctatgtgactgaagctgacatcatctctaccgttgagttcaaccacacgggagagctgctggccacaggtgacaagggcggccgggtcgtcatcttccagcgggaaccagagagtaaaaatgcgccccacagccagggcgaatacgacgtgtacagcactttccagagccacgagccggagtttgactatctcaagagcctggagatagaggagaagatcaacaagatcaagtggctcccacagcagaacgccgcccactcactcctgtccaccaacgataaaactatcaaattatggaagattaccgaacgagataaaaggcccgaaggatacaacctgaaggatgaagaggggaaacttaaggacctgtccacggtgacgtcactgcaggtgccagtgctgaagcccatggatctgatggtggaggtgagccctcggaggatctttgccaatggccacacctaccacatcaactccatctccgtcaacagtgactgcgagacctacatgtcggcggatgacctgcgcatcaacctctggcacctggccatcaccgacaggagcttcaacatcgtggacatcaagccggccaacatggaggaccttacggaggtgatcacagcatctgagttccatccgcaccactgcaacctcttcgtctacagcagcagcaagggctccctgcggctctgcgacatgcgggcagctgccctgtgtgacaagcattccaagctctttgaagagcctgaggaccccagtaaccgctcattcttctcggaaatcatctcctccgtgtccgacgtgaagttcagccacagcggccgctacatgctcacccgggactaccttacagtcaaggtctgggacctgaacatggaggcaagacccatagagacctaccaggtccatgactaccttcggagcaagctctgttccctgtacgagaacgactgcattttcgacaagtttgaatgtgcctggaacgggagcgacagcgtcatcatgaccggggcctacaacaacttcttccgcatgttcgatcggaacaccaagcgggacgtgaccctggaggcctcgagggaaagcagcaagccccgggctgtgctcaagccacggcgcgtgtgcgtggggggcaagcgccggcgtgatgacatcagtgtggacagcttggacttcaccaagaagatcctgcacacggcctggcacccggctgagaacatcattgccatcgccgccaccaacaacctgtacatcttccaggacaaggtaaactctgacatgcactaggtatgtgcagttcccggcccctgccacccagcctcatgcaagtcatccccgacatgaccttcacgaccgcaatgcaaggaggggaagaaagtcacagcactgatgaggacagctgcagaggtggcagtgtgtggacacaggaagtttgggccccctccctgccccagctttcctaggccagaattgtgtttggcagtaattgtctgtttaaaaaaataaaaaggaaaggaagcgttcaccgccaca

SEQ ID NO: 171218 - DNA, 1832 bp, Homo sapiens
  Payload ID: 13686
  Gene Symbol: PPP2R2C
  Gene Name: protein phosphatase 2, regulatory subunit B, gamma
  Uniprot ID: Q9Y2T4
  ENST ID: ENST00000515571
  CDS Start-End: 284-1576
atgtgttttgggggaaacagagagaaaggtgtggcctctccacttctgtggacaccccaaataggaagaagggtgcacacaaagcaccgcttcctccacgaagccctcctcaggcacatcgaggagaaccagctgcccaagctcttggctgctgcccttctgaggcctgcctgatttgggccacatagatctggttttggccattgactggcaacatggcagtagccaactgcagagccaccagggagcagcctcattctgattgagtataacgaagacgctgatgggaaagagagacacggctgacatcatctctaccgttgagttcaaccacacgggagagctgctggccacaggtgacaagggcggccgggtcgtcatcttccagcgggaaccagagagtaaaaatgcgccccacagccagggcgaatacgacgtgtacagcactttccagagccacgagccggagtttgactatctcaagagcctggagatagaggagaagatcaacaagatcaagtggctcccacagcagaacgccgcccactcactcctgtccaccaacgataaaactatcaaattatggaagattaccgaacgagataaaaggcccgaaggatacaacctgaaggatgaagaggggaaacttaaggacctgtccacggtgacgtcactgcaggtgccagtgctgaagcccatggatctgatggtggaggtgagccctcggaggatctttgccaatggccacacctaccacatcaactccatctccgtcaacagtgactgcgagacctacatgtcggcggatgacctgcgcatcaacctctggcacctggccatcaccgacaggagcttcaacatcgtggacatcaagccggccaacatggaggaccttacggaggtgatcacagcatctgagttccatccgcaccactgcaacctcttcgtctacagcagcagcaagggctccctgcggctctgcgacatgcgggcagctgccctgtgtgacaagcattccaagctctttgaagagcctgaggaccccagtaaccgctcattcttctcggaaatcatctcctccgtgtccgacgtgaagttcagccacagcggccgctacatgctcacccgggactaccttacagtcaaggtctgggacctgaacatggaggcaagacccatagagacctaccaggtccatgactaccttcggagcaagctctgttccctgtacgagaacgactgcattttcgacaagtttgaatgtgcctggaacgggagcgacagcgtcatcatgaccggggcctacaacaacttcttccgcatgttcgatcggaacaccaagcgggacgtgaccctggaggcctcgagggaaagcagcaagccccgggctgtgctcaagccacggcgcgtgtgcgtggggggcaagcgccggcgtgatgacatcagtgtggacagcttggacttcaccaagaagatcctgcacacggcctggcacccggctgagaacatcattgccatcgccgccaccaacaacctgtacatcttccaggacaaggtaaactctgacatgcactaggtatgtgcagttcccggcccctgccacccagcctcatgcaagtcatccccgacatgaccttcacgaccgcaatgcaaggaggggaagaaagtcacagcactgatgaggacagctgcagaggtggcagtgtgtggacacaggaagtttgggccccctccctgccccagctttcctaggccagaattgtgtttggcagtaattgtctgtttaaaaaaataaaaaggaaaggaagcgttcaccgccacaaatcataaaa

SEQ ID NO: 171219 - DNA, 1780 bp, Homo sapiens
  Payload ID: 13686
  Gene Symbol: PPP2R2C
  Gene Name: protein phosphatase 2, regulatory subunit B, gamma
  Uniprot ID: Q9Y2T4
  ENST ID: ENST00000506140
  CDS Start-End: 100-1422
gtgccagctcaatggggccgccgacctcgaagtttccgaagaagtaaaatagaaagaagaccttttttgaaatgacctgtgttagtcacctctctcaggatgcgtgaggcggacacgttgaggccacctcagctgatggaagtttccgctgacatcatctctaccgttgagttcaaccacacgggagagctgctggccacaggtgacaagggcggccgggtcgtcatcttccagcgggaaccagagagtaaaaatgcgccccacagccagggcgaatacgacgtgtacagcactttccagagccacgagccggagtttgactatctcaagagcctggagatagaggagaagatcaacaagatcaagtggctcccacagcagaacgccgcccactcactcctgtccaccaacgataaaactatcaaattatggaagattaccgaacgagataaaaggcccgaaggatacaacctgaaggatgaagaggggaaacttaaggacctgtccacggtgacgtcactgcaggtgccagtgctgaagcccatggatctgatggtggaggtgagccctcggaggatctttgccaatggccacacctaccacatcaactccatctccgtcaacagtgactgcgagacctacatgtcggcggatgacctgcgcatcaacctctggcacctggccatcaccgacaggagcttcaacatcgtggacatcaagccggccaacatggaggaccttacggaggtgatcacagcatctgagttccatccgcaccactgcaacctcttcgtctacagcagcagcaagggctccctgcggctctgcgacatgcgggcagctgccctgtgtgacaagcattccaagctctttgaagagcctgaggaccccagtaaccgctcattcttctcggaaatcatctcctccgtgtccgacgtgaagttcagccacagcggccgctacatgctcacccgggactaccttacagtcaaggtctgggacctgaacatggaggcaagacccatagagacctaccaggtccatgactaccttcggagcaagctctgttccctgtacgagaacgactgcattttcgacaagtttgaatgtgcctggaacgggagcgacagcgtcatcatgaccggggcctacaacaacttcttccgcatgttcgatcggaacaccaagcgggacgtgaccctggaggcctcgagggaaagcagcaagccccgggctgtgctcaagccacggcgcgtgtgcgtggggggcaagcgccggcgtgatgacatcagtgtggacagcttggacttcaccaagaagatcctgcacacggcctggcacccggctgagaacatcattgccatcgccgccaccaacaacctgtacatcttccaggacaaggtaaactctgacatgcactaggtatgtgcagttcccggcccctgccacccagcctcatgcaagtcatccccgacatgaccttcacgaccgcaatgcaaggaggggaagaaagtcacagcactgatgaggacagctgcagaggtggcagtgtgtggacacaggaagtttgggccccctccctgccccagctttcctaggccagaattgtgtttggcagtaattgtctgtttaaaaaaataaaaaggaaaggaagcgttcaccgccacaaatcataaaatggacatgactgtggagtcttacagttcagggttctttcattcacgtcccttcctgtctcggtctgcggtctttaccacatcaataggactttttatgcgtc

SEQ ID NO: 171220 - DNA, 533 bp, Homo sapiens
  Payload ID: 13686
  Gene Symbol: PPP2R2C
  Gene Name: protein phosphatase 2, regulatory subunit B, gamma
  ENST ID: ENST00000509917
  CDS Start-End: 22-150
tgcaaaaagtggggcctggagatggggctgtcttttttctccaaacacttgcccatccaggaaggccagccctgggcattgaagactccagctgacatcatctctaccgttgagttcaaccacacgggagagctgctggccacagagtaaaaatgcgccccacagccagggcgaatacgacgtgtacagcactttccagagccacgagccggagtttgactatctcaagagcctggagatagaggagaagatcaacaagatcaagtggctcccacagcagaacgccgcccactcactcctgtccaccaacgataaaactatcaaattatggaagattaccgaacgagataaaaggcccgaaggatacaacctgaaggatgaagaggggaaacttaaggacctgtccacggtgacgtcactgcaggtgccagtgctgaagcccatggatctgatggtggaggtgagccctcggaggatctttgccaatggccacacctaccacatcaactccatctccgtcaacagtgactgcg

SEQ ID NO: 171221 - DNA, 1667 bp, Homo sapiens
  Payload ID: 13686
  Gene Symbol: PPP2R2C
  Gene Name: protein phosphatase 2, regulatory subunit B, gamma
  Uniprot ID: Q9Y2T4
  ENST ID: ENST00000507294
  CDS Start-End: 204-1526
atcattcaaaggattcctgcggtggtgcagagctgcggcaaagggccctcgcccgtggggttcactctcatcacccagaagcagggagaagggcctgcggctgcaggcctggctgccacaccggcctccagacaacacacagcagaagtaaaatagaaagaagaccttttttgaaatgacctgtgttagtcacctctctcaggatgcgtgaggcggacacgttgaggccacctcagctgatggaagtttccgctgacatcatctctaccgttgagttcaaccacacgggagagctgctggccacaggtgacaagggcggccgggtcgtcatcttccagcgggaaccagagagtaaaaatgcgccccacagccagggcgaatacgacgtgtacagcactttccagagccacgagccggagtttgactatctcaagagcctggagatagaggagaagatcaacaagatcaagtggctcccacagcagaacgccgcccactcactcctgtccaccaacgataaaactatcaaattatggaagattaccgaacgagataaaaggcccgaaggatacaacctgaaggatgaagaggggaaacttaaggacctgtccacggtgacgtcactgcaggtgccagtgctgaagcccatggatctgatggtggaggtgagccctcggaggatctttgccaatggccacacctaccacatcaactccatctccgtcaacagtgactgcgagacctacatgtcggcggatgacctgcgcatcaacctctggcacctggccatcaccgacaggagcttcaacatcgtggacatcaagccggccaacatggaggaccttacggaggtgatcacagcatctgagttccatccgcaccactgcaacctcttcgtctacagcagcagcaagggctccctgcggctctgcgacatgcgggcagctgccctgtgtgacaagcattccaagctctttgaagagcctgaggaccccagtaaccgctcattcttctcggaaatcatctcctccgtgtccgacgtgaagttcagccacagcggccgctacatgctcacccgggactaccttacagtcaaggtctgggacctgaacatggaggcaagacccatagagacctaccaggtccatgactaccttcggagcaagctctgttccctgtacgagaacgactgcattttcgacaagtttgaatgtgcctggaacgggagcgacagcgtcatcatgaccggggcctacaacaacttcttccgcatgttcgatcggaacaccaagcgggacgtgaccctggaggcctcgagggaaagcagcaagccccgggctgtgctcaagccacggcgcgtgtgcgtggggggcaagcgccggcgtgatgacatcagtgtggacagcttggacttcaccaagaagatcctgcacacggcctggcacccggctgagaacatcattgccatcgccgccaccaacaacctgtacatcttccaggacaaggtaaactctgacatgcactaggtatgtgcagttcccggcccctgccacccagcctcatgcaagtcatccccgacatgaccttcacgaccgcaatgcaaggaggggaagaaagtcacagcactgatgaggacagctgcagaggtggcagtgtgtggacacagg

SEQ ID NO: 171222 - DNA, 3845 bp, Homo sapiens
  Payload ID: 13687
  Gene Symbol: PPP2R5C
  Gene Name: protein phosphatase 2, regulatory subunit B', gamma
  Uniprot ID: Q13362
  ENST ID: ENST00000350249
  CDS Start-End: 141-1598
agcttcatgcctgctgacatcacgaaccagccagttccctccagctgcagagagcttcagtttgtctttttttttttaaactaaaatggaggctggtttcttgccttaaggagcccattgcctttcccgctgaagtctagatgttgacatgtaataaagcgggcagcaggatggtggtggatgcggccaactccaatgggcctttccagcccgtggtccttctccatattcgagatgttcctcctgctgatcaagagaagctttttatccagaagttacgtcagtgttgcgtcctctttgactttgtttctgatccactaagtgacctaaagtggaaggaagtaaaacgagctgctttaagtgaaatggtagaatatatcacccataatcggaatgtgatcacagagcctatttacccagaagtagtccatatgtttgcagttaacatgtttcgaacattaccaccttcctccaatcctacgggagcggaatttgacccggaggaagatgaaccaacgttagaagcagcctggcctcatctacagcttgtttatgaatttttcttaagatttttagagtctccagatttccaacctaatatagcgaagaaatatattgatcagaagtttgtattgcagcttttagagctctttgacagtgaagatcctcgggagagagattttcttaaaaccacccttcacagaatctatgggaaattcctaggcttgagagcttacatcagaaaacagataaataatatattttataggtttatttatgaaacagagcatcataatggcatagcagagttactggaaatattgggaagtataattaatggatttgccttaccactaaaagaagagcacaagattttcttattgaaggtgttactacctttgcacaaagtgaaatctctgagtgtctaccatccccagctggcatactgtgtagtgcagtttttagaaaaggacagcaccctcacggaaccagtggtgatggcacttctcaaatactggccaaagactcacagtccaaaagaagtaatgttcttaaacgaattagaagagattttagatgtcattgaaccatcagaatttgtgaagatcatggaacccctcttccggcagttggccaaatgtgtctccagcccacacttccaggtggcagagcgagctctctattactggaataatgaatacatcatgagtttaatcagtgacaacgcagcgaagattctgcccatcatgtttccttccttgtaccgcaactcaaagacccattggaacaagacaatacatggcttgatatacaacgccctgaagctcttcatggagatgaaccaaaagctatttgatgactgtacacaacagttcaaagcagagaaactaaaagagaagctaaaaatgaaagaacgggaagaagcatgggttaaaatagaaaatctagccaaagccaatccccaggcacagaaagatccgaagaaggaccgtcctcttgcacgccgcaagtccgagctgcctcaggacccccacaccaagaaagccttggaagctcactgcagggccgatgagctggcctcccaggacggccgctagcctccggggcgccgcgtcggggccgggcccgccagttcttttccggattctgtagaaaatacatacttcctgtgccataccaatcagttacactcaaagctttcttggaccccgttccgtaggcaataacgtgcgtccgcctcagcgcgagattaggagttcaaacaatggtgacttcccagagcccgctggcagagccgcgggttgacgacggtgtcctcgcagtgtcgccgccaccccagcgtagtccaagtcagactatttcacaaagtcagagcgataggaaagcaccctgcccttcatcttcatgttctcccaaatggaacttaggatcttttaacataggtggttctgtgataacatcagtgttttccaaatcaaaggaacgctttaaaaaataggacctattttttaagactttacagcctttgaaatggtttccacgtgattgttacgccagcagttctcgttttgtttgtttttcaatctcagtgaaatggctctttgctttcgagttctcacgcaacgtactgggcaaatgacaatcctcagccgctggtattttctaaggggtctcttcactttgatgagtgacatgaacaccgtgtctccttctcttgtgtgtacctaaagccatatttccaagtctgtggtactccaggattccaggagtaagcctgtagaagagatttattttaaaagagattgctctgaaatttatcttaaaagagcttgctctgtctaccttgacagaaattggagttttaaaattatgtgttaatatttttatttgcagatttcgtttccgtcaacttaaacattgttgcccttcaacaaggctcttgaattaataaaattatagtctctaagaattccacattttatggaaagttagagcaaaatcattttgagttaagccagttcttagcctaatgcaaactgcagcgcctttaagcataaagtaacacaacagcattgcacggggccggcactgccgctgccttcactgaaggctgcagtgctgttctgagagcttggaggaggcaccagcgaggatgacgtttagtggagctctttctgttgaaaagagctcacgttatcaacaccttgtaaggaaaatacagtgtctgagttttcatcggtcttcacatgctgctatatattccacagagttccttgcatgtactgagcttttgttttagatggaatagcacaaggagaaaaatctttaaacttagtgctttgtctattctttatttctctcagggtggccagtattttgacttatttatcctgcttgaaagctacttgagatgtgtactgctattctaaacacgtgatctagtttctttcatctctggcataagattatataacttaatgttaagtgtcttgaggcataaaagacaaaatgtggcttattttaggatctgttttttcatcgaggtctcgggtatcctttcaaagatagtgagaagcagacactgctccttgtgcagctctggtacctcctgcccactgctgtcacttcaagccactggcaatgcttctgtcctcgtgtcttggaggaaaatcacctggggggaggggacttcttgtggtaagagcaagtgcaggtatgaaatgcgaagattgccccagctaaaagtggacaagtccgctttgtgagatgaatacttcctgagaaacttgacaagtatctctccattttaccattatgaaaactatcattaaaaaaaacagtttagatgccttctccttttgagggaaaaagggtgctttttattgtataaagcagcgtcttatgtattttgatataccattgtttgaacttccgtctttagctgatagattctcaaatatccttgattttggatgttcagtatgtttgtgagagaggtttctgggaagactctctttttgccctcgggaaaaagcaaaatatcaatgtttgggtgactgtgtaaagctcagtgtgtaagaacatctttttgtctaggttttctttctgctctttattgaagacaaacactcaccaaaaagaaaaataaaagttttcagagaaactaattttctttggcaagagtattacttaatattttggcctcctaaagtttccctagttagtactcggactcctgtgctaattgtcagcttacatatcattgtatagagactgtttattctgtaccaaactgatttcaaaagtactacattgaaaataaaccggtgactgtttttcttcat

SEQ ID NO: 171223 - DNA, 4045 bp, Homo sapiens
  Payload ID: 13687
  Gene Symbol: PPP2R5C
  Gene Name: protein phosphatase 2, regulatory subunit B', gamma
  Uniprot ID: Q13362
  ENST ID: ENST00000328724
  CDS Start-End: 10-1632
gctccagccatgccgaataaaaacaagaaggagaaagaatcaccaaaagcagggaagagtggaaaaagttcaaaagaaggacaagacacagtagaatcagagcaaatttccgtcaggaaaaacagccttgttgctgtcccgtctacagtatctgctaaaataaaagtaccagtctctcagcccatagtgaagaaagacaaacggcaaaattcttcaaggtttagcgcaagcaataatagagaacttcaaaaactaccatccttaaaagatgttcctcctgctgatcaagagaagctttttatccagaagttacgtcagtgttgcgtcctctttgactttgtttctgatccactaagtgacctaaagtggaaggaagtaaaacgagctgctttaagtgaaatggtagaatatatcacccataatcggaatgtgatcacagagcctatttacccagaagtagtccatatgtttgcagttaacatgtttcgaacattaccaccttcctccaatcctacgggagcggaatttgacccggaggaagatgaaccaacgttagaagcagcctggcctcatctacagcttgtttatgaatttttcttaagatttttagagtctccagatttccaacctaatatagcgaagaaatatattgatcagaagtttgtattgcagcttttagagctctttgacagtgaagatcctcgggagagagattttcttaaaaccacccttcacagaatctatgggaaattcctaggcttgagagcttacatcagaaaacagataaataatatattttataggtttatttatgaaacagagcatcataatggcatagcagagttactggaaatattgggaagtataattaatggatttgccttaccactaaaagaagagcacaagattttcttattgaaggtgttactacctttgcacaaagtgaaatctctgagtgtctaccatccccagctggcatactgtgtagtgcagtttttagaaaaggacagcaccctcacggaaccagtggtgatggcacttctcaaatactggccaaagactcacagtccaaaagaagtaatgttcttaaacgaattagaagagattttagatgtcattgaaccatcagaatttgtgaagatcatggaacccctcttccggcagttggccaaatgtgtctccagcccacacttccaggtggcagagcgagctctctattactggaataatgaatacatcatgagtttaatcagtgacaacgcagcgaagattctgcccatcatgtttccttccttgtaccgcaactcaaagacccattggaacaagacaatacatggcttgatatacaacgccctgaagctcttcatggagatgaaccaaaagctatttgatgactgtacacaacagttcaaagcagagaaactaaaagagaagctaaaaatgaaagaacgggaagaagcatgggttaaaatagaaaatctagccaaagccaatccccaggcacagaaagatccgaagaaggaccgtcctcttgcacgccgcaagtccgagctgcctcaggacccccacaccaagaaagccttggaagctcactgcagggccgatgagctggcctcccaggacggccgctagcctccggggcgccgcgtcggggccgggcccgccagttcttttccggattctgtagaaaatacatacttcctgtgccataccaatcagttacactcaaagctttcttggaccccgttccgtaggcaataacgtgcgtccgcctcagcgcgagattaggagttcaaacaatggtgacttcccagagcccgctggcagagccgcgggttgacgacggtgtcctcgcagtgtcgccgccaccccagcgtagtccaagtcagactatttcacaaagtcagagcgataggaaagcaccctgcccttcatcttcatgttctcccaaatggaacttaggatcttttaacataggtggttctgtgataacatcagtgttttccaaatcaaaggaacgctttaaaaaataggacctattttttaagactttacagcctttgaaatggtttccacgtgattgttacgccagcagttctcgttttgtttgtttttcaatctcagtgaaatggctctttgctttcgagttctcacgcaacgtactgggcaaatgacaatcctcagccgctggtattttctaaggggtctcttcactttgatgagtgacatgaacaccgtgtctccttctcttgtgtgtacctaaagccatatttccaagtctgtggtactccaggattccaggagtaagcctgtagaagagatttattttaaaagagattgctctgaaatttatcttaaaagagcttgctctgtctaccttgacagaaattggagttttaaaattatgtgttaatatttttatttgcagatttcgtttccgtcaacttaaacattgttgcccttcaacaaggctcttgaattaataaaattatagtctctaagaattccacattttatggaaagttagagcaaaatcattttgagttaagccagttcttagcctaatgcaaactgcagcgcctttaagcataaagtaacacaacagcattgcacggggccggcactgccgctgccttcactgaaggctgcagtgctgttctgagagcttggaggaggcaccagcgaggatgacgtttagtggagctctttctgttgaaaagagctcacgttatcaacaccttgtaaggaaaatacagtgtctgagttttcatcggtcttcacatgctgctatatattccacagagttccttgcatgtactgagcttttgttttagatggaatagcacaaggagaaaaatctttaaacttagtgctttgtctattctttatttctctcagggtggccagtattttgacttatttatcctgcttgaaagctacttgagatgtgtactgctattctaaacacgtgatctagtttctttcatctctggcataagattatataacttaatgttaagtgtcttgaggcataaaagacaaaatgtggcttattttaggatctgttttttcatcgaggtctcgggtatcctttcaaagatagtgagaagcagacactgctccttgtgcagctctggtacctcctgcccactgctgtcacttcaagccactggcaatgcttctgtcctcgtgtcttggaggaaaatcacctggggggaggggacttcttgtggtaagagcaagtgcaggtatgaaatgcgaagattgccccagctaaaagtggacaagtccgctttgtgagatgaatacttcctgagaaacttgacaagtatctctccattttaccattatgaaaactatcattaaaaaaaacagtttagatgccttctccttttgagggaaaaagggtgctttttattgtataaagcagcgtcttatgtattttgatataccattgtttgaacttccgtctttagctgatagattctcaaatatccttgattttggatgttcagtatgtttgtgagagaggtttctgggaagactctctttttgccctcgggaaaaagcaaaatatcaatgtttgggtgactgtgtaaagctcagtgtgtaagaacatctttttgtctaggttttctttctgctctttattgaagacaaacactcaccaaaaagaaaaataaaagttttcagagaaactaattttctttggcaagagtattacttaatattttggcctcctaaagtttccctagttagtactcggactcctgtgctaattgtcagcttacatatcattgtatagagactgtttattctgtaccaaactgatttcaaaagtactacattgaaaataaaccggtgactgtttttcttcataaagttctgcgtttggcatcttcactctttccaaaatgtatctgtacatcagaaatgtcactattccaagtgtctttttagtgtggctttagtatggcttccttttaatattgtacatacattgtatctttgttttatggtaataagtaataaaaatgtagacttc

SEQ ID NO: 171224 - DNA, 4328 bp, Homo sapiens
  Payload ID: 13687
  Gene Symbol: PPP2R5C
  Gene Name: protein phosphatase 2, regulatory subunit B', gamma
  Uniprot ID: Q13362
  ENST ID: ENST00000334743
  CDS Start-End: 49-1623
ctggtttcttgccttaaggagcccattgcctttcccgctgaagtctagatgttgacatgtaataaagcgggcagcaggatggtggtggatgcggccaactccaatgggcctttccagcccgtggtccttctccatattcgagatgttcctcctgctgatcaagagaagctttttatccagaagttacgtcagtgttgcgtcctctttgactttgtttctgatccactaagtgacctaaagtggaaggaagtaaaacgagctgctttaagtgaaatggtagaatatatcacccataatcggaatgtgatcacagagcctatttacccagaagtagtccatatgtttgcagttaacatgtttcgaacattaccaccttcctccaatcctacgggagcggaatttgacccggaggaagatgaaccaacgttagaagcagcctggcctcatctacagcttgtttatgaatttttcttaagatttttagagtctccagatttccaacctaatatagcgaagaaatatattgatcagaagtttgtattgcagcttttagagctctttgacagtgaagatcctcgggagagagattttcttaaaaccacccttcacagaatctatgggaaattcctaggcttgagagcttacatcagaaaacagataaataatatattttataggtttatttatgaaacagagcatcataatggcatagcagagttactggaaatattgggaagtataattaatggatttgccttaccactaaaagaagagcacaagattttcttattgaaggtgttactacctttgcacaaagtgaaatctctgagtgtctaccatccccagctggcatactgtgtagtgcagtttttagaaaaggacagcaccctcacggaaccagtggtgatggcacttctcaaatactggccaaagactcacagtccaaaagaagtaatgttcttaaacgaattagaagagattttagatgtcattgaaccatcagaatttgtgaagatcatggaacccctcttccggcagttggccaaatgtgtctccagcccacacttccaggtggcagagcgagctctctattactggaataatgaatacatcatgagtttaatcagtgacaacgcagcgaagattctgcccatcatgtttccttccttgtaccgcaactcaaagacccattggaacaagacaatacatggcttgatatacaacgccctgaagctcttcatggagatgaaccaaaagctatttgatgactgtacacaacagttcaaagcagagaaactaaaagagaagctaaaaatgaaagaacgggaagaagcatgggttaaaatagaaaatctagccaaagccaatccccagtacacagtgtatagtcaagccagcaccatgagcattccggttgcaatggagacagatgggcctttatttgaagatgtgcagatgctgagaaagacagtgaaggacgaggctcatcaggcacagaaagatccgaagaaggaccgtcctcttgcacgccgcaagtccgagctgcctcaggacccccacaccaagaaagccttggaagctcactgcagggccgatgagctggcctcccaggacggccgctagcctccggggcgccgcgtcggggccgggcccgccagttcttttccggattctgtagaaaatacatacttcctgtgccataccaatcagttacactcaaagctttcttggaccccgttccgtaggcaataacgtgcgtccgcctcagcgcgagattaggagttcaaacaatggtgacttcccagagcccgctggcagagccgcgggttgacgacggtgtcctcgcagtgtcgccgccaccccagcgtagtccaagtcagactatttcacaaagtcagagcgataggaaagcaccctgcccttcatcttcatgttctcccaaatggaacttaggatcttttaacataggtggttctgtgataacatcagtgttttccaaatcaaaggaacgctttaaaaaataggacctattttttaagactttacagcctttgaaatggtttccacgtgattgttacgccagcagttctcgttttgtttgtttttcaatctcagtgaaatggctctttgctttcgagttctcacgcaacgtactgggcaaatgacaatcctcagccgctggtattttctaaggggtctcttcactttgatgagtgacatgaacaccgtgtctccttctcttgtgtgtacctaaagccatatttccaagtctgtggtactccaggattccaggagtaagcctgtagaagagatttattttaaaagagattgctctgaaatttatcttaaaagagcttgctctgtctaccttgacagaaattggagttttaaaattatgtgttaatatttttatttgcagatttcgtttccgtcaacttaaacattgttgcccttcaacaaggctcttgaattaataaaattatagtctctaagaattccacattttatggaaagttagagcaaaatcattttgagttaagccagttcttagcctaatgcaaactgcagcgcctttaagcataaagtaacacaacagcattgcacggggccggcactgccgctgccttcactgaaggctgcagtgctgttctgagagcttggaggaggcaccagcgaggatgacgtttagtggagctctttctgttgaaaagagctcacgttatcaacaccttgtaaggaaaatacagtgtctgagttttcatcggtcttcacatgctgctatatattccacagagttccttgcatgtactgagcttttgttttagatggaatagcacaaggagaaaaatctttaaacttagtgctttgtctattctttatttctctcagggtggccagtattttgacttatttatcctgcttgaaagctacttgagatgtgtactgctattctaaacacgtgatctagtttctttcatctctggcataagattatataacttaatgttaagtgtcttgaggcataaaagacaaaatgtggcttattttaggatctgttttttcatcgaggtctcgggtatcctttcaaagatagtgagaagcagacactgctccttgtgcagctctggtacctcctgcccactgctgtcacttcaagccactggcaatgcttctgtcctcgtgtcttggaggaaaatcacctggggggaggggacttcttgtggtaagagcaagtgcaggtatgaaatgcgaagattgccccagctaaaagtggacaagtccgctttgtgagatgaatacttcctgagaaacttgacaagtatctctccattttaccattatgaaaactatcattaaaaaaaacagtttagatgccttctccttttgagggaaaaagggtgctttttattgtataaagcagcgtcttatgtattttgatataccattgtttgaacttccgtctttagctgatagattctcaaatatccttgattttggatgttcagtatgtttgtgagagaggtttctgggaagactctctttttgccctcgggaaaaagcaaaatatcaatgtttgggtgactgtgtaaagctcagtgtgtaagaacatctttttgtctaggttttctttctgctctttattgaagacaaacactcaccaaaaagaaaaataaaagttttcagagaaactaattttctttggcaagagtattacttaatattttggcctcctaaagtttccctagttagtactcggactcctgtgctaattgtcagcttacatatcattgtatagagactgtttattctgtaccaaactgatttcaaaagtactacattgaaaataaaccggtgactgtttttcttcataaagttctgcgtttggcatcttcactctttccaaaatgtatctgtacatcagaaatgtcactattccaagtgtctttttagtgtggctttagtatggcttccttttaatattgtacatacattgtatctttgttttatggtaataagtaataaaaatgtagacttcatattttgtacaaaatgtcctatgtacagaataaaaaagttcatagaaacagcaaatataggtaagtggcacaattatttttctttagaaaatatctgtaactttatgcattagtgaaatgttaagtaccgacatattttttaacattttgtaattcaaaactttttgttttgacattgtttatgaagagaaacttcatacacttgccatttaatatgctcttttatctaattttcaaaaactctaaaaaacggtgtatcatatggactaaataaagaacatgtgaatttta

SEQ ID NO: 171225 - DNA, 1526 bp, Homo sapiens
  Payload ID: 13687
  Gene Symbol: PPP2R5C
  Gene Name: protein phosphatase 2, regulatory subunit B', gamma
  Uniprot ID: Q13362
  ENST ID: ENST00000445439
  CDS Start-End: 49-1398
ctggtttcttgccttaaggagcccattgcctttcccgctgaagtctagatgttgacatgtaataaagcgggcagcaggatggtggtggatgcggccaactccaatgggcctttccagcccgtggtccttctccatattcgagatgttcctcctgctgatcaagagaagctttttatccagaagttacgtcagtgttgcgtcctctttgactttgtttctgatccactaagtgacctaaagtggaaggaagtaaaacgagctgctttaagtgaaatggtagaatatatcacccataatcggaatgtgatcacagagcctatttacccagaagtagtccatatgtttgcagttaacatgtttcgaacattaccaccttcctccaatcctacgggagcggaatttgacccggaggaagatgaaccaacgttagaagcagcctggcctcatctacagcttgtttatgaatttttcttaagatttttagagtctccagatttccaacctaatatagcgaagaaatatattgatcagaagtttgtattgcagcttttagagctctttgacagtgaagatcctcgggagagagattttcttaaaaccacccttcacagaatctatgggaaattcctaggcttgagagcttacatcagaaaacagataaataatatattttataggtttatttatgaaacagagcatcataatggcatagcagagttactggaaatattgggaagtataattaatggatttgccttaccactaaaagaagagcacaagattttcttattgaaggtgttactacctttgcacaaagtgaaatctctgagtgtctaccatccccagctggcatactgtgtagtgcagtttttagaaaaggacagcaccctcacggaaccagtggtgatggcacttctcaaatactggccaaagactcacagtccaaaagaagtaatgttcttaaacgaattagaagagattttagatgtcattgaaccatcagaatttgtgaagatcatggaacccctcttccggcagttggccaaatgtgtctccagcccacacttccaggtggcagagcgagctctctattactggaataatgaatacatcatgagtttaatcagtgacaacgcagcgaagattctgcccatcatgtttccttccttgtaccgcaactcaaagacccattggaacaagacaatacatggcttgatatacaacgccctgaagctcttcatggagatgaaccaaaagctatttgatgactgtacacaacagttcaaagcagagaaactaaaagagaagctaaaaatgaaagaacgggaagaagcatgggttaaaatagaaaatctagccaaagccaatccccaggtactaaaaaagagaataacatgaaaacgcccagggttacttgaatgtttttataagataggaatatatgtcttcaccatggggggggtctcgatttcactaacgttgtatatgaaaatgtctgcaataaaaagtacttttaaactttgtaa

SEQ ID NO: 171226 - DNA, 4481 bp, Homo sapiens
  Payload ID: 13687
  Gene Symbol: PPP2R5C
  Gene Name: protein phosphatase 2, regulatory subunit B', gamma
  Uniprot ID: Q13362
  ENST ID: ENST00000422945
  CDS Start-End: 97-1764
gcggccgcgggggcgcgacggccggggcgggggcgctgctgctgcgggggcaggcggcggcaggggcggcggcggcggcggcggcccgctccagccatgccgaataaaaacaagaaggagaaagaatcaccaaaagcagggaagagtggaaaaagttcaaaagaaggacaagacacagtagaatcagagggaacaagtcctgaagaaccctcaagccctaaagtaccacctccacttcttcctgagttgctggttcttatttttggtgggcttcaaggaagagatgttcctcctgctgatcaagagaagctttttatccagaagttacgtcagtgttgcgtcctctttgactttgtttctgatccactaagtgacctaaagtggaaggaagtaaaacgagctgctttaagtgaaatggtagaatatatcacccataatcggaatgtgatcacagagcctatttacccagaagtagtccatatgtttgcagttaacatgtttcgaacattaccaccttcctccaatcctacgggagcggaatttgacccggaggaagatgaaccaacgttagaagcagcctggcctcatctacagcttgtttatgaatttttcttaagatttttagagtctccagatttccaacctaatatagcgaagaaatatattgatcagaagtttgtattgcagcttttagagctctttgacagtgaagatcctcgggagagagattttcttaaaaccacccttcacagaatctatgggaaattcctaggcttgagagcttacatcagaaaacagataaataatatattttataggtttatttatgaaacagagcatcataatggcatagcagagttactggaaatattgggaagtataattaatggatttgccttaccactaaaagaagagcacaagattttcttattgaaggtgttactacctttgcacaaagtgaaatctctgagtgtctaccatccccagctggcatactgtgtagtgcagtttttagaaaaggacagcaccctcacggaaccagtggtgatggcacttctcaaatactggccaaagactcacagtccaaaagaagtaatgttcttaaacgaattagaagagattttagatgtcattgaaccatcagaatttgtgaagatcatggaacccctcttccggcagttggccaaatgtgtctccagcccacacttccaggtggcagagcgagctctctattactggaataatgaatacatcatgagtttaatcagtgacaacgcagcgaagattctgcccatcatgtttccttccttgtaccgcaactcaaagacccattggaacaagacaatacatggcttgatatacaacgccctgaagctcttcatggagatgaaccaaaagctatttgatgactgtacacaacagttcaaagcagagaaactaaaagagaagctaaaaatgaaagaacgggaagaagcatgggttaaaatagaaaatctagccaaagccaatccccagtacacagtgtatagtcaagccagcaccatgagcattccggttgcaatggagacagatgggcctttatttgaagatgtgcagatgctgagaaagacagtgaaggacgaggctcatcaggcacagaaagatccgaagaaggaccgtcctcttgcacgccgcaagtccgagctgcctcaggacccccacaccaagaaagccttggaagctcactgcagggccgatgagctggcctcccaggacggccgctagcctccggggcgccgcgtcggggccgggcccgccagttcttttccggattctgtagaaaatacatacttcctgtgccataccaatcagttacactcaaagctttcttggaccccgttccgtaggcaataacgtgcgtccgcctcagcgcgagattaggagttcaaacaatggtgacttcccagagcccgctggcagagccgcgggttgacgacggtgtcctcgcagtgtcgccgccaccccagcgtagtccaagtcagactatttcacaaagtcagagcgataggaaagcaccctgcccttcatcttcatgttctcccaaatggaacttaggatcttttaacataggtggttctgtgataacatcagtgttttccaaatcaaaggaacgctttaaaaaataggacctattttttaagactttacagcctttgaaatggtttccacgtgattgttacgccagcagttctcgttttgtttgtttttcaatctcagtgaaatggctctttgctttcgagttctcacgcaacgtactgggcaaatgacaatcctcagccgctggtattttctaaggggtctcttcactttgatgagtgacatgaacaccgtgtctccttctcttgtgtgtacctaaagccatatttccaagtctgtggtactccaggattccaggagtaagcctgtagaagagatttattttaaaagagattgctctgaaatttatcttaaaagagcttgctctgtctaccttgacagaaattggagttttaaaattatgtgttaatatttttatttgcagatttcgtttccgtcaacttaaacattgttgcccttcaacaaggctcttgaattaataaaattatagtctctaagaattccacattttatggaaagttagagcaaaatcattttgagttaagccagttcttagcctaatgcaaactgcagcgcctttaagcataaagtaacacaacagcattgcacggggccggcactgccgctgccttcactgaaggctgcagtgctgttctgagagcttggaggaggcaccagcgaggatgacgtttagtggagctctttctgttgaaaagagctcacgttatcaacaccttgtaaggaaaatacagtgtctgagttttcatcggtcttcacatgctgctatatattccacagagttccttgcatgtactgagcttttgttttagatggaatagcacaaggagaaaaatctttaaacttagtgctttgtctattctttatttctctcagggtggccagtattttgacttatttatcctgcttgaaagctacttgagatgtgtactgctattctaaacacgtgatctagtttctttcatctctggcataagattatataacttaatgttaagtgtcttgaggcataaaagacaaaatgtggcttattttaggatctgttttttcatcgaggtctcgggtatcctttcaaagatagtgagaagcagacactgctccttgtgcagctctggtacctcctgcccactgctgtcacttcaagccactggcaatgcttctgtcctcgtgtcttggaggaaaatcacctggggggaggggacttcttgtggtaagagcaagtgcaggtatgaaatgcgaagattgccccagctaaaagtggacaagtccgctttgtgagatgaatacttcctgagaaacttgacaagtatctctccattttaccattatgaaaactatcattaaaaaaaacagtttagatgccttctccttttgagggaaaaagggtgctttttattgtataaagcagcgtcttatgtattttgatataccattgtttgaacttccgtctttagctgatagattctcaaatatccttgattttggatgttcagtatgtttgtgagagaggtttctgggaagactctctttttgccctcgggaaaaagcaaaatatcaatgtttgggtgactgtgtaaagctcagtgtgtaagaacatctttttgtctaggttttctttctgctctttattgaagacaaacactcaccaaaaagaaaaataaaagttttcagagaaactaattttctttggcaagagtattacttaatattttggcctcctaaagtttccctagttagtactcggactcctgtgctaattgtcagcttacatatcattgtatagagactgtttattctgtaccaaactgatttcaaaagtactacattgaaaataaaccggtgactgtttttcttcataaagttctgcgtttggcatcttcactctttccaaaatgtatctgtacatcagaaatgtcactattccaagtgtctttttagtgtggctttagtatggcttccttttaatattgtacatacattgtatctttgttttatggtaataagtaataaaaatgtagacttcatattttgtacaaaatgtcctatgtacagaataaaaaagttcatagaaacagcaaatataggtaagtggcacaattatttttctttagaaaatatctgtaactttatgcattagtgaaatgttaagtaccgacatattttttaacattttgtaattcaaaactttttgttttgacattgtttatgaagagaaacttcatacacttgccatttaatatgctcttttatctaattttcaaaaactctaaaaaacggtgtatcatatggactaaataaagaacatgtgaattttattgctcatcatg

SEQ ID NO: 171227 - DNA, 800 bp, Homo sapiens
  Payload ID: 13687
  Gene Symbol: PPP2R5C
  Gene Name: protein phosphatase 2, regulatory subunit B', gamma
  ENST ID: ENST00000554442
  CDS Start-End: 33-407
ggcggcggcggcggcggcggcccgctccagccatgccgaataaaaacaagaaggagaaagaatcaccaaaagcagggaagagtggaaaaagttcaaaagaaggacaagacacagtagaatcagagcaaatttccgtcaggaaaaacagccttgttgctgtcccgtctacagtatctgctaaaataaaagtaccagtctctcagcccatagtgaagaaagacaaacggcaaaattcttcaaggtttagcgcaagcaataatagagaacttcaaaaactaccatccttaaaagattgcaaatgcacaagattcgagacctatgtatacagagggccaacttttcatacgcacgggttctgcgggccgactgtgggacttgaatatgcgtggatttggttgaggctgtgaagctgggcagggtttcagctgagctgaggttggaagtccctgaccttcagctgtggccgcctacggagcagcagggagagcaaacccatggagaaccccgcggcccccaaagcatggacggagctgccagccttctcccctgcccttcttcctctactcccgacctgccagccttctcccctgcccttctgcctctactcccgacctgccaaccttagcctaaaatcagagctgctagaatcacacacactgtcgtagctggttttgtattgtaaatgagtcattctgttattttggaaacttatgtctcatgccaggatctgcagatagttctttttcaaaatattgtttagacaaaataaatttctttaaatataatatctctactttaaa

SEQ ID NO: 171228 - DNA, 798 bp, Homo sapiens
  Payload ID: 13687
  Gene Symbol: PPP2R5C
  Gene Name: protein phosphatase 2, regulatory subunit B', gamma
  ENST ID: ENST00000557071
  CDS Start-End: 1-137
tatttgatgactgtacacaacagttcaaagcagagaaactaaaagagaagctaaaaatgaaagaacgggaagaagcatgggttaaaatagaaaatctagccaaagccaatccccaggcatgccgtggttctgcataggagctttgacgaactgtgatgctgggagcttagccctgccttgtcctcatgtctgtgttgacgccatctgtgacgcagtccccatgagtctcgtccacatgctctagtcgcatggcacatggtctcctaaacagaaaatacttcatgggtcaatacctcagagctggaaactctggcctcgtacttgcttctcattctcaggagaaaatatctaaattctgatcactgcttcccattacaacagcaacaaaaagtcaataattttgtggataatacagtctggttatttctgtagtgaaaatagttgggttttcaaagtttggttttccatctcagatctgcctgtggagaattggtttgcgggctttgtttttaagtacacagtgtatagtcaagccagcaccatgagcattccggttgcaatggagacagatgggcctttatttgaagatgtgcagatgctgagaaagacagtgaaggacgaggctcatcaggcacagaaagatccgaagaaggaccgtcctcttgcacgccgcaagtccgagctgcctcaggacccccacaccaagaaagccttggaagctcactgcagggccgatgagctggcctcccaggacggccgctagcctccggggcgccgcgtcggggccgggcccgccag

SEQ ID NO: 171229 - DNA, 384 bp, Homo sapiens
  Payload ID: 13687
  Gene Symbol: PPP2R5C
  Gene Name: protein phosphatase 2, regulatory subunit B', gamma
  ENST ID: ENST00000554137
  CDS Start-End: 1-216
tttgcagttaacatgtttcgaacattaccaccttcctccaatcctacgggagcggaatttgacccggaggaagatgaaccaacgttagaagcagcctggcctcatctacagcttgtttatgaatttttcttaagatttttagagtctccagatttccaacctaatatagcgaagaaatatattgatcagaagtttgtattgcaggtttatttatgaaacagagcatcataatggcatagcagagttactggaaatattgggaagtataattaatggatttgccttaccactaaaagaagagcacaagattttcttattgaaggtgttactacctttgcacaaagtgaaatctctgagtgtctaccatccccagctggcatactg

SEQ ID NO: 171230 - DNA, 607 bp, Homo sapiens
  Payload ID: 13687
  Gene Symbol: PPP2R5C
  Gene Name: protein phosphatase 2, regulatory subunit B', gamma
  ENST ID: ENST00000555237
  CDS Start-End: 1-455
gcaactcaaagacccattggaacaagacaatacatggcttgatatacaacgccctgaagctcttcatggagatgaaccaaaagctatttgatgactgtacacaacagttcaaagcagagaaactaaaagagaagctaaaaatgaaagaacgggaagaagcatgggttaaaatagaaaatctagccaaagccaatccccagtacacagtgtatagtcaagccagcaccatgagcattccggttgcaatggagacagatgggcctttatttgaagatgtgcagatgctgagaaagacagtgaaggacgaggctcatcagggtcttgctctgatacccaggctggaatgcagtggcacaatcttggctcactgcagcctcggcctcctggactcaagcaatccgcccacttcagcctcccaagcagcagtgactaccggcaccaccacactcagctgatttttgtatttttagcagagatggagttttaacatgttggctaggctggtctcaaactcctggtctcaagtgatctgcctgccttggcctcccaaagtgctgggattatgggcatgagccaccgcgcccagccaataaacttttcttaagtt

SEQ ID NO: 171231 - DNA, 759 bp, Homo sapiens
  Payload ID: 13687
  Gene Symbol: PPP2R5C
  Gene Name: protein phosphatase 2, regulatory subunit B', gamma
  ENST ID: ENST00000557621
  CDS Start-End: 110-759
cagttccctccagctgcagagagcttcagtttgtctttttttttttaaactaaaatggaggctggtttcttgccttaaggagcccattgcctttcccgctgaagtctagatgttgacatgtaataaagcgggcagcaggatggtggtggatgcggccaactccaatgggcctttccagcccgtggtccttctccatattcgagatgttcctcctgctgatcaagagaagctttttatccagaagttacgtcagtgttgcgtcctctttgactttgtttctgatccactaagtgacctaaagtggaaggaagtaaaacgagctgctttaagtgaaatggtagaatatatcacccataatcggaatgtgatcacagagcctatttacccagaagtagtccatatgtttgcagttaacatgtttcgaacattaccaccttcctccaatcctacgggagcggaatttgacccggaggaagatgaaccaacgttagaagcagcctggcctcatctacagcttttagagctctttgacagtgaagatcctcgggagagagattttcttaaaaccacccttcacagaatctatgggaaattcctaggcttgagagcttacatcagaaaacagataaataatatattttataggtttatttatgaaacagagcatcataatggcatagcagagttactggaaatattgggaagtataattaatggatttgccttaccactaaaagaagagcacaagattttcttatt

SEQ ID NO: 171232 - DNA, 2013 bp, Homo sapiens
  Payload ID: 13687
  Gene Symbol: PPP2R5C
  Gene Name: protein phosphatase 2, regulatory subunit B', gamma
  ENST ID: ENST00000557268
  CDS Start-End: 1-1662
aataaaaacaagaaggagaaagaatcaccaaaagcagggaagagtggaaaaagttcaaaagaaggacaagacacagtagaatcagagggaacaagtcctgaagaaccctcaagccctaaagtaccacctccacttcttcctgagttgctggttcttatttttggtgggcttcaaggaagagatgttcctcctgctgatcaagagaagctttttatccagaagttacgtcagtgttgcgtcctctttgactttgtttctgatccactaagtgacctaaagtggaaggaagtaaaacgagctgctttaagtgaaatggtagaatatatcacccataatcggaatgtgatcacagagcctatttacccagaagtagtccatatgtttgcagttaacatgtttcgaacattaccaccttcctccaatcctacgggagcggaatttgacccggaggaagatgaaccaacgttagaagcagcctggcctcatctacagcttgtttatgaatttttcttaagatttttagagtctccagatttccaacctaatatagcgaagaaatatattgatcagaagtttgtattgcagcttttagagctctttgacagtgaagatcctcgggagagagattttcttaaaaccacccttcacagaatctatgggaaattcctaggcttgagagcttacatcagaaaacagataaataatatattttataggtttatttatgaaacagagcatcataatggcatagcagagttactggaaatattgggaagtataattaatggatttgccttaccactaaaagaagagcacaagattttcttattgaaggtgttactacctttgcacaaagtgaaatctctgagtgtctaccatccccagctggcatactgtgtagtgcagtttttagaaaaggacagcaccctcacggaaccagtggtgatggcacttctcaaatactggccaaagactcacagtccaaaagaagtaatgttcttaaacgaattagaagagattttagatgtcattgaaccatcagaatttgtgaagatcatggaacccctcttccggcagttggccaaatgtgtctccagcccacacttccaggtggcagagcgagctctctattactggaataatgaatacatcatgagtttaatcagtgacaacgcagcgaagattctgcccatcatgtttccttccttgtaccgcaactcaaagacccattggaacaagacaatacatggcttgatatacaacgccctgaagctcttcatggagatgaaccaaaagctatttgatgactgtacacaacagttcaaagcagagaaactaaaagagaagctaaaaatgaaagaacgggaagaagcatgggttaaaatagaaaatctagccaaagccaatccccagtacacagtgtatagtcaagccagcaccatgagcattccggttgcaatggagacagatgggcctttatttgaagatgtgcagatgctgagaaagacagtgaaggacgaggctcatcaggcacagaaagatccgaagaaggaccgtcctcttgcacgccgcaagtccgagctgcctcaggacccccacaccaagaaagccttggaagctcactgcagggccgatgagctggcctcccaggacggccgctagcctccggggcgccgcgtcggggccgggcccgccagttcttttccggattctgtagaaaatacatacttcctgtgccataccaatcagttacactcaaagctttcttggaccccgttccgtaggcaataacgtgcgtccgcctcagcgcgagattaggagttcaaacaatggtgacttcccagagcccgctggcagagccgcgggttgacgacggtgtcctcgcagtgtcgccgccaccccagcgtagtccaagtcagactatttcacaaagtcagagcgataggaaagcaccctgcccttcatcttcatgttctcccaaatggaacttaggatcttttaacataggtggtt

SEQ ID NO: 171233 - DNA, 1307 bp, Homo sapiens
  Payload ID: 13687
  Gene Symbol: PPP2R5C
  Gene Name: protein phosphatase 2, regulatory subunit B', gamma
  ENST ID: ENST00000557095
  CDS Start-End: 39-1193
gccttaaggagcccattgcctttcccgctgaagtctagatgttgacatgtaataaagcgggcagcaggatggtggtggatgcggccaactccaatgggcctttccagcccgtggtccttctccatattcgagatgttcctcctgctgatcaagagaagctttttatccagaagttacgtcagtgttgcgtcctctttgactttgtttctgatccactaagtgacctaaagtggaaggaagtaaaacgagctgctttaagtgaaatggtagaatatatcacccataatcggaatgtgatcacagagcctatttacccagaagtagtccatatgtttgcagttaacatgtttcgaacattaccaccttcctccaatcctacgggagcggaatttgacccggaggaagatgaaccaacgttagaagcagcctggcctcatctacagcttgtttatgaatttttcttaagatttttagagtctccagatttccaacctaatatagcgaagaaatatattgatcagaagtttgtattgcagcttttagagctctttgacagtgaagatcctcgggagagagattttcttaaaaccacccttcacagaatctatgggaaattcctaggcttgagagcttacatcagaaaacagataaataatatattttataggtttatttatgaaacagagcatcataatggcatagcagagttactggaaatattgggaagtataattaatggatttgccttaccactaaaagaagagcacaagattttcttattgaaggtgttactacctttgcacaaagtgaaatctctgagtgtctaccatccccagctggcatactgtgtagtgcagtttttagaaaaggacagcaccctcacggaaccagtggtgatggcacttctcaaatactggccaaagactcacagtccaaaagaagtaatgttcttaaacgaattagaagagattttagatgtcattgaaccatcagaatttgtgaagatcatggaacccctcttccggcagttggccaaatgtgtctccagcccacacttccaggtggcagagcgagctctctattactggaataatgaatacatcatgagtttaatcagtgacaacgcagcgaagattctgcccatcatgtttccttccttgtaccgcaactcaaagacccattggaacaagtaagaaagaactggctgccatctttttcagtcattttaaaatatggcacgttttactgctacttcagtaagaataaatatcagaattttaaatatcaattaaaaaacaagaaggtca

SEQ ID NO: 171234 - DNA, 645 bp, Homo sapiens
  Payload ID: 13687
  Gene Symbol: PPP2R5C
  Gene Name: protein phosphatase 2, regulatory subunit B', gamma
  ENST ID: ENST00000557716
  CDS Start-End: 1-462
aaacagataaataatatattttataggtttatttatgaaacagagcatcataatggcatagcagagttactggaaatattgggaagtataattaatggatttgccttaccactaaaagaagagcacaagattttcttattgaaggtgttactacctttgcacaaagtgaaatctctgagtgtctaccatccccagctggcatactgtgtagtgcagtttttagaaaaggacagcaccctcacggaaccagtggtgatggcacttctcaaatactggccaaagactcacagtccaaaagaagtaatgttcttaaacgaattagaagagattttagatgtcattgaaccatcagaatttgtgaagatcatggaacccctcttccggcagttggccaaatgtgtctccagcccacacttccagagagaagctaaaaatgaaagaacgggaagaagcatgggttaaaatagaaaatctagccaaagccaatccccaggtactaaaaaagagaataacatgaaaacgcccagggttacttgaatgtttttataagataggaatatatgtcttcaccatggggggggtctcgatttcactaacgttgtatatgaaaatgtctgcaataaaaagtacttttaaactttgtaa

SEQ ID NO: 171235 - DNA, 601 bp, Homo sapiens
  Payload ID: 13687
  Gene Symbol: PPP2R5C
  Gene Name: protein phosphatase 2, regulatory subunit B', gamma
  ENST ID: ENST00000556307
  CDS Start-End: 107-247
ttccctccagctgcagagagcttcagtttgtctttttttttttaaactaaaatggaggctggtttcttgccttaaggagcccattgcctttcccgctgaagtctagatgttgacatgtaataaagcgggcagcaggatggtggtggatgcggccaactccaatgggcctttccagcccgtggtccttctccatattcgaggcacagtgcccacttgttccgtggcacagccccagagctcctgttgaaggaacagactccaggactgactttccacttgattttcggagctcgcacatcccgagagattcatgttcaagctgcattttagacatagctggcaagagtattttcgtgatgttcctcctgctgatcaagagaagctttttatccagaagttacgtcagtgttgcgtcctctttgactttgtttctgatccactaagtgacctaaagtggaaggaagtaaaacgagctgctttaagtgaaatggtagaatatatcacccataatcggaatgtgatcacagagcctatttacccagaagtagtccatatgtttgcagttaacatgtttcgaacattaccaccttcctccaatcct

SEQ ID NO: 171236 - DNA, 579 bp, Homo sapiens
  Payload ID: 13687
  Gene Symbol: PPP2R5C
  Gene Name: protein phosphatase 2, regulatory subunit B', gamma
  ENST ID: ENST00000557534
  CDS Start-End: 1-210
caacctaatatagcgaagaaatatattgatcagaagtttgtattgcagcttttagagctctttgacagtgaagatcctcgggagagagattttcttaaaaccacccttcacagaatctatgggaaattcctaggcttgagagcttacatcagaaaacagataaataatatattttatagatgcttgaaattttccaaaataaaatattgagaaaaaaattcgtgcaagaccaagttctctgccctcgaggcatttacagctgcaggccttgaggagtttctttggttcctgaagggctgcttgctcaccacgagcagtgtttgcacaaatagatgcgcttcttgttgcctggctccatggctcctcctagagcattgttttcttattcagtataattaatggatttgccttaccactaaaagaagagcacaagattttcttattgaaggtgttactacctttgcacaaagtgaaatctctgagtgtctaccatccccagctggcatactgtgtagtgcagtttttagaaaaggacagcaccctcacggaaccagtggtgatggcacttctcaaatactg

SEQ ID NO: 171237 - DNA, 536 bp, Homo sapiens
  Payload ID: 13687
  Gene Symbol: PPP2R5C
  Gene Name: protein phosphatase 2, regulatory subunit B', gamma
  ENST ID: ENST00000557714
  CDS Start-End: 75-284
tttttttttttaaactaaaatggaggctggtttcttgccttaaggagcccattgcctttcccgctgaagtctagatgttgacatgtaataaagcgggcagcaggatggtggtggatgcggccaactccaatgggcctttccagcccgtggtccttctccatattcgagattgcaaatgcacaagattcgagacctatgtatacagagggccaacttttcatacgcacgggttctgcgggccgactgtgggacttgaatatgcgtggatttggttgaggctgtgaagctgggcagggtttcagctgagctgaggttggaagtccctgaccttcagctgtggccgcctacggagcagcagggagagcaaacccatggagaaccccgcggcccccaaagcatggacggagctgccagccttctcccctgcccttcttcctctactcccgacctgccagccttctcccctgcccttctgcctctactcccgacctgccaaccttagcctaaaatcagagctgctagaatcacacacactg

SEQ ID NO: 171238 - DNA, 492 bp, Homo sapiens
  Payload ID: 13687
  Gene Symbol: PPP2R5C
  Gene Name: protein phosphatase 2, regulatory subunit B', gamma
  ENST ID: ENST00000553890
  CDS Start-End: 1-439
tggaaaaagttcaaaagaaggacaagacacagtagaatcagagcaaatttccgtcaggaaaaacagccttgttgctgtcccgtctacagtatctgctaaaataaaagtaccagtctctcagcccatagtgaagaaagacaaacggcaaaattcttcaaggtttagcgcaagcaataatagagaacttcaaaaactaccatccttaaaagttgaggctgtgaagctgggcagggtttcagctgagctgaggttggaagtccctgaccttcagctgtggccgcctacggagcagcagggagagcaaacccatggagaaccccgcggcccccaaagcatggacggagctgccagccttctcccctgcccttcttcctctactcccgacctgccagccttctcccctgcccttctgcctctactcccgacctgccaaccttagcctaaaatcagagctgctagaatcacacacactgtcgtagctggttttgtatt

SEQ ID NO: 171239 - DNA, 564 bp, Homo sapiens
  Payload ID: 13687
  Gene Symbol: PPP2R5C
  Gene Name: protein phosphatase 2, regulatory subunit B', gamma
  ENST ID: ENST00000553554
  CDS Start-End: 1-90
gacaaacggcaaaattcttcaaggtttagcgcaagcaataatagagaacttcaaaaactaccatccttaaaaggtccccccacattgtagcacgtgccagaccctcgctcccgtcgaaggctgatgccatccttcagtgatgtgtggacggacacattccgcgtatcccccaatcagtggatggacgcgtgggttgcagagcacgccacacacattcagtcagtacacgagttaacagttgcgtgcttgtctgcctgtgtcatccattcgagcatctgccaaggacccaggaaacacacagtgtgtctcctgaaggaatgaaaagccctcctggcccctctgccctctttctccaccctctccattttcaccgagatggttgtggtgtcacctctcgtggggtggccaaaaccccagccagggccacctatcccttcacctccctccacctcggatttcctcttggaaaatgaggctcctgactcacttgacctactgcgtaggctcctaaaagggtgtcggcaagttggcaagttaaaaaaaaaaacaatcagcatgaaagca

SEQ ID NO: 171240 - DNA, 483 bp, Homo sapiens
  Payload ID: 13687
  Gene Symbol: PPP2R5C
  Gene Name: protein phosphatase 2, regulatory subunit B', gamma
  ENST ID: ENST00000561006
  CDS Start-End: 1-270
ttggccaaatgtgtctccagcccacacttccaggtggcagagcgagctctctattactggaataatgaatacatcatgagtttaatcagtgacaacgcagcgaagattctgcccatcatgtttccttccttgtaccgcaactcaaagacccattggaacaagacaatacatggcttgatatacaacgccctgaagctcttcatggagatgaaccaaaagctatttgatgactgtacacaacagttcaaagcagagaaactaaaaagctaaaaatgaaagaacgggaagaagcatgggttaaaatagaaaatctagccaaagccaatccccaggtactaaaaaagagaataacatgaaaacgcccagggttacttgaatgtttttataagataggaatatatgtcttcaccatggggggggtctcgatttcactaacgttgtatatgaaaatgtctgcaataaaaagtacttttaaactttgta

SEQ ID NO: 171241 - DNA, 2013 bp, Homo sapiens
  Payload ID: 13687
  Gene Symbol: PPP2R5C
  Gene Name: protein phosphatase 2, regulatory subunit B', gamma
  ENST ID: ENST00000556260
  CDS Start-End: 25-231
cggcggcggcggcccgctccagccatgccgaataaaaacaagaaggagaaagaatcaccaaaagcagggaagagtggaaaaagttcaaaagaaggacaagacacagtagaatcagagtgctactgtctaagagctggagctacagagcttgaaattaccactgaaaacactgaaatgttgggcccttcactgcttcctcataaggataccagaggcaacctggcatattaagcttgacacttggcagatcactgtgtaaattgtttttcaggaatacaagttgggacacttctgttcatttgacctttgagttgacccttaaattttattattgttttttttcccctcagtcttcagctcactgcttcacttctagttccacccacttaccaaatatgattgactcatgcaggtgaattaaaccattattgcacactttttccctctcctctctctcagtattactcttaacttgaatattttaacctgaacaatttaaataggcttgacattcccatgctgctttcaagcctttttttttttttttttgagacagagtttcactcttgttccctggctggagtgcaatggcacagtctcggctcactgcaacctccacctcccgggttcaagtgatcctcttgcctcagcctcccaagtagctgggattacaggctcctgccaccatgcccagctaattttttttttttttttttttttttgtatttttagtagagacggagttttaccttgttggccaggctagtctcgaactcgtgacctcaggtgatccgtctgcctcagcatcccaaagtgctgggattacaggcgttagccaccatgcagcccctttcaagccttttaacatcatgtcaccttcacaatgagcagttgctcccattacccagtgaactcaccttctgatgggacagttaccctagttggggcttctcagccttgagagatgtgcagagcagggacctgtccagggcagagcagccagacagcgtggaaataatccaaacagagaaagcattcaagaacttggcctctggttgacttaacacactacttcaagtatatggcaggtctgtataataaactcctgcctgtctagtcttcagcctcatagaaagcaagaaagcaggtggcgtatgttgcagaacaattcttgggtagaacaaggggacatttgatggtttgggtttttcagtaagaaagatgaagtcctggagtatagggtagagtggtacagtggaaaatatttcagcttgggggttagaaaataaacatgccgattcttgctttgccataaatgatgtcacctaacttgtgtgaccctgttttctcatccctaaaatgatttgataagtttaagattaggctatttttaaatgtatggaagaaattgggtgttacccttcttgaaagacattttccctgcaagtatggcaggctgtatctttcagtgtaacaaagttctattaaaggtcataactgctgccctgtaacttttgccttattctagaaacttctactccttgaatgacatgtgttggtacatgtttcttctctttcagatagaatggttaattttgacttgttgcttctgcacacgtgtcctggaaataaaagtttcttcccactacttattgctgatttatttcataggaagtcttaaggaaagaggcaaaaaacgggctcatgggtcacttgaagttggaaaattctgtggagattgacaaaggagactcacttttgagcatctgttctcagtgtaaccttcaaatctgtggaaacataactaggcacattttatgattatttagaatgttaataaattgctctgagtttcctcaagtccattttgtaagatcagaccataggtgggtgttgtttcttttaagtgtgtgtactgtgtccaatgttacatttttagaagtgttcatgctttttgtaaagtgattcgttttaagcacattaaaggtcgtttgagtattgtcatgtatttta

SEQ ID NO: 171242 - DNA, 735 bp, Homo sapiens
  Payload ID: 13687
  Gene Symbol: PPP2R5C
  Gene Name: protein phosphatase 2, regulatory subunit B', gamma
  ENST ID: ENST00000556946
  CDS Start-End: 109-432
agttccctccagctgcagagagcttcagtttgtctttttttttttaaactaaaatggaggctggtttcttgccttaaggagcccattgcctttcccgctgaagtctagatgttgacatgtaataaagcgggcagcaggatggtggtggatgcggccaactccaatgggcctttccagcccgtggtccttctccatattcgagttgaggctgtgaagctgggcagggtttcagctgagctgaggttggaagtccctgaccttcagctgtggccgcctacggagcagcagggagagcaaacccatggagaaccccgcggcccccaaagcatggacggagctgccagccttctcccctgcccttcttcctctactcccgacctgccagccttctcccctgcccttctgcctctactcccgacctgccaaccttagcctaaaatcagagctgctagaatcacacacactgtcgtagctggttttgtattgtaaatgagtcattctgttattttggaaacttatgtctcatgccaggatctgcagatagttctttttcaaaatattgtttagacaaaataaatttctttaaatataatatctctactttaaatgcctggggtgttgcatgcatttttctaggctagcaaagcttaaagattatttctataatttcagttacatttacctttatagatgggttactctaagtaacaaattaaacacacatggatcttctaa

SEQ ID NO: 171243 - DNA, 1839 bp, Homo sapiens
  Payload ID: 13688
  Gene Symbol: PPP2R3C
  Gene Name: protein phosphatase 2, regulatory subunit B'', gamma
  Uniprot ID: Q969Q6
  ENST ID: ENST00000261475
  CDS Start-End: 355-1716
ctaatgaactcctgggtcacgtggtgcgcacgcgccaaaggcacacgataaaggaaaacgcgggcttatcgtggcctttaaaatccggcttggtgagcttgggtcgcctctgaaggagaaccattttccatctctttcatagttttttcccccagtcagcgtggtagcggtattctccgcggcagtgacagtaattgtttttgcctctttagccaagacttccgccctcgatcaagatggtggttggacggccttcctaacctttacggggcctggcggtgctgacgcctgagctggtaggggtggagcaggtaggaaacagcaaatgcagaagctgctgcgcggaagtcggccatggactggaaagaagttcttcgtcggcgcctagcgacgcccaacacctgtccaaacaaaaaaaaaagtgaacaagaattaaaagatgaagaaatggatttatttacaaaatattactccgaatggaaaggaggtagaaaaaacacaaatgaattctataagaccattccccggttttattataggctgcctgctgaagatgaagtcttactacagaaattaagagaggaatcaagagctgtctttctacaaagaaaaagcagagaactgttagataatgaagaattacagaacttatggtttttgctggacaaacaccagacaccacctatgattggagaggaagcgatgatcaattacgaaaactttttgaaggttggtgaaaaggctggagcaaagtgcaagcaatttttcacagcaaaagtctttgctaaactccttcatacagattcatatggaagaatttccatcatgcagttctttaattatgtcatgagaaaagtttggcttcatcaaacaagaataggactcagtttatatgatgtcgctgggcaggggtaccttcgggaatctgatttagaaaactacatattggaacttatccctacgttgccacaattagatggtctggaaaaatctttctactccttttatgtttgtacagcagttaggaagttcttcttctttttagatcctttaagaacaggaaagataaaaattcaagatattttagcatgcagcttcctagatgatttattggagctaagggatgaggaactgtccaaggagagtcaagaaacaaattggttttctgctccttctgccctaagagtttatggccagtacttgaatcttgataaagatcacaatggcatgctcagtaaagaagaactctcacgctatggaacagctaccatgaccaatgtcttcttagaccgtgttttccaggagtgtctcacttatgatggagaaatggactataagacctacttggactttgtccttgcattagaaaacagaaaggaacctgcagctctacaatatattttcaaactgcttgatattgagaacaaaggatacctgaatgtcttttcacttaattatttctttagggccatacaggaactaatgaaaatccatggacaagatcctgtttcatttcaagatgtcaaggatgaaatctttgacatggtaaaaccaaaggatcctttgaaaatctctcttcaggatttaatcaacagtaatcaaggagacacagtaaccaccattctaatcgatttgaatggcttctggacttacgagaacagagaggctcttgttgcaaatgacagtgaaaactctgcagaccttgatgatacatgatctctgaaagactagactgtcttatattatgagatacttgaatgctgcatgtaaagcctttaaagcaaaatcctcagaaatggtctaaataaaacacttgatatgcctagagaacacagcaaa

SEQ ID NO: 171244 - DNA, 593 bp, Homo sapiens
  Payload ID: 13688
  Gene Symbol: PPP2R3C
  Gene Name: protein phosphatase 2, regulatory subunit B'', gamma
  ENST ID: ENST00000554488
  CDS Start-End: 28-96
gcagaagctgctgcgcggaagtcggccatggactggaaagaagttcttcgtcggcgcctagcgacgcccaacacctgtccaaacactgcctgctgaagatgaagtcttactacagaaattaagagaggaatcaagagctgtctttctacaaagaaaaagcagagaactgttagataatgaagaattacagaacttatggtttttgctggacaaacaccagacaccacctatgattggagaggaagcgatgatcaattacgaaaactttttgaaggttggtgaaaaggctggagcaaagtgcaagcaatttttcacagcaaaagtctttgctaaactccttcatacagattcatatggaagaatttccatcatgcagttctttaattatgtcatgagaaaaggtgattcatttttactgtgcttgaactccttatctgggaatcaatttggcttcatcaaacaagaataggactcagtttatatgatgtcgctgggcaggggtaccttcgggaatctgatttagaaaactacatattggaacttatccctacgttgccacaattagatggtctggaaaaatctttctactcctt

SEQ ID NO: 171245 - DNA, 478 bp, Homo sapiens
  Payload ID: 13688
  Gene Symbol: PPP2R3C
  Gene Name: protein phosphatase 2, regulatory subunit B'', gamma
  ENST ID: ENST00000557074
  CDS Start-End: 1-125
ttgcattagaaaacagaaaggaacctgcagctctacaatatattttcaaactgcttgatattgagaacaaaggatacctgaatgtcttttcacttaattatttctttaggatttatttctattaaatacaggccatacaggaactaatgaaaatccatggacaagatcctgtttcatttcaagatgtcaaggatgaaatctttgacatggtaaaaccaaaggatcctttgaaaatctctcttcaggatttaatcaacagtaatcaaggagacacagtaaccaccattctaatcgatttgaatggcttctggacttacgagaacagagaggctcttgttgcaaatgacagtgaaaactctgcagaccttgatgatacatgatctctgaaagactagactgtcttatattatgagatacttgaatgctgcatgtaaagcctttaaagcaaaatcctcagaaatggtctaaataaaacact

SEQ ID NO: 171246 - DNA, 684 bp, Homo sapiens
  Payload ID: 13688
  Gene Symbol: PPP2R3C
  Gene Name: protein phosphatase 2, regulatory subunit B'', gamma
  ENST ID: ENST00000554361
  CDS Start-End: 7-684
tcggccatggactggaaagaagttcttcgtcggcgcctagcgacgcccaacacctgtccaaacaaaaaaaaaagtgaacaagaattaaaagatgaagaaatggatttatttacaaaatattactccgaatggaaaggaggtagaaaaaacacaaatgaattctataagaccattccccggttttattataggctgcctgctgaagatgaagtcttactacagaaattaagagaggaatcaagagctgtctttctacaaagaaaaagcagagaactgttagataatgaagaattacaggttggtgaaaaggctggagcaaagtgcaagcaatttttcacagcaaaagtctttgctaaactccttcatacagattcatatggaagaatttccatcatgcagttctttaattatgtcatgagaaaagtttggcttcatcaaacaagaataggactcagtttatatgatgtcgctgggcaggggtaccttcgggaatctgatttagaaaactacatattggaacttatccctacgttgccacaattagatggtctggaaaaatctttctactccttttatgtttgtacagcagttaggaagttcttcttctttttagatcctttaagaacaggaaagataaaaattcaagatattttagcatgcagcttcctagatgatttattggag

SEQ ID NO: 171247 - DNA, 896 bp, Homo sapiens
  Payload ID: 13688
  Gene Symbol: PPP2R3C
  Gene Name: protein phosphatase 2, regulatory subunit B'', gamma
  ENST ID: ENST00000557278
  CDS Start-End: 395-896
cggcgaggaaaaaaggcagttttgaagcatttagtggcaaaaggggtaggagacggctgctgaagtgtctactacattcaggggacctggaaggcttccagatatccgcaatgaacaatgaaaagaaattgtgaaagaaggcgcttccctcaagccggaactaatgaactcctgggtcacgtggtgcgcacgcgccaaaggcacacgataaaggaaaacgcgggcttatcgtggcctttaaaatccggcttgccaagacttccgccctcgatcaagatggtggttggacggccttcctaacctttacggggcctggcggtgctgacgcctgagctggtaggggtggagcaggtaggaaacagcaaatgcagaagctgctgcgcggaagtcggccatggactggaaagaagttcttcgtcggcgcctagcgacgcccaacacctgtccaaacaaaaaaaaaagtgaacaagaattaaaagatgaagaaatggatttatttacaaaatattactccgaatggaaaggaggtagaaaaaacacaaatgaattctataagaccattccccggttttattataggctgcctgctgaagatgaagtcttactacagaaattaagagaggaatcaagagctgtctttctacaaagaaaaagcagagaactgttagataatgaagaattacagaacttatggtttttgctggacaaacaccagacaccacctatgattggagaggaagcgatgatcaattacgaaaactttttgaaggttggtgaaaaggctggagcaaagtgcaagcaatttttcacagcaaaagtctttgctaaactccttcatacagattcatatggaagaatttccatcatgcagttctttaattatgtcatgagaaaag

SEQ ID NO: 171248 - DNA, 1402 bp, Homo sapiens
  Payload ID: 13688
  Gene Symbol: PPP2R3C
  Gene Name: protein phosphatase 2, regulatory subunit B'', gamma
  ENST ID: ENST00000553273
  CDS Start-End: 183-251
ggaaaacgcgggcttatcgtggcctttaaaatccggcttgccaagacttccgccctcgatcaagatggtggttggacggccttcctaacctttacggggcctggcggtgctgacgcctgagctggtaggggtggagcaggtaggaaacagcaaatgcagaagctgctgcgcggaagtcggccatggactggaaagaagttcttcgtcggcgcctagcgacgcccaacacctgtccaaacactgcctgctgaagatgaagtcttactacagaaattaagagaggaatcaagagctgtctttctacaaagaaaaagcagagaactgttagataatgaagaattacagaacttatggtttttgctggacaaacaccagacaccacctatgattggagaggaagcgatgatcaattacgaaaactttttgaaggttggtgaaaaggctggagcaaagtgcaagcaatttttcacagcaaaagtctttgctaaactccttcatacagattcatatggaagaatttccatcatgcagttctttaattatgtcatgagaaaagtttggcttcatcaaacaagaataggactcagtttatatgatgtcgctgggcaggggtaccttcgggaatctgatttagaaaactacatattggaacttatccctacgttgccacaattagatggtctggaaaaatctttctactccttttatgtttgtacagcagttaggaagttcttcttctttttagatcctttaagaacaggaaagataaaaattcaagatattttagcatgcagcttcctagatgatttattggagctaagggatgaggaactgtccaaggagagtcaagaaacaaattggttttctgctccttctgccctaagagtttatggactataagacctacttggactttgtccttgcattagaaaacagaaaggaacctgcagctctacaatatattttcaaactgcttgatattgagaacaaaggatacctgaatgtcttttcacttaattatttctttagggccatacaggaactaatgaaaatccatggacaagatcctgtttcatttcaagatgtcaaggatgaaatctttgacatggtaaaaccaaaggatcctttgaaaatctctcttcaggatttaatcaacagtaatcaaggagacacagtaaccaccattctaatcgatttgaatggcttctggacttacgagaacagagaggctcttgttgcaaatgacagtgaaaactctgcagaccttgatgatacatgatctctgaaagactagactgtcttatattatgagatacttgaatgctgcatgtaaagcctttaaagcaaaatcctcagaaatggtctaaataaaacacttgatatgcctagagaacacagcaaa

SEQ ID NO: 171249 - DNA, 676 bp, Homo sapiens
  Payload ID: 13688
  Gene Symbol: PPP2R3C
  Gene Name: protein phosphatase 2, regulatory subunit B'', gamma
  ENST ID: ENST00000555614
  CDS Start-End: 1-676
gctgcctgctgaagatgaagtcttactacagaaattaagagaggaatcaagagctgtctttctacaaagaaaaagcagagaactgttagataatgaagaattacagacaccacctatgattggagaggaagcgatgatcaattacgaaaactttttgaaggttggtgaaaaggctggagcaaagtgcaagcaatttttcacagcaaaagtctttgctaaactccttcatacagattcatatggaagaatttccatcatgcagttctttaattatgtcatgagaaaagtttggcttcatcaaacaagaataggactcagtttatatgatgtcgctgggcaggggtaccttcgggaatctgatttagaaaactacatattggaacttatccctacgttgccacaattagatggtctggaaaaatctttctactccttttatgtttgtacagcagttaggaagttcttcttctttttagatcctttaagaacaggaaagataaaaattcaagatattttagcatgcagcttcctagatgatttattggagctaagggatgaggaactgtccaaggagagtcaagaaacaaattggttttctgctccttctgccctaagagtttatggccagtacttgaatcttgataaagatcacaatggcatgctcagtaaagaagaa

SEQ ID NO: 171250 - DNA, 1719 bp, Homo sapiens
  Payload ID: 13688
  Gene Symbol: PPP2R3C
  Gene Name: protein phosphatase 2, regulatory subunit B'', gamma
  ENST ID: ENST00000554222
  CDS Start-End: 369-437
gcatttagtggcaaaaggggtaggagacggctgctgaagtgtctactacattcaggggacctggaaggcttccagatatccgcaatgaacaatgaaaagaaattgtgaaagaaggcgcttccctcaagccggaactaatgaactcctgggtcacgtggtgcgcacgcgccaaaggcacacgataaaggaaaacgcgggcttatcgtggcctttaaaatccggcttgccaagacttccgccctcgatcaagatggtggttggacggccttcctaacctttacggggcctggcggtgctgacgcctgagctggtaggggtggagcaggtaggaaacagcaaatgcagaagctgctgcgcggaagtcggccatggactggaaagaagttcttcgtcggcgcctagcgacgcccaacacctgtccaaacactgcctgctgaagatgaagtcttactacagaaattaagagaggaatcaagagctgtctttctacaaagaaaaagcagagaactgttagataatgaagaattacagaacttatggtttttgctggacaaacaccagacaccacctatgattggagaggaagcgatgatcaattacgaaaactttttgaaggttggtgaaaaggctggagcaaagtgcaagcaatttttcacagcaaaagtctttgctaaactccttcatacagattcatatggaagaatttccatcatgcagttctttaattatgtcatgagaaaagtttggcttcatcaaacaagaataggactcagtttatatgatgtcgctgggcaggggtaccttcgggaatctgatttagaaaactacatattggaacttatccctacgttgccacaattagatggtctggaaaaatctttctactccttttatgtttgtacagcagttaggaagttcttcttctttttagatcctttaagaacaggaaagataaaaattcaagatattttagcatgcagcttcctagatgatttattggagctaagggatgaggaactgtccaaggagagtcaagaaacaaattggttttctgctccttctgccctaagagtttatggccagtacttgaatcttgataaagatcacaatggcatgctcagtaaagaagaactctcacgctatggaacagctaccatgaccaatgtcttcttagaccgtgttttccaggagtgtctcacttatgatggagaaatggactataagacctacttggactttgtccttgcattagaaaacagaaaggaacctgcagctctacaatatattttcaaactgcttgatattgagaacaaaggatacctgaatgtcttttcacttaattatttctttagggccatacaggaactaatgaaaatccatggacaagatcctgtttcatttcaagatgtcaaggatgaaatctttgacatggtaaaaccaaaggatcctttgaaaatctctcttcaggatttaatcaacagtaatcaaggagacacagtaaccaccattctaatcgatttgaatggcttctggacttacgagaacagagaggctcttgttgcaaatgacagtgaaaactctgcagaccttgatgatacatgatctctgaaagactagactgtcttatattatgagatacttgaatgctgcatgtaaagcctttaaagcaaaatcctcagaaatggtctaaataaaacacttgatatgcctagagaacac

SEQ ID NO: 171251 - DNA, 479 bp, Homo sapiens
  Payload ID: 13688
  Gene Symbol: PPP2R3C
  Gene Name: protein phosphatase 2, regulatory subunit B'', gamma
  ENST ID: ENST00000553282
  CDS Start-End: 30-191
atgcagaagctgctgcgcggaagtcggccatggactggaaagaagttcttcgtcggcgcctagcgacgcccaacacctgtccaaacagtagagaaacagtgattatgaggctgaaactccatgaggtcaggggctggggctgtcttgctcacccctcattccgtgtctactacagcgttctctgtacataaaaaaaaaagtgaacaagaattaaaagatgaagaaatggatttatttacaaaatattactccgaatggaaaggaggtagaaaaaacacaaatgaattctataagaccattccccggttttattataggctgcctgctgaagatgaagtcttactacagaaattaagagaggaatcaagagctgtctttctacaaagaaaaagcagagaactgttagataatgaagaattacagaacttatggtttttgctggacaaacaccagacaccacctatgattggagaggaagc

SEQ ID NO: 171252 - DNA, 492 bp, Homo sapiens
  Payload ID: 13688
  Gene Symbol: PPP2R3C
  Gene Name: protein phosphatase 2, regulatory subunit B'', gamma
  ENST ID: ENST00000557288
  CDS Start-End: 26-115
agaagctgctgcgcggaagtcggccatggactggaaagaagttcttcgtcggcgcctagcgacgcccaacacctgtccaaacaaaatttaccttgtattttcagctgcctgctgaagatgaagtcttactacagaaattaagagaggaatcaagagctgtctttctacaaagaaaaagcagagaactgttagataatgaagaattacagaacttatggtttttgctggacaaacaccagacaccacctatgattggagaggaagcgatgatcaattacgaaaactttttgaaggttggtgaaaaggctggagcaaagtgcaagcaatttttcacagcaaaagtctttgctaaactccttcatacagattcatatggaagaatttccatcatgcagttctttaattatgtcatgagaaaagtttggcttcatcaaacaagaataggactcagtttatatgatgtcgctgggcaggggtaccttcgggaatctg

SEQ ID NO: 171253 - DNA, 1347 bp, Homo sapiens
  Payload ID: 13688
  Gene Symbol: PPP2R3C
  Gene Name: protein phosphatase 2, regulatory subunit B'', gamma
  ENST ID: ENST00000555644
  CDS Start-End: 355-927
ctaatgaactcctgggtcacgtggtgcgcacgcgccaaaggcacacgataaaggaaaacgcgggcttatcgtggcctttaaaatccggcttggtgagcttgggtcgcctctgaaggagaaccattttccatctctttcatagttttttcccccagtcagcgtggtagcggtattctccgcggcagtgacagtaattgtttttgcctctttagccaagacttccgccctcgatcaagatggtggttggacggccttcctaacctttacggggcctggcggtgctgacgcctgagctggtaggggtggagcaggtaggaaacagcaaatgcagaagctgctgcgcggaagtcggccatggactggaaagaagttcttcgtcggcgcctagcgacgcccaacacctgtccaaacaaaaaaaaaagtgaacaagaattaaaagatgaagaaatggatttatttacaaaatattactccgaatggaaaggaggtagaaaaaacacaaatgaattctataagaccattccccggttttattataggctgcctgctgaagatgaagtcttactacagaaattaagagaggaatcaagagctgtctttctacaaagaaaaagcagagaactgttagataatgaagaattacagaacttatggtttttgctggacaaacaccagacaccacctatgattggagaggaagcgatgatcaattacgaaaactttttgaaggttggtgaaaaggctggagcaaagtgcaagcaatttttcacagcaaaagtctttgctaaactccttcatacagattcatatggaagaatttccatcatgcagttctttaattatgtcatgagaaaaggtgattcatttttactgtgcttgaactccttatctgggaatcaagtaggtttttggtctgtgcttttataagtatttcttctatgtgaaatcactctaagtttgaatagtagaatttcttatcttttgaccaagatgtgttacataaacttgggttagcataaaaaaacaaaaattttttaaaccctcatgtgtcttaaagataatagtagactagaaatattaagagctgaaccaagagttttaatgtatggtaatttgaaataattttaatttactgataattttattttaccagtatattacaagttgagttgactgatagtttcaaacccaaagctgtaatatcagtttcaaggagcatcaattaaacagcttggacttatgattcctacaagtgccataataatctgtgaaagcctattgtatacaatctttaataattggttgctgtaattaacctcagaaataaaagcagcttcactgaaggca

SEQ ID NO: 171254 - DNA, 546 bp, Homo sapiens
  Payload ID: 13688
  Gene Symbol: PPP2R3C
  Gene Name: protein phosphatase 2, regulatory subunit B'', gamma
  ENST ID: ENST00000555726
  CDS Start-End: 1-59
aagaagttcttcgtcggcgcctagcgacgcccaacacctgtccaaacactgcctgctgaagatgaagtcttactacagaaattaagagaggaatcaagagctgtctttctacaaagaaaaagcagagaactgttagataatgaagaattacaggcaatttttcacagcaaaagtctttgctaaactccttcatacagattcatatggaagaatttccatcatgcagttctttaattatgtcatgagaaaagtttggcttcatcaaacaagaataggactcagtttatatgatgtcgctgggcaggggtaccttcgggaatctgatttagaaaactacatattggaacttatccctacgttgccacaattagatggtctggaaaaatctttctactccttttatgtttgtacagcagttaggaagttcttcttctttttagatcctttaagaacaggaaagataaaaattcaagatattttagcatgcagcttcctagatgatttattggagctaagggatgaggaactgtccaaggagagtcaaga

SEQ ID NO: 171255 - DNA, 501 bp, Homo sapiens
  Payload ID: 13688
  Gene Symbol: PPP2R3C
  Gene Name: protein phosphatase 2, regulatory subunit B'', gamma
  ENST ID: ENST00000555219
  CDS Start-End: 1-387
ggccagtacttgaatcttgataaagatcacaatggcatgctcagtaaagaagaactctcacgctatggaacagctaccatgaccaatgtcttcttagaccgtgttttccaggagtgtctcacttatgatggagaaatggccatacaggaactaatgaaaatccatggacaagatcctgtttcatttcaagatgtcaaggatgaaatctttgacatggtaaaaccaaaggatcctttgaaaatctctcttcaggatttaatcaacagtaatcaaggagacacagtaaccaccattctaatcgatttgaatggcttctggacttacgagaacagagaggctcttgttgcaaatgacagtgaaaactctgcagaccttgatgatacatgatctctgaaagactagactgtcttatattatgagatacttgaatgctgcatgtaaagcctttaaagcaaaatcctcagaaatggtctaaataaaacacttgatatgcctagagaa

SEQ ID NO: 171256 - DNA, 712 bp, Homo sapiens
  Payload ID: 13688
  Gene Symbol: PPP2R3C
  Gene Name: protein phosphatase 2, regulatory subunit B'', gamma
  ENST ID: ENST00000555630
  CDS Start-End: 56-460
ggggtggagcaggtaggaaacagcaaatgcagaagctgctgcgcggaagtcggccatggactggaaagaagttcttcgtcggcgcctagcgacgcccaacacctgtccaaacaaaaaaaaaagtgaacaagaattaaaagatgaagaaatggatttatttacaaaatattactccgaatggaaaggaggtagaaaaaacacaaatgaattctataagaccattccccggttttattataggctgcctgctgaagatgaagtcttactacagaaattaagagaggaatcaagagctgtctttctacaaagaaaaagcagagaactgttagataatgaagaattacagaacttatggtttttgctggacaaacaccagacaccacctatgattggagaggaagcgatgatcaattacgaaaactttttgaaggcaatttttcacagcaaaagtctttgctaaactccttcatacagattcatatggaagaatttccatcatgcagttctttaattatgtcatgagaaaagtttggcttcatcaaacaagaataggactcagtttatatgatgtcgctgggcaggggtaccttcgggaatctgatttagaaaactacatattggaacttatccctacgttgccacaattagatggtctggaaaaatctttctactccttttatgtttgtacagcagttaggaagttcttcttctt

SEQ ID NO: 171257 - DNA, 762 bp, Homo sapiens
  Payload ID: 13688
  Gene Symbol: PPP2R3C
  Gene Name: protein phosphatase 2, regulatory subunit B'', gamma
  ENST ID: ENST00000554899
  CDS Start-End: 16-84
gcgcggaagtcggccatggactggaaagaagttcttcgtcggcgcctagcgacgcccaacacctgtccaaacactgcctgctgaagatgaagtcttactacagaaattaagagaggaatcaagagctgtctttctacaaagaaaaagcagagaactgttagataatgaagaattacagaacttatggtttttgctggacaaacaccagacaccacctatgattggagaggaagcgatgatcaattacgaaaactttttgaaggcaatttttcacagcaaaagtctttgctaaactccttcatacagattcatatggaagaatttccatcatgcagttctttaattatgtcatgagaaaaggatttagaaaactacatattggaacttatccctacgttgccacaattagatggtctggaaaaatctttctactccttttatgtttgtacagcagttaggaagttcttcttctttttagatcctttaagaacaggaaagataaaaattcaagatattttagcatgcagcttcctagatgatttattggagctaagggatgaggaactgtccaaggagagtcaagaaacaaattggttttctgctccttctgccctaagagtttatggccagtacttgaatcttgataaagatcacaatggcatgctcagtaaagaagaactctcacgctatggaacagctaccatgaccaatgtcttcttagaccgtgttttccaggagtgtctcacttatgatggagaaatg

SEQ ID NO: 171258 - DNA, 1029 bp, Homo sapiens
  Payload ID: 13688
  Gene Symbol: PPP2R3C
  Gene Name: protein phosphatase 2, regulatory subunit B'', gamma
  ENST ID: ENST00000554265
  CDS Start-End: 32-100
aaatgcagaagctgctgcgcggaagtcggccatggactggaaagaagttcttcgtcggcgcctagcgacgcccaacacctgtccaaacactgcctgctgaagatgaagtcttactacagaaattaagagaggaatcaagagctgtctttctacaaagaaaaagcagagaactgttagataatgaagaattacagaacttatggtttttgctggacaaacaccagacaccacctatgattggagaggaagcgatgatcaattacgaaaactttttgaaggttggtgaaaaggctggagcaaagtgcaagatttagaaaactacatattggaacttatccctacgttgccacaattagatggtctggaaaaatctttctactccttttatgtttgtacagcagttaggaagttcttcttctttttagatcctttaagaacaggtaaaagaaaatcttatctaacttagatattatgaggatattattatatctaaatctcaataactagagaaaactcttgaaaaatatcatttattttcctgtcactgccattaaaaatttggtgaatttcaaggagataaaaaggtagaaaaaacagtagcagtactttggttatgtttatctgaagatcttttatgatttacttgcactgaccataacctgctgtgtgacagatggggggacatcacctaacagtgaagaagtatgaactgggtagtcagtcataaatacctccttccagttctaggaagccagttatttgcatataatttgctgtctctgctgtgtgacatactgcagaattattctctttttgatgaaaaatatgtatttggaaatatgagagccatttagccagtgatgcatatttttcttattctctataaggatcggattggtaaatatggcctcattaacagtttgttttattaactgttcaaacctgcccagacttaactacatgtaactggagcagaggaaaggacagagaaggtccaaatcaaagtgcctgattgtccttctgtccttg

SEQ ID NO: 171259 - DNA, 1846 bp, Homo sapiens
  Payload ID: 13688
  Gene Symbol: PPP2R3C
  Gene Name: protein phosphatase 2, regulatory subunit B'', gamma
  ENST ID: ENST00000557217
  CDS Start-End: 559-627
gacggacgagactgacccggacttaggcgttccgcctggcccggcggcgaggaaaaaaggcagttttgaagcatttagtggcaaaaggggtaggagacggctgctgaagtgtctactacattcaggggacctggaaggcttccagatatccgcaatgaacaatgaaaagaaattgtgaaagaaggcgcttccctcaagccggaactaatgaactcctgggtcacgtggtgcgcacgcgccaaaggcacacgataaaggaaaacgcgggcttatcgtggcctttaaaatccggcttggtgagcttgggtcgcctctgaaggagaaccattttccatctctttcatagttttttcccccagtcagcgtggtagcggtattctccgcggcagtgacagtaattgtttttgcctctttagccaagacttccgccctcgatcaagatggtggttggacggccttcctaacctttacggggcctggcggtgctgacgcctgagctggtaggggtggagcaggtaggaaacagcaaatgcagaagctgctgcgcggaagtcggccatggactggaaagaagttcttcgtcggcgcctagcgacgcccaacacctgtccaaacactgcctgctgaagatgaagtcttactacagaaattaagagaggaatcaagagctgtctttctacaaagaaaaagcagagaactgttagataatgaagaattacagaacttatggtttttgctggacaaacaccagacaccacctatgattggagaggaagcgatgatcaattacgaaaactttttgaaggttggtgaaaaggctggagcaaagtgcaagcaatttttcacagcaaaagtctttgctaaactccttcatacagattcatatggaagaatttccatcatgcagttctttaattatgtcatgagaaaagtttggcttcatcaaacaagaataggactcagtttatatgatgtcgctgggcaggggtaccttcgggaatctgatttagaaaactacatattggaacttatccctacgttgccacaattagatggtctggaaaaatctttctactccttttatgtttgtacagcagttaggaagttcttcttctttttagatcctttaagaacaggaaagataaaaattcaagatattttagcatgcagcttcctagatgatttattggagctaagggatgaggaactgtccaaggagagtcaagaaacaaattggttttctgctccttctgccctaagagtttatggccagtacttgaatcttgataaagatcacaatggcatgctcagtaaagaagaactctcacgctatggaacagctaccatgaccaatgtcttcttagaccgtgttttccaggagtgtctcacttatgatggagaaatggactataagacctacttggactttgtccttgcattagaaaacagaaaggaacctgcagctctacaatatattttcaaactgcttgatattgagaacaaaggatacctgaatgtcttttcacttaattatttctttagggccatacaggaactaatgaaaatccatggacaagatcctgtttcatttcaagatgtcaaggatgaaatctttgacatggtaaaaccaaaggatcctttgaaaatctctcttcaggatttaatcaacagtaatcaaggagacacagtaaccaccattctaatcgatttgaatggcttctggacttacgagaacagagaggctcttgttgcaaatgacagtgaaaactctgcagaccttgatgatacatgatctctgaaagactagactgtcttatattatgagatacttgaatgctgcatgtaa

SEQ ID NO: 171260 - DNA, 469 bp, Homo sapiens
  Payload ID: 13688
  Gene Symbol: PPP2R3C
  Gene Name: protein phosphatase 2, regulatory subunit B'', gamma
  ENST ID: ENST00000554563
  CDS Start-End: 12-332
ggaagtcggccatggactggaaagaagttcttcgtcggcgcctagcgacgcccaacacctgtccaaacaaaaaaaaaagtgaacaagaattaaaagatgaagaaatggatttatttacaaaatattactccgaatggaaaggaggtagaaaaaacacaaatgaattctataagaccattccccggttttattataggctgcctgctgaagatgaagtcttactacagaaattaagagaggaatcaagagctgtctttctacaaagaaaaagcagagaactgttagataatgaagaattacaggcaatttttcacagcaaaagtctttgctaaactccttcatacagattcatatggaagaatttccatcatgcagttctttaattatgtcatgagaaaagtttggcttcatcaaacaagaataggactcagtttatatgatgtcgctgggcaggggtaccttcgggaat

SEQ ID NO: 171261 - DNA, 2737 bp, Homo sapiens
  Payload ID: 13689
  Gene Symbol: PPP2R4
  Gene Name: protein phosphatase 2A activator, regulatory subunit 4
  ENST ID: ENST00000348141
  CDS Start-End: 266-1255
gcactgacatggccgtcgcccggttccgcgcgtccgccgcgcgccggccgttaataggcttgctccctgagcgccccgcaccgacatggcggccgtcttcgctgtggtgactttaactctcggttttcggttatagccggccggcgctcacttgtcttcaggaagctcggagcctttggtggagccggggagaggaagggtgggtgcaagagtgaaaggcgagaggggactgcaagcatccgggtcggctcctggccggagcaagatggctgagggcgagcggcagccgccgccagattcttcagaggaggcccctccagccactcagaacttcatcattccaaaaaaggagatccacacagttccagacatgggcaaatggaagcgttctcaggtaccatttggaactgtggcatacgctgactacatcggattcatccttaccctcaacgaaggtgtgaaggggaagaagctgaccttcgagtacagagtctccgaggccattgagaaactagtcgctcttctcaacacgctggacaggtggattgatgagactcctccagtggaccagccctctcggtttgggaataaggcatacaggacctggtatgccaaacttgatgaggaagcagaaaacttggtggccacagtggtccctacccatctggcagctgctgtgcctgaggtggctgtttacctaaaggagtcagtggggaactccacgcgcattgactacggcacagggcatgaggcagccttcgctgctttcctctgctgtctctgcaagattggggtgctccgggtggatgaccaaatagctattgtcttcaaggtgttcaatcggtaccttgaggttatgcggaaactccagaaaacatacaggatggagccagccggcagccagggagtgtggggtctggatgacttccagtttctgcccttcatctggggcagttcgcagctgatagaccacccatacctggagcccagacactttgtggatgagaaggccgtgaatgagaaccacaaggactacatgttcctggagtgtatcctgtttattaccgagatgaagactggcccatttgcagagcactccaaccagctgtggaacatcagcgccgtcccttcctggtccaaagtgaaccagggtctcatccgcatgtataaggccgagtgcctggagaagttccctgtgatccagcacttcaagttcgggagcctgctgcccatccatcctgtcacgtcgggctaggaggggccaagccgaagagccacccaggccacagttcctgtgcctgccttccccaccccagcagtggcccctccccatcccctccctctgttcgtcccgtttgatgagaggctgtttactggggtggggtggcgagatgggcttgagggggctcagagcataaggcttcagggcccaagttgggagaagtgaccaaagtgtagccagttttctgagttcccgtgtgctagactggccagaagagagggtctggggcctggtcactcggccactctctcctgtttctggcctcttctcccttcactcccgtccagtctggttttgagagcaggggctgttctgcagcaccgcagggaagggaggagagatacctgctgcttccattgcttttcccttcctggagtcgatgcctttctaagggttggagctgctccttgcaggggcgggtcagtttcccaggccatgccggggtggccatctatggtagggctggaagctgaggctggccgccagctgtgggctggggtggggtgggtggggtcgggtggtggagaggccttagctgtcctggctggtgcccctcccaggctccttttcaccctgccccctgggcctgaggccccctgtgtccaagcctccccctggctcttcagttctctagcccttggctctgctgggtttcctgactgtagccacatctctcccgctccctaagggtaacctagccaatggaagctgccctttgggtaggtgctgggctcctgggagggcccagatgatggggtgaggcatgtctttccagaactttccctggcagggaggggatggcagaaactcagggaggggcttggggcccattgtatctggagagcctggattcctcttggcagtcttaggcccggccacttctgctacctttgcgctgctgtgagcctcaccctgggcccctgggccctgcttctctgctcccctgggtgatgggtgggcccagaaggtggcagtcccacaccttgtcctcccacctccctgaactgtccattgcttttatagggtgaggtaagagacagcctcccaagcccaggctttggcactcagaatgggcccagtgggggctgggcaggcccattgagggccaccgccgaggtttctcctagggctgttcctgggcctggctcttacaggctcgtcccccaggcctgcccttctccactgccccctcctgtgtctgggtccacacacccttcaggaagggggagcactgagaagcacagcacaggggctcagcctgggatccggtgatggtctgggcagaggctgggtcaggagtcccaaaggtcagtgacagtttctcagaagaggcccagcgtccacctctctcccagggccagacagcccttcctggctcccccatccccctatgggctcccagccccttgcaccctcattgctgttcagattaaagcctctgttttgcacctgtca

SEQ ID NO: 171262 - DNA, 1989 bp, Homo sapiens
  Payload ID: 13689
  Gene Symbol: PPP2R4
  Gene Name: protein phosphatase 2A activator, regulatory subunit 4
  ENST ID: ENST00000347048
  CDS Start-End: 193-507
ccccgcaccgacatggcggccgtcttcgctgtggtgactttaactctcggttttcggttatagccggccggcgctcacttgtcttcaggaagctcggagcctttggtggagccggggagaggaagggtgggtgcaagagtgaaaggcgagaggggactgcaagcatccgggtcggctcctggccggagcaagatggctgagggcgagcggcagccgccgccagattcttcagaggaggcccctccagccactcagaacttcatcattccaaaaaaggagatccacacagttccagacatgggcaaatggaagcgttctcagatgaagactggcccatttgcagagcactccaaccagctgtggaacatcagcgccgtcccttcctggtccaaagtgaaccagggtctcatccgcatgtataaggccgagtgcctggagaagttccctgtgatccagcacttcaagttcgggagcctgctgcccatccatcctgtcacgtcgggctaggaggggccaagccgaagagccacccaggccacagttcctgtgcctgccttccccaccccagcagtggcccctccccatcccctccctctgttcgtcccgtttgatgagaggctgtttactggggtggggtggcgagatgggcttgagggggctcagagcataaggcttcagggcccaagttgggagaagtgaccaaagtgtagccagttttctgagttcccgtgtgctagactggccagaagagagggtctggggcctggtcactcggccactctctcctgtttctggcctcttctcccttcactcccgtccagtctggttttgagagcaggggctgttctgcagcaccgcagggaagggaggagagatacctgctgcttccattgcttttcccttcctggagtcgatgcctttctaagggttggagctgctccttgcaggggcgggtcagtttcccaggccatgccggggtggccatctatggtagggctggaagctgaggctggccgccagctgtgggctggggtggggtgggtggggtcgggtggtggagaggccttagctgtcctggctggtgcccctcccaggctccttttcaccctgccccctgggcctgaggccccctgtgtccaagcctccccctggctcttcagttctctagcccttggctctgctgggtttcctgactgtagccacatctctcccgctccctaagggtaacctagccaatggaagctgccctttgggtaggtgctgggctcctgggagggcccagatgatggggtgaggcatgtctttccagaactttccctggcagggaggggatggcagaaactcagggaggggcttggggcccattgtatctggagagcctggattcctcttggcagtcttaggcccggccacttctgctacctttgcgctgctgtgagcctcaccctgggcccctgggccctgcttctctgctcccctgggtgatgggtgggcccagaaggtggcagtcccacaccttgtcctcccacctccctgaactgtccattgcttttatagggtgaggtaagagacagcctcccaagcccaggctttggcactcagaatgggcccagtgggggctgggcaggcccattgagggccaccgccgaggtttctcctagggctgttcctgggcctggctcttacaggctcgtcccccaggcctgcccttctccactgccccctcctgtgtctgggtccacacacccttcaggaagggggagcactgagaagcacagcacaggggctcagcctgggatccggtgatggtctgggcagaggctgggtcaggagtcccaaaggtcagtgacagtttctcagaagaggcccagcgtccacctctctcccagggccagacagcccttcctggctcccccatccccctatgggctcccagccccttgcaccctcattgctgttcagattaaagcctctgttttgcacctgtca

SEQ ID NO: 171263 - DNA, 2845 bp, Homo sapiens
  Payload ID: 13689
  Gene Symbol: PPP2R4
  Gene Name: protein phosphatase 2A activator, regulatory subunit 4
  Uniprot ID: Q15257
  ENST ID: ENST00000337738
  CDS Start-End: 288-1364
gcgcatgcgccccgcgcgccccgcactgacatggccgtcgcccggttccgcgcgtccgccgcgcgccggccgttaataggcttgctccctgagcgccccgcaccgacatggcggccgtcttcgctgtggtgactttaactctcggttttcggttatagccggccggcgctcacttgtcttcaggaagctcggagcctttggtggagccggggagaggaagggtgggtgcaagagtgaaaggcgagaggggactgcaagcatccgggtcggctcctggccggagcaagatggctgagggcgagcggcagccgccgccagattcttcagaggaggcccctccagccactcagaacttcatcattccaaaaaaggagatccacacagttccagacatgggcaaatggaagcgttctcaggcatacgctgactacatcggattcatccttaccctcaacgaaggtgtgaaggggaagaagctgaccttcgagtacagagtctccgagatgtggaatgaggttcatgaggaaaaggagcaggctgcaaagcagagtgtgtcctgcgatgaatgcataccattaccccgcgccgggcactgtgcaccttcggaggccattgagaaactagtcgctcttctcaacacgctggacaggtggattgatgagactcctccagtggaccagccctctcggtttgggaataaggcatacaggacctggtatgccaaacttgatgaggaagcagaaaacttggtggccacagtggtccctacccatctggcagctgctgtgcctgaggtggctgtttacctaaaggagtcagtggggaactccacgcgcattgactacggcacagggcatgaggcagccttcgctgctttcctctgctgtctctgcaagattggggtgctccgggtggatgaccaaatagctattgtcttcaaggtgttcaatcggtaccttgaggttatgcggaaactccagaaaacatacaggatggagccagccggcagccagggagtgtggggtctggatgacttccagtttctgcccttcatctggggcagttcgcagctgatagaccacccatacctggagcccagacactttgtggatgagaaggccgtgaatgagaaccacaaggactacatgttcctggagtgtatcctgtttattaccgagatgaagactggcccatttgcagagcactccaaccagctgtggaacatcagcgccgtcccttcctggtccaaagtgaaccagggtctcatccgcatgtataaggccgagtgcctggagaagttccctgtgatccagcacttcaagttcgggagcctgctgcccatccatcctgtcacgtcgggctaggaggggccaagccgaagagccacccaggccacagttcctgtgcctgccttccccaccccagcagtggcccctccccatcccctccctctgttcgtcccgtttgatgagaggctgtttactggggtggggtggcgagatgggcttgagggggctcagagcataaggcttcagggcccaagttgggagaagtgaccaaagtgtagccagttttctgagttcccgtgtgctagactggccagaagagagggtctggggcctggtcactcggccactctctcctgtttctggcctcttctcccttcactcccgtccagtctggttttgagagcaggggctgttctgcagcaccgcagggaagggaggagagatacctgctgcttccattgcttttcccttcctggagtcgatgcctttctaagggttggagctgctccttgcaggggcgggtcagtttcccaggccatgccggggtggccatctatggtagggctggaagctgaggctggccgccagctgtgggctggggtggggtgggtggggtcgggtggtggagaggccttagctgtcctggctggtgcccctcccaggctccttttcaccctgccccctgggcctgaggccccctgtgtccaagcctccccctggctcttcagttctctagcccttggctctgctgggtttcctgactgtagccacatctctcccgctccctaagggtaacctagccaatggaagctgccctttgggtaggtgctgggctcctgggagggcccagatgatggggtgaggcatgtctttccagaactttccctggcagggaggggatggcagaaactcagggaggggcttggggcccattgtatctggagagcctggattcctcttggcagtcttaggcccggccacttctgctacctttgcgctgctgtgagcctcaccctgggcccctgggccctgcttctctgctcccctgggtgatgggtgggcccagaaggtggcagtcccacaccttgtcctcccacctccctgaactgtccattgcttttatagggtgaggtaagagacagcctcccaagcccaggctttggcactcagaatgggcccagtgggggctgggcaggcccattgagggccaccgccgaggtttctcctagggctgttcctgggcctggctcttacaggctcgtcccccaggcctgcccttctccactgccccctcctgtgtctgggtccacacacccttcaggaagggggagcactgagaagcacagcacaggggctcagcctgggatccggtgatggtctgggcagaggctgggtcaggagtcccaaaggtcagtgacagtttctcagaagaggcccagcgtccacctctctcccagggccagacagcccttcctggctcccccatccccctatgggctcccagccccttgcaccctcattgctgttcagattaaagcctctgttttgcacctgtc

SEQ ID NO: 171264 - DNA, 2515 bp, Homo sapiens
  Payload ID: 13689
  Gene Symbol: PPP2R4
  Gene Name: protein phosphatase 2A activator, regulatory subunit 4
  Uniprot ID: Q15257
  ENST ID: ENST00000355007
  CDS Start-End: 188-1033
caccgacatggcggccgtcttcgctgtggtgactttaactctcggttttcggttatagccggccggcgctcacttgtcttcaggaagctcggagcctttggtggagccggggagaggaagggtgggtgcaagagtgaaaggcgagaggggactgcaagcatccgggtcggctcctggccggagcaagatggctgagggcgagcggcagccgccgccagattcttcagaggaggcccctccagccactcagaacttcatcattccaaaaaaggagatccacacagttccagacatgggcaaatggaagcgttctcaggcatacgctgactacatcggattcatccttaccctcaacgaaggtgtgaaggggaagaagctgaccttcgagtacagagtctccgaggaagcagaaaacttggtggccacagtggtccctacccatctggcagctgctgtgcctgaggtggctgtttacctaaaggagtcagtggggaactccacgcgcattgactacggcacagggcatgaggcagccttcgctgctttcctctgctgtctctgcaagattggggtgctccgggtggatgaccaaatagctattgtcttcaaggtgttcaatcggtaccttgaggttatgcggaaactccagaaaacatacaggatggagccagccggcagccagggagtgtggggtctggatgacttccagtttctgcccttcatctggggcagttcgcagctgatagaccacccatacctggagcccagacactttgtggatgagaaggccgtgaatgagaaccacaaggactacatgttcctggagtgtatcctgtttattaccgagatgaagactggcccatttgcagagcactccaaccagctgtggaacatcagcgccgtcccttcctggtccaaagtgaaccagggtctcatccgcatgtataaggccgagtgcctggagaagttccctgtgatccagcacttcaagttcgggagcctgctgcccatccatcctgtcacgtcgggctaggaggggccaagccgaagagccacccaggccacagttcctgtgcctgccttccccaccccagcagtggcccctccccatcccctccctctgttcgtcccgtttgatgagaggctgtttactggggtggggtggcgagatgggcttgagggggctcagagcataaggcttcagggcccaagttgggagaagtgaccaaagtgtagccagttttctgagttcccgtgtgctagactggccagaagagagggtctggggcctggtcactcggccactctctcctgtttctggcctcttctcccttcactcccgtccagtctggttttgagagcaggggctgttctgcagcaccgcagggaagggaggagagatacctgctgcttccattgcttttcccttcctggagtcgatgcctttctaagggttggagctgctccttgcaggggcgggtcagtttcccaggccatgccggggtggccatctatggtagggctggaagctgaggctggccgccagctgtgggctggggtggggtgggtggggtcgggtggtggagaggccttagctgtcctggctggtgcccctcccaggctccttttcaccctgccccctgggcctgaggccccctgtgtccaagcctccccctggctcttcagttctctagcccttggctctgctgggtttcctgactgtagccacatctctcccgctccctaagggtaacctagccaatggaagctgccctttgggtaggtgctgggctcctgggagggcccagatgatggggtgaggcatgtctttccagaactttccctggcagggaggggatggcagaaactcagggaggggcttggggcccattgtatctggagagcctggattcctcttggcagtcttaggcccggccacttctgctacctttgcgctgctgtgagcctcaccctgggcccctgggccctgcttctctgctcccctgggtgatgggtgggcccagaaggtggcagtcccacaccttgtcctcccacctccctgaactgtccattgcttttatagggtgaggtaagagacagcctcccaagcccaggctttggcactcagaatgggcccagtgggggctgggcaggcccattgagggccaccgccgaggtttctcctagggctgttcctgggcctggctcttacaggctcgtcccccaggcctgcccttctccactgccccctcctgtgtctgggtccacacacccttcaggaagggggagcactgagaagcacagcacaggggctcagcctgggatccggtgatggtctgggcagaggctgggtcaggagtcccaaaggtcagtgacagtttctcagaagaggcccagcgtccacctctctcccagggccagacagcccttcctggctcccccatccccctatgggctcccagccccttgcaccctcattgctgttcagattaaagcctctgttttgcacctgtca

SEQ ID NO: 171265 - DNA, 2653 bp, Homo sapiens
  Payload ID: 13689
  Gene Symbol: PPP2R4
  Gene Name: protein phosphatase 2A activator, regulatory subunit 4
  Uniprot ID: Q15257
  ENST ID: ENST00000357197
  CDS Start-End: 288-1172
gcgcatgcgccccgcgcgccccgcactgacatggccgtcgcccggttccgcgcgtccgccgcgcgccggccgttaataggcttgctccctgagcgccccgcaccgacatggcggccgtcttcgctgtggtgactttaactctcggttttcggttatagccggccggcgctcacttgtcttcaggaagctcggagcctttggtggagccggggagaggaagggtgggtgcaagagtgaaaggcgagaggggactgcaagcatccgggtcggctcctggccggagcaagatggctgagggcgagcggcagccgccgccagattcttcagaggaggcccctccagccactcagaacttcatcattccaaaaaaggagatccacacagttccagacatgggcaaatggaagcgttctcaggccattgagaaactagtcgctcttctcaacacgctggacaggtggattgatgagactcctccagtggaccagccctctcggtttgggaataaggcatacaggacctggtatgccaaacttgatgaggaagcagaaaacttggtggccacagtggtccctacccatctggcagctgctgtgcctgaggtggctgtttacctaaaggagtcagtggggaactccacgcgcattgactacggcacagggcatgaggcagccttcgctgctttcctctgctgtctctgcaagattggggtgctccgggtggatgaccaaatagctattgtcttcaaggtgttcaatcggtaccttgaggttatgcggaaactccagaaaacatacaggatggagccagccggcagccagggagtgtggggtctggatgacttccagtttctgcccttcatctggggcagttcgcagctgatagaccacccatacctggagcccagacactttgtggatgagaaggccgtgaatgagaaccacaaggactacatgttcctggagtgtatcctgtttattaccgagatgaagactggcccatttgcagagcactccaaccagctgtggaacatcagcgccgtcccttcctggtccaaagtgaaccagggtctcatccgcatgtataaggccgagtgcctggagaagttccctgtgatccagcacttcaagttcgggagcctgctgcccatccatcctgtcacgtcgggctaggaggggccaagccgaagagccacccaggccacagttcctgtgcctgccttccccaccccagcagtggcccctccccatcccctccctctgttcgtcccgtttgatgagaggctgtttactggggtggggtggcgagatgggcttgagggggctcagagcataaggcttcagggcccaagttgggagaagtgaccaaagtgtagccagttttctgagttcccgtgtgctagactggccagaagagagggtctggggcctggtcactcggccactctctcctgtttctggcctcttctcccttcactcccgtccagtctggttttgagagcaggggctgttctgcagcaccgcagggaagggaggagagatacctgctgcttccattgcttttcccttcctggagtcgatgcctttctaagggttggagctgctccttgcaggggcgggtcagtttcccaggccatgccggggtggccatctatggtagggctggaagctgaggctggccgccagctgtgggctggggtggggtgggtggggtcgggtggtggagaggccttagctgtcctggctggtgcccctcccaggctccttttcaccctgccccctgggcctgaggccccctgtgtccaagcctccccctggctcttcagttctctagcccttggctctgctgggtttcctgactgtagccacatctctcccgctccctaagggtaacctagccaatggaagctgccctttgggtaggtgctgggctcctgggagggcccagatgatggggtgaggcatgtctttccagaactttccctggcagggaggggatggcagaaactcagggaggggcttggggcccattgtatctggagagcctggattcctcttggcagtcttaggcccggccacttctgctacctttgcgctgctgtgagcctcaccctgggcccctgggccctgcttctctgctcccctgggtgatgggtgggcccagaaggtggcagtcccacaccttgtcctcccacctccctgaactgtccattgcttttatagggtgaggtaagagacagcctcccaagcccaggctttggcactcagaatgggcccagtgggggctgggcaggcccattgagggccaccgccgaggtttctcctagggctgttcctgggcctggctcttacaggctcgtcccccaggcctgcccttctccactgccccctcctgtgtctgggtccacacacccttcaggaagggggagcactgagaagcacagcacaggggctcagcctgggatccggtgatggtctgggcagaggctgggtcaggagtcccaaaggtcagtgacagtttctcagaagaggcccagcgtccacctctctcccagggccagacagcccttcctggctcccccatccccctatgggctcccagccccttgcaccctcattgctgttcagattaaagcctctgttttgcacctgtc

SEQ ID NO: 171266 - DNA, 2664 bp, Homo sapiens
  Payload ID: 13689
  Gene Symbol: PPP2R4
  Gene Name: protein phosphatase 2A activator, regulatory subunit 4
  Uniprot ID: Q15257
  ENST ID: ENST00000358994
  CDS Start-End: 213-1184
attgagacctgtggaggaggaaggaggaggtcaccgtccagctgtctctcccctgtccccacatgtcttctaagctgttggagccggccggcgctcacttgtcttcaggaagctcggagcctttggtggagccggggagaggaagggtgggtgcaagagtgaaaggcgagaggggactgcaagcatccgggtcggctcctggccggagcaagatggctgagggcgagcggcagccgccgccagattcttcagaggaggcccctccagccactcagaacttcatcattccaaaaaaggagatccacacagttccagacatgggcaaatggaagcgttctcaggcatacgctgactacatcggattcatccttaccctcaacgaaggtgtgaaggggaagaagctgaccttcgagtacagagtctccgaggccattgagaaactagtcgctcttctcaacacgctggacaggtggattgatgagactcctccagtggaccagccctctcggtttgggaataaggcatacaggacctggtatgccaaacttgatgaggaagcagaaaacttggtggccacagtggtccctacccatctggcagctgctgtgcctgaggtggctgtttacctaaaggagtcagtggggaactccacgcgcattgactacggcacagggcatgaggcagccttcgctgctttcctctgctgtctctgcaagattggggtgctccgggtggatgaccaaatagctattgtcttcaaggtgttcaatcggtaccttgaggttatgcggaaactccagaaaacatacaggatggagccagccggcagccagggagtgtggggtctggatgacttccagtttctgcccttcatctggggcagttcgcagctgatagaccacccatacctggagcccagacactttgtggatgagaaggccgtgaatgagaaccacaaggactacatgttcctggagtgtatcctgtttattaccgagatgaagactggcccatttgcagagcactccaaccagctgtggaacatcagcgccgtcccttcctggtccaaagtgaaccagggtctcatccgcatgtataaggccgagtgcctggagaagttccctgtgatccagcacttcaagttcgggagcctgctgcccatccatcctgtcacgtcgggctaggaggggccaagccgaagagccacccaggccacagttcctgtgcctgccttccccaccccagcagtggcccctccccatcccctccctctgttcgtcccgtttgatgagaggctgtttactggggtggggtggcgagatgggcttgagggggctcagagcataaggcttcagggcccaagttgggagaagtgaccaaagtgtagccagttttctgagttcccgtgtgctagactggccagaagagagggtctggggcctggtcactcggccactctctcctgtttctggcctcttctcccttcactcccgtccagtctggttttgagagcaggggctgttctgcagcaccgcagggaagggaggagagatacctgctgcttccattgcttttcccttcctggagtcgatgcctttctaagggttggagctgctccttgcaggggcgggtcagtttcccaggccatgccggggtggccatctatggtagggctggaagctgaggctggccgccagctgtgggctggggtggggtgggtggggtcgggtggtggagaggccttagctgtcctggctggtgcccctcccaggctccttttcaccctgccccctgggcctgaggccccctgtgtccaagcctccccctggctcttcagttctctagcccttggctctgctgggtttcctgactgtagccacatctctcccgctccctaagggtaacctagccaatggaagctgccctttgggtaggtgctgggctcctgggagggcccagatgatggggtgaggcatgtctttccagaactttccctggcagggaggggatggcagaaactcagggaggggcttggggcccattgtatctggagagcctggattcctcttggcagtcttaggcccggccacttctgctacctttgcgctgctgtgagcctcaccctgggcccctgggccctgcttctctgctcccctgggtgatgggtgggcccagaaggtggcagtcccacaccttgtcctcccacctccctgaactgtccattgcttttatagggtgaggtaagagacagcctcccaagcccaggctttggcactcagaatgggcccagtgggggctgggcaggcccattgagggccaccgccgaggtttctcctagggctgttcctgggcctggctcttacaggctcgtcccccaggcctgcccttctccactgccccctcctgtgtctgggtccacacacccttcaggaagggggagcactgagaagcacagcacaggggctcagcctgggatccggtgatggtctgggcagaggctgggtcaggagtcccaaaggtcagtgacagtttctcagaagaggcccagcgtccacctctctcccagggccagacagcccttcctggctcccccatccccctatgggctcccagccccttgcaccctcattgctgttcagattaaagcctctgttttgcacctgt

SEQ ID NO: 171267 - DNA, 2737 bp, Homo sapiens
  Payload ID: 13689
  Gene Symbol: PPP2R4
  Gene Name: protein phosphatase 2A activator, regulatory subunit 4
  Uniprot ID: Q15257
  ENST ID: ENST00000393370
  CDS Start-End: 284-1255
atgcgccccgcgcgccccgcactgacatggccgtcgcccggttccgcgcgtccgccgcgcgccggccgttaataggcttgctccctgagcgccccgcaccgacatggcggccgtcttcgctgtggtgactttaactctcggttttcggttatagccggccggcgctcacttgtcttcaggaagctcggagcctttggtggagccggggagaggaagggtgggtgcaagagtgaaaggcgagaggggactgcaagcatccgggtcggctcctggccggagcaagatggctgagggcgagcggcagccgccgccagattcttcagaggaggcccctccagccactcagaacttcatcattccaaaaaaggagatccacacagttccagacatgggcaaatggaagcgttctcaggcatacgctgactacatcggattcatccttaccctcaacgaaggtgtgaaggggaagaagctgaccttcgagtacagagtctccgaggccattgagaaactagtcgctcttctcaacacgctggacaggtggattgatgagactcctccagtggaccagccctctcggtttgggaataaggcatacaggacctggtatgccaaacttgatgaggaagcagaaaacttggtggccacagtggtccctacccatctggcagctgctgtgcctgaggtggctgtttacctaaaggagtcagtggggaactccacgcgcattgactacggcacagggcatgaggcagccttcgctgctttcctctgctgtctctgcaagattggggtgctccgggtggatgaccaaatagctattgtcttcaaggtgttcaatcggtaccttgaggttatgcggaaactccagaaaacatacaggatggagccagccggcagccagggagtgtggggtctggatgacttccagtttctgcccttcatctggggcagttcgcagctgatagaccacccatacctggagcccagacactttgtggatgagaaggccgtgaatgagaaccacaaggactacatgttcctggagtgtatcctgtttattaccgagatgaagactggcccatttgcagagcactccaaccagctgtggaacatcagcgccgtcccttcctggtccaaagtgaaccagggtctcatccgcatgtataaggccgagtgcctggagaagttccctgtgatccagcacttcaagttcgggagcctgctgcccatccatcctgtcacgtcgggctaggaggggccaagccgaagagccacccaggccacagttcctgtgcctgccttccccaccccagcagtggcccctccccatcccctccctctgttcgtcccgtttgatgagaggctgtttactggggtggggtggcgagatgggcttgagggggctcagagcataaggcttcagggcccaagttgggagaagtgaccaaagtgtagccagttttctgagttcccgtgtgctagactggccagaagagagggtctggggcctggtcactcggccactctctcctgtttctggcctcttctcccttcactcccgtccagtctggttttgagagcaggggctgttctgcagcaccgcagggaagggaggagagatacctgctgcttccattgcttttcccttcctggagtcgatgcctttctaagggttggagctgctccttgcaggggcgggtcagtttcccaggccatgccggggtggccatctatggtagggctggaagctgaggctggccgccagctgtgggctggggtggggtgggtggggtcgggtggtggagaggccttagctgtcctggctggtgcccctcccaggctccttttcaccctgccccctgggcctgaggccccctgtgtccaagcctccccctggctcttcagttctctagcccttggctctgctgggtttcctgactgtagccacatctctcccgctccctaagggtaacctagccaatggaagctgccctttgggtaggtgctgggctcctgggagggcccagatgatggggtgaggcatgtctttccagaactttccctggcagggaggggatggcagaaactcagggaggggcttggggcccattgtatctggagagcctggattcctcttggcagtcttaggcccggccacttctgctacctttgcgctgctgtgagcctcaccctgggcccctgggccctgcttctctgctcccctgggtgatgggtgggcccagaaggtggcagtcccacaccttgtcctcccacctccctgaactgtccattgcttttatagggtgaggtaagagacagcctcccaagcccaggctttggcactcagaatgggcccagtgggggctgggcaggcccattgagggccaccgccgaggtttctcctagggctgttcctgggcctggctcttacaggctcgtcccccaggcctgcccttctccactgccccctcctgtgtctgggtccacacacccttcaggaagggggagcactgagaagcacagcacaggggctcagcctgggatccggtgatggtctgggcagaggctgggtcaggagtcccaaaggtcagtgacagtttctcagaagaggcccagcgtccacctctctcccagggccagacagcccttcctggctcccccatccccctatgggctcccagccccttgcaccctcattgctgttcagattaaagcctctgttttgcacctgtca

SEQ ID NO: 171268 - DNA, 618 bp, Homo sapiens
  Payload ID: 13689
  Gene Symbol: PPP2R4
  Gene Name: protein phosphatase 2A activator, regulatory subunit 4
  ENST ID: ENST00000435132
  CDS Start-End: 125-310
gctatttatctgaacccaagtgaatccctgtgctggagaggcgctctgaggctcctggggagtcggtgggaacgacaccagaagctcaggtggagatcttatcttcctgaggctgctggatttgatgaagactggcccatttgcagagcactccaaccagctgtggaacatcagcgccgtcccttcctggtccaaagtgaaccagggtctcatccgcatgtataaggccgagtgcctggagaagttccctgtgatccagcacttcaagttcgggagcctgctgcccatccatcctgtcacgtcgggctaggaggggccaagccgaagagccacccaggccacagttcctgtgcctgccttccccaccccagcagtggcccctccccatcccctccctctgttcgtcccgtttgatgagaggctgtttactggggtggggtggcgagatgggcttgagggggctcagagcataaggcttcagggcccaagttgggagaagtgaccaaagtgtagccagttttctgagttcccgtgtgctagactggccagaagagagggtctggggcctggtcactcggccactctctcctgtttctggcctcttctcccttcactccc

SEQ ID NO: 171269 - DNA, 532 bp, Homo sapiens
  Payload ID: 13689
  Gene Symbol: PPP2R4
  Gene Name: protein phosphatase 2A activator, regulatory subunit 4
  ENST ID: ENST00000436883
  CDS Start-End: 145-270
agatttcagctggaagggaaggagctgacaggaaggcgctgtgcagagcctccccacccccgcccatccccccagttactgacagaggagccatttacaaaaggccgattctctggggagtggagaggcaggaacgcagcgtctatgaagactggcccatttgcagagcactccaaccagctgtggaacatcagcgccgtcccttcctggtccaaagtgaaccagggtctcatccgcatgtataaggccgaggctggcccttgtgactagttcatggcctcagacactgtactgtgggcaccatctcttgactcctggccggccttctcttctgggaaggggctgctccaggtcttcattggacccagagcttcctggatcccatcagcagaggcgggacaacggggaagggtgccagaggccagcggggtgggggagcacagatgcttccagttggcttggctccctgcacttggtcctgaaggggttaatgaggcttgaactgaacagaccgggccctcactcccttccg

SEQ ID NO: 171270 - DNA, 548 bp, Homo sapiens
  Payload ID: 13689
  Gene Symbol: PPP2R4
  Gene Name: protein phosphatase 2A activator, regulatory subunit 4
  ENST ID: ENST00000453358
  CDS Start-End: 161-548
gtgggagtccaggctgcccgaatgctgggtgggcagcgccgtggtcataagggggccttttgcatctctgggcagcgcgtgcttaaattcttcagaggaggcccctccagccactcagaacttcatcattccaaaaaaggagatccacacagttccagacatgggcaaatggaagcgttctcaggcatacgctgactacatcggattcatccttaccctcaacgaaggtgtgaaggggaagaagctgaccttcgagtacagagtctccgaggccattgagaaactagtcgctcttctcaacacgctggacaggtggattgatgagactcctccagtggaccagccctctcggtttgggaataaggcatacaggacctggtatgccaaacttgatgaggaagcagaaaacttggtggccacagtggtccctacccatctggcagctgctgtgcctgaggtggctgtttacctaaaggagtcagtggggaactccacgcgcattgactacggcacagggcatgaggcagccttcgctgctttcctctgct

SEQ ID NO: 171271 - DNA, 530 bp, Homo sapiens
  Payload ID: 13689
  Gene Symbol: PPP2R4
  Gene Name: protein phosphatase 2A activator, regulatory subunit 4
  ENST ID: ENST00000435305
  CDS Start-End: 35-490
ctctggggagtggagaggcaggaacgcagcgtctatgaagactggcccatttgcagagcactccaaccagctgtggaacatcagcgccgtcccttcctggtccaaagtgaaccagggtctcatccgcatgtataaggccgaggtgagtgggggctggccagtgtgcccgtccctgctgccgcacttggtcctgggctggggacaaagcaaaagatgtggaacctggggctcctgcttcctcctaccccactgttttgctctgaatcttaggccagcccctctgacacttggggcctcggaatctcccatctggggcatgggcagtcagagaagcaccagccaccccagccccgaaaagctgcagtccagctctgtcctgatgagcttggaggctgaggcaaggacctgctgcatggggagtgggggcgatgggggcctcccttctcctttatcaagtggccaaaggctcctcaaagctcgggcagtctgagtctggctctcccatggcatacctgggaagggtcttaccc

SEQ ID NO: 171272 - DNA, 490 bp, Homo sapiens
  Payload ID: 13689
  Gene Symbol: PPP2R4
  Gene Name: protein phosphatase 2A activator, regulatory subunit 4
  ENST ID: ENST00000440346
  CDS Start-End: 299-490
cttctgcctcagcctcccaagtagctgggaccgcaggcgcccgccaccacgcctggctaatttttttgtacttttttagtagagatgggatttcaccatgttagccaggatggtctcgatctccttaccttgtgatctgcctgccttggcctcccaaagtgctgggattacaggcgtgagccaccgcacctgacctgtttttttttcttctgtgaattgcctgtattcttcagaggaggcccctccagccactcagaacttcatcattccaaaaaaggagatccacacagttccagacatgggcaaatggaagcgttctcaggcatacgctgactacatcggattcatccttaccctcaacgaaggtgtgaaggggaagaagctgaccttcgagtacagagtctccgaggccattgagaaactagtcgctcttctcaacacgctggacaggtggattgatgagactcctccagtggaccagccctctcgg

SEQ ID NO: 171273 - DNA, 952 bp, Homo sapiens
  Payload ID: 13689
  Gene Symbol: PPP2R4
  Gene Name: protein phosphatase 2A activator, regulatory subunit 4
  ENST ID: ENST00000419582
  CDS Start-End: 274-459
cctggagggtcagactctttggcaagagggaggaccaggaatggagccgtccttgtgcctgcctctttcagctgctgtggcggccaccccttccccacctcctggccaggccaggctggctgctgcttcaggcacccctgcctcccatcggccctctcttccctgcctgcatggcaggcagagggctgtcggatacctgggtttggtcatacccaccttggtcctcttgcaaattgaccctttcctcatctcttctagctctgctggtggcagatgaagactggcccatttgcagagcactccaaccagctgtggaacatcagcgccgtcccttcctggtccaaagtgaaccagggtctcatccgcatgtataaggccgagtgcctggagaagttccctgtgatccagcacttcaagttcgggagcctgctgcccatccatcctgtcacgtcgggctaggaggggccaagccgaagagccacccaggccacagttcctgtgcctgccttccccaccccagcagtggcccctccccatcccctccctctgttcgtcccgtttgatgagaggctgtttactggggtggggtggcgagatgggcttgagggggctcagagcataaggcttcagggcccaagttgggagaagtgaccaaagtgtagccagttttctgagttcccgtgtgctagactggccagaagagagggtctggggcctggtcactcggccactctctcctgtttctggcctcttctcccttcactcccgtccagtctggttttgagagcaggggctgttctgcagcaccgcagggaagggaggagagatacctgctgcttccattgcttttcccttcctggagtcgatgcctttctaagggttggagctgctccttgcaggggcgggtcagtttcccaggccatgccggggtggccatctatggtagggctgg

SEQ ID NO: 171274 - DNA, 2526 bp, Homo sapiens
  Payload ID: 13689
  Gene Symbol: PPP2R4
  Gene Name: protein phosphatase 2A activator, regulatory subunit 4
  ENST ID: ENST00000452489
  CDS Start-End: 179-1045
gtgtgggaggctcaggagggcgagagtcatgacacggaggaactggaggggcaaaagctgaggggccccgaggagggactgagttgaatggccttaggggagagattcttcagaggaggcccctccagccactcagaacttcatcattccaaaaaaggagatccacacagttccagacatgggcaaatggaagcgttctcaggcatacgctgactacatcggattcatccttaccctcaacgaaggtgtgaaggggaagaagctgaccttcgagtacagagtctccgaggccattgagaaactagtcgctcttctcaacacgctggacaggtggattgatgagactcctccagtggaccagccctctcggtttgggaataaggcatacaggacctggtatgccaaacttgatgaggaagcagaaaacttggtggccacagtggtccctacccatctggcagctgctgtgcctgaggtggctgtttacctaaaggagtcagtggggaactccacgcgcattgactacggcacagggcatgaggcagccttcgctgctttcctctgctgtctctgcaagattggggtgctccgggtggatgaccaaatagctattgtcttcaaggtgttcaatcggtaccttgaggttatgcggaaactccagaaaacatacaggatggagccagccggcagccagggagtgtggggtctggatgacttccagtttctgcccttcatctggggcagttcgcagctgatagaccacccatacctggagcccagacactttgtggatgagaaggccgtgaatgagaaccacaaggactacatgttcctggagtgtatcctgtttattaccgagatgaagactggcccatttgcagagcactccaaccagctgtggaacatcagcgccgtcccttcctggtccaaagtgaaccagggtctcatccgcatgtataaggccgagtgcctggagaagttccctgtgatccagcacttcaagttcgggagcctgctgcccatccatcctgtcacgtcgggctaggaggggccaagccgaagagccacccaggccacagttcctgtgcctgccttccccaccccagcagtggcccctccccatcccctccctctgttcgtcccgtttgatgagaggctgtttactggggtggggtggcgagatgggcttgagggggctcagagcataaggcttcagggcccaagttgggagaagtgaccaaagtgtagccagttttctgagttcccgtgtgctagactggccagaagagagggtctggggcctggtcactcggccactctctcctgtttctggcctcttctcccttcactcccgtccagtctggttttgagagcaggggctgttctgcagcaccgcagggaagggaggagagatacctgctgcttccattgcttttcccttcctggagtcgatgcctttctaagggttggagctgctccttgcaggggcgggtcagtttcccaggccatgccggggtggccatctatggtagggctggaagctgaggctggccgccagctgtgggctggggtggggtgggtggggtcgggtggtggagaggccttagctgtcctggctggtgcccctcccaggctccttttcaccctgccccctgggcctgaggccccctgtgtccaagcctccccctggctcttcagttctctagcccttggctctgctgggtttcctgactgtagccacatctctcccgctccctaagggtaacctagccaatggaagctgccctttgggtaggtgctgggctcctgggagggcccagatgatggggtgaggcatgtctttccagaactttccctggcagggaggggatggcagaaactcagggaggggcttggggcccattgtatctggagagcctggattcctcttggcagtcttaggcccggccacttctgctacctttgcgctgctgtgagcctcaccctgggcccctgggccctgcttctctgctcccctgggtgatgggtgggcccagaaggtggcagtcccacaccttgtcctcccacctccctgaactgtccattgcttttatagggtgaggtaagagacagcctcccaagcccaggctttggcactcagaatgggcccagtgggggctgggcaggcccattgagggccaccgccgaggtttctcctagggctgttcctgggcctggctcttacaggctcgtcccccaggcctgcccttctccactgccccctcctgtgtctgggtccacacacccttcaggaagggggagcactgagaagcacagcacaggggctcagcctgggatccggtgatggtctgggcagaggctgggtcaggagtcccaaaggtcagtgacagtttctcagaagaggcccagcgtccacctctctcccagggccagacagcccttcctggctcccccatccccctatgggctcccagccccttgcaccctcattgctgttcagattaaagcctctgttttgcacctgtc

SEQ ID NO: 171275 - DNA, 949 bp, Homo sapiens
  Payload ID: 13689
  Gene Symbol: PPP2R4
  Gene Name: protein phosphatase 2A activator, regulatory subunit 4
  ENST ID: ENST00000455292
  CDS Start-End: 199-949
aggaggaaggaggaggtcaccgtccagctgtctctcccctgtccccacatgtcttctaagctgttggagccggccggcgctcacttgtcttcaggaagctcggagcctttggtggagccggggagaggaagggtgggtgcaagagtgaaaggcgagaggggactgcaagcatccgggtcggctcctggccggagcaagatggctgagggcgagcggcagccgccgccagattcttcagaggaggcccctccagccactcagaacttcatcattccaaaaaaggagatccacacagttccagacatgggcaaatggaagcgttctcaggcatacgctgactacatcggattcatccttaccctcaacgaaggtgtgaaggggaagaagctgaccttcgagtacagagtctccgagatgtggaatgaggttcatgaggaaaaggagcaggctgcaaagcagagtgtgtcctgcgatgaatgcataccattaccccgcgccgggcactgtgcaccttcggaggccattgagaaactagtcgctcttctcaacacgctggacaggtggattgatgagactcctccagtggaccagccctctcggtttgggaataaggcatacaggacctggtatgccaaacttgatgaggaagcagaaaacttggtggccacagtggtccctacccatctggcagctgctgtgcctgaggtggctgtttacctaaaggagtcagtggggaactccacgcgcattgactacggcacagggcatgaggcagccttcgctgctttcctctgctgtctctgcaagattggggtgctccgggtggatgaccaaatagctattgtcttcaaggtgttcaatcggtaccttgaggttatgcggaaactccagaaaacatacaggatggagccagccggcagccagggagtgtggggtctggatgacttcc

SEQ ID NO: 171276 - DNA, 645 bp, Homo sapiens
  Payload ID: 13689
  Gene Symbol: PPP2R4
  Gene Name: protein phosphatase 2A activator, regulatory subunit 4
  ENST ID: ENST00000455240
  CDS Start-End: 1-361
gtaccttgaggttatgcggaaactccagaaaacatacaggatggagccagccggcagccagggagtgtggggtctggatgacttccagtttctgcccttcatctggggcagttcgcagctgatagaccacccatacctggagcccagacactttgtggatgagaaggccgtgaatgagaaccacaaggactacatgttcctggagtgtatcctgtttattaccgaggtgaggaggaggggtgagagagaagcccatggctgcctccaggctcagatgaaccaaggctggtggccttacagtggatcagaagagccagagctgctgcccaaaatggcagggccggccggagcgggttattgaaaaggaagcaccactgggcctcttccgaaagagccgctgctgactgtcaggtcctccgcccagttctccttcagtttctcctgaacaccacaggagtcttgagatgagggtctaagacttggtcactaactggccttggtgactgctgcagcaggtctgaaagggtcggggcgggcggaggtttgtgggggagggtcagcatctttcggtggggccccacaagggtctgtagaaccatgtgctgtggatgtgtaaaatgaaaccaccagaggagatggagcgaa

SEQ ID NO: 171277 - DNA, 681 bp, Homo sapiens
  Payload ID: 13689
  Gene Symbol: PPP2R4
  Gene Name: protein phosphatase 2A activator, regulatory subunit 4
  ENST ID: ENST00000414331
  CDS Start-End: 285-681
cgctgtggtgactttaactctcggttttcggttatagccggccggcgctcacttgtcttcaggaagctcggagcctttggtggagccggggagaggaagggtgggtgcaagagtgaaaggcgagaggggactgcaagcatccgggtcggctcctggccggagcaagatggctgagggcgagcggcagccgccgccaggcatacgctgactacatcggattcatccttaccctcaacgaaggtgtgaaggggaagaagctgaccttcgagtacagagtctccgagatgtggaatgaggttcatgaggaaaaggagcaggctgcaaagcagagtgtgtcctgcgatgaatgcataccattaccccgcgccgggcactgtgcaccttcggaggccattgagaaactagtcgctcttctcaacacgctggacaggtggattgatgagactcctccagtggaccagccctctcggtttgggaataaggcatacaggacctggtatgccaaacttgatgaggaagcagaaaacttggtggccacagtggtccctacccatctggcagctgctgtgcctgaggtggctgtttacctaaaggagtcagtggggaactccacgcgcattgactacggcacagggcatgaggcagccttcgctgctttcctctgctgtctctgcaagattg

SEQ ID NO: 171278 - DNA, 567 bp, Homo sapiens
  Payload ID: 13689
  Gene Symbol: PPP2R4
  Gene Name: protein phosphatase 2A activator, regulatory subunit 4
  ENST ID: ENST00000417504
  CDS Start-End: 39-567
agagtctcgttctgttgtccaggctggagtgcagtggtatgatctcagctcactgcaacccccacctcctggactcaggtgatcctcctgcttcagcctcccaagtagctgggactacagattcttcagaggaggcccctccagccactcagaacttcatcattccaaaaaaggagatccacacagttccagacatgggcaaatggaagcgttctcaggtaccatttggaactgtggcatacgctgactacatcggattcatccttaccctcaacgaaggtgtgaaggggaagaagctgaccttcgagtacagagtctccgaggccattgagaaactagtcgctcttctcaacacgctggacaggtggattgatgagactcctccagtggaccagccctctcggtttgggaataaggcatacaggacctggtatgccaaacttgatgaggaagcagaaaacttggtggccacagtggtccctacccatctggcagctgctgtgcctgaggtggctgtttacctaaaggagtcagtggggaactccacgcgcattgactacggcacag

SEQ ID NO: 171279 - DNA, 967 bp, Homo sapiens
  Payload ID: 13689
  Gene Symbol: PPP2R4
  Gene Name: protein phosphatase 2A activator, regulatory subunit 4
  ENST ID: ENST00000417728
  CDS Start-End: 179-967
gtgtgggaggctcaggagggcgagagtcatgacacggaggaactggaggggcaaaagctgaggggccccgaggagggactgagttgaatggccttaggggagagattcttcagaggaggcccctccagccactcagaacttcatcattccaaaaaaggagatccacacagttccagacatgggcaaatggaagcgttctcaggcatacgctgactacatcggattcatccttaccctcaacgaaggtgtgaaggggaagaagctgaccttcgagtacagagtctccgaggccattgagaaactagtcgctcttctcaacacgctggacaggtggattgatgagactcctccagtggaccagccctctcggtttgggaataaggcatacaggacctggtatgccaaacttgatgaggaagcagaaaacttggtggccacagtggtccctacccatctggcagctgctgtgcctgaggtggctgtttacctaaaggagtcagtggggaactccacgcgcattgactacggcacagggcatgaggcagccttcgctgctttcctctgctgtctctgcaagattggggtgctccgggtggatgaccaaatagctattgtcttcaaggtgttcaatcggtaccttgaggttatgcggaaactccagaaaacatacaggatggagccagccggcagccagggagtgtggggtctggatgacttccagtttctgcccttcatctggggcagttcgcagctgatagaccacccatacctggagcccagacactttgtggatgagaaggccgtgaatgagaaccacaaggactacatgttcctggagtgtatcctgtttattaccgagatgaagactggcccatttgcagagcactccaaccagctgtggaacatcagcgccgtcccttcctggtccaaagtgaaccagggtctcatccgcatgtataaggccgag

SEQ ID NO: 171280 - DNA, 738 bp, Homo sapiens
  Payload ID: 13689
  Gene Symbol: PPP2R4
  Gene Name: protein phosphatase 2A activator, regulatory subunit 4
  ENST ID: ENST00000411917
  CDS Start-End: 1-656
agaaaacatacaggatggagccagccggcagccagggagtgtggggtctggatgacttccagtttctgcccttcatctggggcagttcgcagctgatagaccacccatacctggagcccagacactttgtggatgagaaggccgtgaatgagaaccacaaggactacatgttcctggagtgtatcctgtttattaccgagatgaagactggcccatttgcagagcactccaaccagctgtggaacatcagcgccgtcccttcctggtccaaagtgaaccagggtctcatccgcatgtataaggccgaggtgagtgggggctggccagtgtgcccgtccctgctgccgcacttggtcctgggctggggacaaagcaaaagatgtggaacctggggctcctgcttcctcctaccccactgttttgctctgaatcttaggccagcccctctgacacttggggcctcggaatctcccatctggggcatgggcagtcagagaagcaccagccaccccagccccgaaaagctgcagtccagctctgtcctgatgagcttggaggctgaggcaaggacctgctgcatggggagtgggggcgatgggggcctcccttctcctttatcaagtggccaaaggctcctcaaagctcgggcagtctgagtctggctctcccatggcatacctgggaagggtcttaccctttggaggcatctccaaagtgctgccttcaaatgttagtgtg

SEQ ID NO: 171281 - DNA, 949 bp, Homo sapiens
  Payload ID: 13689
  Gene Symbol: PPP2R4
  Gene Name: protein phosphatase 2A activator, regulatory subunit 4
  ENST ID: ENST00000445241
  CDS Start-End: 189-949
gcaccgacatggcggccgtcttcgctgtggtgactttaactctcggttttcggttatagccggccggcgctcacttgtcttcaggaagctcggagcctttggtggagccggggagaggaagggtgggtgcaagagtgaaaggcgagaggggactgcaagcatccgggtcggctcctggccggagcaagatggctgagggcgagcggcagccgccgccagattcttcagaggaggcccctccagccactcagaacttcatcattccaaaaaaggagatccacacagttccagacatgggcaaatggaagcgttctcaggcatacgctgactacatcggattcatccttaccctcaacgaaggtgtgaaggggaagaagctgaccttcgagtacagagtctccgagatgtggaatgaggttcatgaggaaaaggagcaggctgcaaagcagagtgtgtcctgcgatgaatgcataccattaccccgcgccgggcactgtgcaccttcggaggccattgagaaactagtcgctcttctcaacacgctggacaggtggattgatgagactcctccagtggaccagccctctcggtttgggaataaggcatacaggacctggtatgccaaacttgatgaggaagcagaaaacttggtggccacagtggtccctacccatctggcagctgctgtgcctgaggtggctgtttacctaaaggagtcagtggggaactccacgcgcattgactacggcacagggcatgaggcagccttcgctgctttcctctgctgtctctgcaagattggggtgctccgggtggatgaccaaatagctattgtcttcaaggtgttcaatcggtaccttgaggttatgcggaaactccagaaaacatacaggatggagccagccggcagccagggagtgtggggtctggatgacttccagtttctgcc

SEQ ID NO: 171282 - DNA, 988 bp, Homo sapiens
  Payload ID: 13689
  Gene Symbol: PPP2R4
  Gene Name: protein phosphatase 2A activator, regulatory subunit 4
  ENST ID: ENST00000423100
  CDS Start-End: 269-454
gaaggaacagggaggggagggcgtgcctagagttgttggctgttccgcaccttctccacaggtccgggttttcactttgggtctaggctcttgggcatggtgttcaacagtagaccctaggaggagtgtgcccaggagccggggtggctgcagcaagggcccatcttgccacgtggccgctggttgcagcacacgttgtgttggttctccagagcgcccaccctcttccacctcggagcagtgagcagcattttgcagtccctagttgatgaagactggcccatttgcagagcactccaaccagctgtggaacatcagcgccgtcccttcctggtccaaagtgaaccagggtctcatccgcatgtataaggccgagtgcctggagaagttccctgtgatccagcacttcaagttcgggagcctgctgcccatccatcctgtcacgtcgggctaggaggggccaagccgaagagccacccaggccacagttcctgtgcctgccttccccaccccagcagtggcccctccccatcccctccctctgttcgtcccgtttgatgagaggctgtttactggggtggggtggcgagatgggcttgagggggctcagagcataaggcttcagggcccaagttgggagaagtgaccaaagtgtagccagttttctgagttcccgtgtgctagactggccagaagagagggtctggggcctggtcactcggccactctctcctgtttctggcctcttctcccttcactcccgtccagtctggttttgagagcaggggctgttctgcagcaccgcagggaagggaggagagatacctgctgcttccattgcttttcccttcctggagtcgatgcctttctaagggttggagctgctccttgcaggggcgggtcagtttcccaggccatgccggggtggccatctatggtagggctggaagctgaggctggccgccagctgtgggctggggtggggtgg

SEQ ID NO: 171283 - DNA, 1153 bp, Homo sapiens
  Payload ID: 13689
  Gene Symbol: PPP2R4
  Gene Name: protein phosphatase 2A activator, regulatory subunit 4
  ENST ID: ENST00000414510
  CDS Start-End: 145-330
agatttcagctggaagggaaggagctgacaggaaggcgctgtgcagagcctccccacccccgcccatccccccagttactgacagaggagccatttacaaaaggccgattctctggggagtggagaggcaggaacgcagcgtctatgaagactggcccatttgcagagcactccaaccagctgtggaacatcagcgccgtcccttcctggtccaaagtgaaccagggtctcatccgcatgtataaggccgagtgcctggagaagttccctgtgatccagcacttcaagttcgggagcctgctgcccatccatcctgtcacgtcgggctaggaggggccaagccgaagagccacccaggccacagttcctgtgcctgccttccccaccccagcagtggcccctccccatcccctccctctgttcgtcccgtttgatgagaggctgtttactggggtggggtggcgagatgggcttgagggggctcagagcataaggcttcagggcccaagttgggagaagtgaccaaagtgtagccagttttctgagttcccgtgtgctagactggccagaagagagggtctggggcctggtcactcggccactctctcctgtttctggcctcttctcccttcactcccgtccagtctggttttgagagcaggggctgttctgcagcaccgcagggaagggaggagagatacctgctgcttccattgcttttcccttcctggagtcgatgcctttctaagggttggagctgctccttgcaggggcgggtcagtttcccaggccatgccggggtggccatctatggtagggctggaagctgaggctggccgccagctgtgggctggggtggggtgggtggggtcgggtggtggagaggccttagctgtcctggctggtgcccctcccaggctccttttcaccctgccccctgggcctgaggccccctgtgtccaagcctccccctggctcttcagttctctagcccttggctctgctgggtttcctgactgtagccacatctctcccgctccctaagggtaacctagccaatggaagctgccctttgggtaggtgctgggctcctgggagggcccagatgatggggtgaggcatgtctttccagaactttccctggcagggaggg

SEQ ID NO: 171284 - DNA, 870 bp, Homo sapiens
  Payload ID: 13689
  Gene Symbol: PPP2R4
  Gene Name: protein phosphatase 2A activator, regulatory subunit 4
  ENST ID: ENST00000434095
  CDS Start-End: 154-339
gctggagaggcgctctgaggctcctggggagtcggtgggaacgacaccagaagctcaggtggagatcttatcttcctgaggctgctggatttggtgggcgataggaatcaggccccctttttttggctgtgggagaaagaggggtgactgcggatgaagactggcccatttgcagagcactccaaccagctgtggaacatcagcgccgtcccttcctggtccaaagtgaaccagggtctcatccgcatgtataaggccgagtgcctggagaagttccctgtgatccagcacttcaagttcgggagcctgctgcccatccatcctgtcacgtcgggctaggaggggccaagccgaagagccacccaggccacagttcctgtgcctgccttccccaccccagcagtggcccctccccatcccctccctctgttcgtcccgtttgatgagaggctgtttactggggtggggtggcgagatgggcttgagggggctcagagcataaggcttcagggcccaagttgggagaagtgaccaaagtgtagccagttttctgagttcccgtgtgctagactggccagaagagagggtctggggcctggtcactcggccactctctcctgtttctggcctcttctcccttcactcccgtccagtctggttttgagagcaggggctgttctgcagcaccgcagggaagggaggagagatacctgctgcttccattgcttttcccttcctggagtcgatgcctttctaagggttggagctgctccttgcaggggcgggtcagtttcccaggccatgccggggtggccatctatggtagggctggaagctgaggctggccgccagctgtgggctggggtgggg

SEQ ID NO: 171285 - DNA, 567 bp, Homo sapiens
  Payload ID: 13689
  Gene Symbol: PPP2R4
  Gene Name: protein phosphatase 2A activator, regulatory subunit 4
  ENST ID: ENST00000432124
  CDS Start-End: 53-286
atttacaaaaggccgattctctggggagtggagaggcaggaacgcagcgtctatgaagactggcccatttgcagagcactccaaccagctgtggaacatcagcgccgtcccttcctggtccaaagtgaaccagggtctcatccgcatgtataaggccgaggccagcccctctgacacttggggcctcggaatctcccatctggggcatgggcagtcagagaagcaccagccaccccagccccgaaaagctgcagtccagctctgtcctgatgagcttggaggctgaggcaaggacctgctgcatggggagtgggggcgatgggggcctcccttctcctttatcaagtggccaaaggctcctcaaagctcgggcagtctgagtctggctctcccatggcatacctgggaagggtcttaccctttggaggcatctccaaagtgctgccttcaaatgttagtgtgtatgatcactgagtggtgggaggtctgagggtaggccgagaattggcatttttatggaccgcttcagggattttgatgcaaatggttttccctgctctcaaatca

SEQ ID NO: 171286 - DNA, 857 bp, Homo sapiens
  Payload ID: 13689
  Gene Symbol: PPP2R4
  Gene Name: protein phosphatase 2A activator, regulatory subunit 4
  ENST ID: ENST00000432651
  CDS Start-End: 130-315
agagggggtgggcctggaggggtggggcctagctgctgctgctatttatctgaacccaagtgaatccctgtgctggagaggcgctctgaggctcctggggagtcggtgggaacgacaccagaagctcagatgaagactggcccatttgcagagcactccaaccagctgtggaacatcagcgccgtcccttcctggtccaaagtgaaccagggtctcatccgcatgtataaggccgagtgcctggagaagttccctgtgatccagcacttcaagttcgggagcctgctgcccatccatcctgtcacgtcgggctaggaggggccaagccgaagagccacccaggccacagttcctgtgcctgccttccccaccccagcagtggcccctccccatcccctccctctgttcgtcccgtttgatgagaggctgtttactggggtggggtggcgagatgggcttgagggggctcagagcataaggcttcagggcccaagttgggagaagtgaccaaagtgtagccagttttctgagttcccgtgtgctagactggccagaagagagggtctggggcctggtcactcggccactctctcctgtttctggcctcttctcccttcactcccgtccagtctggttttgagagcaggggctgttctgcagcaccgcagggaagggaggagagatacctgctgcttccattgcttttcccttcctggagtcgatgcctttctaagggttggagctgctccttgcaggggcgggtcagtttcccaggccatgccggggtggccatctatggtagggctggaagctgaggctggccgccagctgtgggctggggtggggtgggtggggtc

SEQ ID NO: 171287 - DNA, 1602 bp, Homo sapiens
  Payload ID: 13690
  Gene Symbol: PP2D1
  Gene Name: protein phosphatase 2C-like domain containing 1
  Uniprot ID: A8MPX8
  ENST ID: ENST00000333083
  CDS Start-End: 196-1326
aacattccacacagggagctctaccatcaagtgaggggaatgcccaccatcgctatcatcaccatcaccactacttctgccacagccatcacattcacctctacctccaccatcaccatcactactcaagttggagaaatagaggccaggggaaggggataaagggagggcaaagaaaggtaattccaaaggaacatgagcaccaataatgctttaagagtgttttggaaatcaagagaatggaatatgaaaacatcaacatttgattcagatgaggatattctacttttacccaaaagaaaacgttttagaaagaaaaagtcaagaccagtgagacacaccaaacgccatgaagaggagcaggtctatgagcaagggaccacattaccctgttccatatgcaagcacgaaattgacctaactggtatttttctccataagaagcaacatgtagctctggccacgctgggtttccaatggatgggtagaaagaaaccacagccctcagtgattgctgttcagagacagttcatgatttctaaactattgtcatcttttatgttcactgaaaaaaccctacagagcattaataatgcttttgagctgctttggaaaaaacaaataccagcatactataagatttttgataacattgacaggagtgtcatatattctcaaaaaatatgtcatctgttaattaaaggagtgggcatttgtgaagacaggaattctacatggaaagctgacatgaatgataaattcactgtagtgagtaattttggtaacaaacctaatgtgtgtttttttggtttgtttgatggacatcacggtgcctcagcggcagagttgacatcaatggaactcccagttttacttctccatcagctttccaaatttgatccttcttaccaaatgacaactgatgagcaacaaataatcaattccttttacactgtgtttagagaagaatacgcagcaatagaagacctcttttctgccataaacaaaacagaagcagtgaggtgtgagtatgaggacacacacaaagcctttgcaaaagcattttggagaatggataggcttttaggtcttggaagaaaagaagtgtccagggttcaatggagtggctgctctgcagttacttgtatattggaaggcaaacctaaaagtccttatgctcataagaattggaaaagaaaaaatacccatgatgggttggcagagagctccccttcccaggagatgccaaaaataatttctggaatattacatgttgcaaacactggtaccaggagaaatgaacatttgcctgaatactatggctaagcatcataaataactttagaatctccttctaaacaaagaatgtttttgaaaagcccaaattaatgtgattctgggtgtcatctgtcacatttgtaaaatgagtatattatcacacaatccttcgcaactgtgccagcacttccctagcaaactgcaaacttgagtttttcaggaaaacagtttacatgagaaaaggcaagttctttcccatttcgaatgaagtaccattaaactctgtcacctagtgaaaaataataaaaatacttgcaactttta

SEQ ID NO: 171288 - DNA, 2151 bp, Homo sapiens
  Payload ID: 13690
  Gene Symbol: PP2D1
  Gene Name: protein phosphatase 2C-like domain containing 1
  Uniprot ID: A8MPX8
  ENST ID: ENST00000389050
  CDS Start-End: 259-2151
attgcttcacagtccttctgaatcataaagtgagttctgactgaggttccaggtgatgtagtgaacattccacacagggagctctaccatcaagtgaggggaatgcccaccatcgctatcatcaccatcaccactacttctgccacagccatcacattcacctctacctccaccatcaccatcactactcaagttggagaaatagaggccaggggaaggggataaagggagggcaaagaaaggtaattccaaaggaacatgagcaccaataatgctttaagagtgttttggaaatcaagagaatggaatatgaaaacatcaacatttgattcagatgaggatattctacttttacccaaaagaaaacgttttagaaagaaaaagtcaagaccagtgagacacaccaaacgccatgaagaggagcaggtctatgagcaagggaccacattaccctgttccatatgcaagcacgaaattgacctaactggtatttttctccataagaagcaacatgtagctctggccacgctgggtttccaatggatgggtagaaagaaaccacagccctcagtgattgctgttcagagacagttcatgatttctaaactattgtcatcttttatgttcactgaaaaaaccctacagagcattaataatgcttttgagctgctttggaaaaaacaaataccagcatactataagatttttgataacattgacaggagtgtcatatattctcaaaaaatatgtcatctgttaattaaaggagtgggcatttgtgaagacaggaattctacatggaaagctgacatgaatgataaattcactgtagtgagtaattttggtaacaaacctaatgtgtgtttttttggtttgtttgatggacatcacggtgcctcagcggcagagttgacatcaatggaactcccagttttacttctccatcagctttccaaatttgatccttcttaccaaatgacaactgatgagcaacaaataatcaattccttttacactgtgtttagagaagaatacgcagcaatagaagacctcttttctgccataaacaaaacagaagcagtgaggtgtgagtatgaggacacacacaaagcctttgcaaaagcattttggagaatggataggcttttaggtcttggaagaaaagaagtgtccagggttcaatggagtggctgctctgcagttacttgtatattggaaggcaaacctaaaagtccttatgctcataagaattggaaaagaaaaaatacccatgatgggttggcagagagctccccttcccaggagatgccaaaaataatttctggaatattacatgttgcaaacactggtaatgtgcaagcagtcttatgcagaaatgggaaaggtttttgcctaaccaaagaacatactacacgaaacacaaatgaaagaagaagaatacttcagaatggagcagtcattagttcaaatgaaccatacgggcttgtagaggggcaagtaaaaactacacgaggacttggatttcatggaaatctcaagctgaaaaaatccattatcccagcacctcaaactatttctgtccctatagatgacctatgtcaattccttattgtagctactaatggactttgggaagttttggataaagaggaagttactgccctggcaatgacaacatttcacatgtataaagaaacatactgtcctatcatacctaacaaatcaccatccaaagggcctctgcttttttcaaccagtgaaccaaaccttactaaatcacagagtaatatccacgtattgtttcagtataaatctgtatctgaagtacgtgtgtcaactacaaattccaaagaaaatttatccgattcaaactattctaaatactgtatttataaccctgagaatgtagaaacatttccagcagaaacgactcatcgtaaaccttgcagtgaaaaagtaactgacagaccaactagtgtaaatgatgtggcaacaaatgaaaaagaatcagacactaagagtttctatgaaggcgcagctgagtatgttagccatgaacttgtaaatgctgctttactggctggctccagagacaacattacagttatggtaatatttctcaatggaagtgaatatcagcttctgacataa

SEQ ID NO: 171289 - DNA, 4519 bp, Homo sapiens
  Payload ID: 13691
  Gene Symbol: PPP3CA
  Gene Name: protein phosphatase 3, catalytic subunit, alpha isozyme
  Uniprot ID: Q08209
  ENST ID: ENST00000323055
  CDS Start-End: 676-2085
aggagcggcgcggggaggcagaggcgagcgcgggcgatcgcggcggcgggacgtctccggcggccgcggcaccagcggcggcgctctgtgtggagaagcaggggcagcggcagcagcaacagcggcagcggcagcagcagcggcagcagcggcggccgcctctccgccgccggggacgccaaggtgcggctggtggcactgacatcggcggccctgcctctcctccctcgcccccggccttccccatgtgatcggtcttaatcctggccgtgtgtgcgcgcgtggggctccattccgcggtgctgggtctccgtgccggggtgggtgctcgtgtgtgcgcttctcctccccatcccccttcccccaagaataaaagaagaaccgggaggcgtgctcagaaaataaataaataaccaccacacacgcgcagcccggagcgagtcggcggggctggcggcagcggcggaggaggagtgaaggcggcggcggcggaggagggacgcgcggaaaaggcagcaactttaaagccagctcagagcctagacctccagccgagcggtttgcagcgcggcggcggcggcggcggcggcggcgttgagtgtctggcccgccggtccggtcggggtgtgcagtcggacggacgagcagcgcgtcgctgtcctccggcagctggagatgtccgagcccaaggcaattgatcccaagttgtcgacgaccgacagggtggtgaaagctgttccatttcctccaagtcaccggcttacagcaaaagaagtgtttgataatgatggaaaacctcgtgtggatatcttaaaggcgcatcttatgaaggagggaaggctggaagagagtgttgcattgagaataataacagagggtgcatcaattcttcgacaggaaaaaaatttgctggatattgatgcgccagtcactgtttgtggggacattcatggacaattctttgatttgatgaagctctttgaagtcgggggatctcctgccaacactcgctacctcttcttaggggactatgttgacagagggtacttcagtattgaatgtgtgctgtatttgtgggccttgaaaattctctaccccaaaacactgtttttacttcgtggaaatcatgaatgtagacatctaacagagtatttcacatttaaacaagaatgtaaaataaagtattcagaacgcgtatatgatgcctgtatggatgcctttgactgccttcccctggctgccctgatgaaccaacagttcctgtgtgtgcatggtggtttgtctccagagattaacactttagatgatatcagaaaattagaccgattcaaagaaccacctgcatatggacctatgtgtgatatcctgtggtcagaccccctggaagattttggaaatgagaagactcaggaacatttcactcacaacacagtcagggggtgttcatacttctacagttacccggctgtatgtgaattcttacagcacaataacttgttatctatactccgagcccacgaagcccaagatgcagggtaccgcatgtacaggaaaagccaaacaacaggcttcccttctctaattacaattttttcagcaccaaattacttagatgtatacaataacaaagtgactgagatgctggtaaatgtcctcaacatctgctcagatgatgaactagggtcagaagaagatggatttgatggtgcaacagctgcagcccggaaagaggtgataaggaacaagatccgagcaataggcaaaatggccagagtgttctcagtgctcagagaagagagtgagagtgtgctgacgctgaaaggcttgaccccaactggcatgctccccagcggagtactttctggagggaagcaaaccctgcaaagcgctatcaaaggattttcaccacaacataagatcactagcttcgaggaagccaagggcttagaccgaattaatgagaggatgccgcctcgcagagatgccatgccctctgacgccaaccttaactccatcaacaaggctctcacctcagagactaacggcacggacagcaatggcagtaatagcagcaatattcagtgaccacttcctgttcactttttttttttttttttttttttttttttgagctgcggggcatgatggggattgctgcatatcagcagttggatgttcttgcctctgacagtagcttatttgctctgggggccaggaattggattcagtttacactatcattaaaaaagagggagagagataataaactatattttggtggggatggtgattaaacacctcttttgggtatgccttttaaaaatgcttatagagaaaaaaaattttaaaaagaaagctaatgctagtatatactgcaatgttaggggaatgaacatgttttcctactgcattggggacttctagataggttaatgaaaggccttttattctgttactggacatgaaaactttgtctaatttcttactctattgtacgtttacagtcgcagcactaaaaatggatgacatcaaacatttttaacaaaatgatgtacaaactaaggactatttattgataatgttttgctactcttgtcagacaatggctataaactgaattaggcagtcttaaaaaaaaaaaaaaacagaaaaagaaaaaaaagaacgttgcaaatttgttaaaatgccaaaaaggacagtttaattttgtacagattatgcttacctcaggtttctttagtgtgcttgaatgcccttctttccatataacacttatcttcttcttaattcggcaatggaatatcttttaagttttaaaaaaactggaataattatatctatcttttttgccgtttatatttaggggtttttgttgataaaatcaagtcttggttgtggcttgctgaattaaatatttatgagtggtgcatttttaagtatagtgaacaagacaccatattaagtacagtgataaagcatctatattctgtaaaaaaaaaaaaaatctgcctatgcatgttttttaagaaaaaaaaaatggctgtatcggcctgtatgggactgtaatgcgcttagtggtctgacatatactggaaatgtatgtatactggcgtactttatattctctaaaatgcttaatgcctttgaaattttgtaatcaaaaaaaagctttgaaaaaatctaaaggggagagtattctttaaagtttttaacataagcttgtcaatgcacatgtagatggttagcatgtttagcaaaccttgtgaaattataataagtttgtagttacatgtgaaactctaaatgcatggcaactgttaatgtcataacagtttagttattttgttctgttctgtcatgtgccacaaaatatgtacttttttcacttttttccctttgtatatcagttacgggttacaactggttcattctgaaaacaacaacaacaaaagtccattcatattttttaacaattgtataagtgcccaagtaattcactacagcctaaagccttgcctttgtaatttgacttctgacatgttggcaatcaaagcatgcacttgtaacaatgaaaaagaaaaagcattttatattactactcaataaaatgtgcatgaacttacagaattctcatccttccactgagtccgctgaagggatttatgtgcacaaccaccatgtgtcttctaggtgctggcccaccaccacacatcacaggctgatttccacaggcttcttcctaggggcctcgtgatctgaggggtggtgcctacttccactgtaagaaagaatcttggtggatttgtgtctcaaatcagataagagaagcctgtttaaagagcagatgccatcttctggcttcctcaaggagccagttaaaaaaccagagcattcctttttattgaaaaataaaattaatttgttatcaggttgtttcagttgtattggatgccctatctatctgctaaagcaaaaagtactaggctactaagtgcattttcatcacagaaaagagttgcatttgtattaacaagaaatttgtatacccacgcttcagctactatctaatcatcacccgaagatttaagatacaccaaatttcagtttgtttgtaacattgttcatctttagtgcactttgttttatataataaagtatgcctgttatattaaataataagaatatggcaattagcgatatagcatacccaaacaaagatgttctcgatacagtctggcaaagactatcccaaggttattttaatgaattcagacattttttcctgtggatatttctccatcctaaaaaaagtggcaaccaaggaaaatatttagatgcaacttactagagtgatgatgtgaaagaaatggtgattctggtatcatggtgtttattttctttcttataactgcagagaaaatatcctgactaaaaaaaattcatttttttggattcctttcttttacaaattgtgctgaggcaactatggcatagaaataaacatttgacattaaaataa

SEQ ID NO: 171290 - DNA, 3604 bp, Homo sapiens
  Payload ID: 13691
  Gene Symbol: PPP3CA
  Gene Name: protein phosphatase 3, catalytic subunit, alpha isozyme
  Uniprot ID: Q08209
  ENST ID: ENST00000394853
  CDS Start-End: 532-2067
agcagcggcggccgcctctccgccgccggggacgccaaggtgcggctggtggcactgacatcggcggccctgcctctcctccctcgcccccggccttccccatgtgatcggtcttaatcctggccgtgtgtgcgcgcgtggggctccattccgcggtgctgggtctccgtgccggggtgggtgctcgtgtgtgcgcttctcctccccatcccccttcccccaagaataaaagaagaaccgggaggcgtgctcagaaaataaataaataaccaccacacacgcgcagcccggagcgagtcggcggggctggcggcagcggcggaggaggagtgaaggcggcggcggcggaggagggacgcgcggaaaaggcagcaactttaaagccagctcagagcctagacctccagccgagcggtttgcagcgcggcggcggcggcggcggcggcggcgttgagtgtctggcccgccggtccggtcggggtgtgcagtcggacggacgagcagcgcgtcgctgtcctccggcagctggagatgtccgagcccaaggcaattgatcccaagttgtcgacgaccgacagggtggtgaaagctgttccatttcctccaagtcaccggcttacagcaaaagaagtgtttgataatgatggaaaacctcgtgtggatatcttaaaggcgcatcttatgaaggagggaaggctggaagagagtgttgcattgagaataataacagagggtgcatcaattcttcgacaggaaaaaaatttgctggatattgatgcgccagtcactgtttgtggggacattcatggacaattctttgatttgatgaagctctttgaagtcgggggatctcctgccaacactcgctacctcttcttaggggactatgttgacagagggtacttcagtattgaatgtgtgctgtatttgtgggccttgaaaattctctaccccaaaacactgtttttacttcgtggaaatcatgaatgtagacatctaacagagtatttcacatttaaacaagaatgtaaaataaagtattcagaacgcgtatatgatgcctgtatggatgcctttgactgccttcccctggctgccctgatgaaccaacagttcctgtgtgtgcatggtggtttgtctccagagattaacactttagatgatatcagaaaattagaccgattcaaagaaccacctgcatatggacctatgtgtgatatcctgtggtcagaccccctggaagattttggaaatgagaagactcaggaacatttcactcacaacacagtcagggggtgttcatacttctacagttacccggctgtatgtgaattcttacagcacaataacttgttatctatactccgagcccacgaagcccaagatgcagggtaccgcatgtacaggaaaagccaaacaacaggcttcccttctctaattacaattttttcagcaccaaattacttagatgtatacaataacaaagctgcagtattgaagtatgagaacaatgttatgaatatcaggcaattcaactgttctcctcatccatactggcttccaaatttcatggatgtttttacttggtcccttccatttgttggggaaaaagtgactgagatgctggtaaatgtcctcaacatctgctcagatgatgaactagggtcagaagaagatggatttgatggtgcaacagctgcagcccggaaagaggtgataaggaacaagatccgagcaataggcaaaatggccagagtgttctcagtgctcagagaagagagtgagagtgtgctgacgctgaaaggcttgaccccaactggcatgctccccagcggagtactttctggagggaagcaaaccctgcaaagcgctatcaaaggattttcaccacaacataagatcactagcttcgaggaagccaagggcttagaccgaattaatgagaggatgccgcctcgcagagatgccatgccctctgacgccaaccttaactccatcaacaaggctctcacctcagagactaacggcacggacagcaatggcagtaatagcagcaatattcagtgaccacttcctgttcactttttttttttttttttttttttttttttgagctgcggggcatgatggggattgctgcatatcagcagttggatgttcttgcctctgacagtagcttatttgctctgggggccaggaattggattcagtttacactatcattaaaaaagagggagagagataataaactatattttggtggggatggtgattaaacacctcttttgggtatgccttttaaaaatgcttatagagaaaaaaaattttaaaaagaaagctaatgctagtatatactgcaatgttaggggaatgaacatgttttcctactgcattggggacttctagataggttaatgaaaggccttttattctgttactggacatgaaaactttgtctaatttcttactctattgtacgtttacagtcgcagcactaaaaatggatgacatcaaacatttttaacaaaatgatgtacaaactaaggactatttattgataatgttttgctactcttgtcagacaatggctataaactgaattaggcagtcttaaaaaaaaaaaaaaacagaaaaagaaaaaaaagaacgttgcaaatttgttaaaatgccaaaaaggacagtttaattttgtacagattatgcttacctcaggtttctttagtgtgcttgaatgcccttctttccatataacacttatcttcttcttaattcggcaatggaatatcttttaagttttaaaaaaactggaataattatatctatcttttttgccgtttatatttaggggtttttgttgataaaatcaagtcttggttgtggcttgctgaattaaatatttatgagtggtgcatttttaagtatagtgaacaagacaccatattaagtacagtgataaagcatctatattctgtaaaaaaaaaaaaaatctgcctatgcatgttttttaagaaaaaaaaaatggctgtatcggcctgtatgggactgtaatgcgcttagtggtctgacatatactggaaatgtatgtatactggcgtactttatattctctaaaatgcttaatgcctttgaaattttgtaatcaaaaaaaagctttgaaaaaatctaaaggggagagtattctttaaagtttttaacataagcttgtcaatgcacatgtagatggttagcatgtttagcaaaccttgtgaaattataataagtttgtagttacatgtgaaactctaaatgcatggcaactgttaatgtcataacagtttagttattttgttctgttctgtcatgtgccacaaaatatgtacttttttcacttttttccctttgtatatcagttacgggttacaactggttcattctgaaaacaacaacaacaaaagtccattcatattttttaacaattgtataagtgcccaagtaattcactacagcctaaagccttgcctttgtaatttgacttctgacatgttggcaatcaaagcatgcacttgtaacaatgaaaaagaaaaagcattttatattactactcaataaaatgtgcatgaactta

SEQ ID NO: 171291 - DNA, 4685 bp, Homo sapiens
  Payload ID: 13691
  Gene Symbol: PPP3CA
  Gene Name: protein phosphatase 3, catalytic subunit, alpha isozyme
  Uniprot ID: Q08209
  ENST ID: ENST00000394854
  CDS Start-End: 685-2250
ggtgagtggaggagcggcgcggggaggcagaggcgagcgcgggcgatcgcggcggcgggacgtctccggcggccgcggcaccagcggcggcgctctgtgtggagaagcaggggcagcggcagcagcaacagcggcagcggcagcagcagcggcagcagcggcggccgcctctccgccgccggggacgccaaggtgcggctggtggcactgacatcggcggccctgcctctcctccctcgcccccggccttccccatgtgatcggtcttaatcctggccgtgtgtgcgcgcgtggggctccattccgcggtgctgggtctccgtgccggggtgggtgctcgtgtgtgcgcttctcctccccatcccccttcccccaagaataaaagaagaaccgggaggcgtgctcagaaaataaataaataaccaccacacacgcgcagcccggagcgagtcggcggggctggcggcagcggcggaggaggagtgaaggcggcggcggcggaggagggacgcgcggaaaaggcagcaactttaaagccagctcagagcctagacctccagccgagcggtttgcagcgcggcggcggcggcggcggcggcggcgttgagtgtctggcccgccggtccggtcggggtgtgcagtcggacggacgagcagcgcgtcgctgtcctccggcagctggagatgtccgagcccaaggcaattgatcccaagttgtcgacgaccgacagggtggtgaaagctgttccatttcctccaagtcaccggcttacagcaaaagaagtgtttgataatgatggaaaacctcgtgtggatatcttaaaggcgcatcttatgaaggagggaaggctggaagagagtgttgcattgagaataataacagagggtgcatcaattcttcgacaggaaaaaaatttgctggatattgatgcgccagtcactgtttgtggggacattcatggacaattctttgatttgatgaagctctttgaagtcgggggatctcctgccaacactcgctacctcttcttaggggactatgttgacagagggtacttcagtattgaatgtgtgctgtatttgtgggccttgaaaattctctaccccaaaacactgtttttacttcgtggaaatcatgaatgtagacatctaacagagtatttcacatttaaacaagaatgtaaaataaagtattcagaacgcgtatatgatgcctgtatggatgcctttgactgccttcccctggctgccctgatgaaccaacagttcctgtgtgtgcatggtggtttgtctccagagattaacactttagatgatatcagaaaattagaccgattcaaagaaccacctgcatatggacctatgtgtgatatcctgtggtcagaccccctggaagattttggaaatgagaagactcaggaacatttcactcacaacacagtcagggggtgttcatacttctacagttacccggctgtatgtgaattcttacagcacaataacttgttatctatactccgagcccacgaagcccaagatgcagggtaccgcatgtacaggaaaagccaaacaacaggcttcccttctctaattacaattttttcagcaccaaattacttagatgtatacaataacaaagctgcagtattgaagtatgagaacaatgttatgaatatcaggcaattcaactgttctcctcatccatactggcttccaaatttcatggatgtttttacttggtcccttccatttgttggggaaaaagtgactgagatgctggtaaatgtcctcaacatctgctcagatgatgaactagggtcagaagaagatggatttgatggtgcaacagctgcagcccggaaagaggtgataaggaacaagatccgagcaataggcaaaatggccagagtgttctcagtgctcagagaagagagtgagagtgtgctgacgctgaaaggcttgaccccaactggcatgctccccagcggagtactttctggagggaagcaaaccctgcaaagcgctactgttgaggctattgaggctgatgaagctatcaaaggattttcaccacaacataagatcactagcttcgaggaagccaagggcttagaccgaattaatgagaggatgccgcctcgcagagatgccatgccctctgacgccaaccttaactccatcaacaaggctctcacctcagagactaacggcacggacagcaatggcagtaatagcagcaatattcagtgaccacttcctgttcactttttttttttttttttttttttttttttgagctgcggggcatgatggggattgctgcatatcagcagttggatgttcttgcctctgacagtagcttatttgctctgggggccaggaattggattcagtttacactatcattaaaaaagagggagagagataataaactatattttggtggggatggtgattaaacacctcttttgggtatgccttttaaaaatgcttatagagaaaaaaaattttaaaaagaaagctaatgctagtatatactgcaatgttaggggaatgaacatgttttcctactgcattggggacttctagataggttaatgaaaggccttttattctgttactggacatgaaaactttgtctaatttcttactctattgtacgtttacagtcgcagcactaaaaatggatgacatcaaacatttttaacaaaatgatgtacaaactaaggactatttattgataatgttttgctactcttgtcagacaatggctataaactgaattaggcagtcttaaaaaaaaaaaaaaacagaaaaagaaaaaaaagaacgttgcaaatttgttaaaatgccaaaaaggacagtttaattttgtacagattatgcttacctcaggtttctttagtgtgcttgaatgcccttctttccatataacacttatcttcttcttaattcggcaatggaatatcttttaagttttaaaaaaactggaataattatatctatcttttttgccgtttatatttaggggtttttgttgataaaatcaagtcttggttgtggcttgctgaattaaatatttatgagtggtgcatttttaagtatagtgaacaagacaccatattaagtacagtgataaagcatctatattctgtaaaaaaaaaaaaaatctgcctatgcatgttttttaagaaaaaaaaaatggctgtatcggcctgtatgggactgtaatgcgcttagtggtctgacatatactggaaatgtatgtatactggcgtactttatattctctaaaatgcttaatgcctttgaaattttgtaatcaaaaaaaagctttgaaaaaatctaaaggggagagtattctttaaagtttttaacataagcttgtcaatgcacatgtagatggttagcatgtttagcaaaccttgtgaaattataataagtttgtagttacatgtgaaactctaaatgcatggcaactgttaatgtcataacagtttagttattttgttctgttctgtcatgtgccacaaaatatgtacttttttcacttttttccctttgtatatcagttacgggttacaactggttcattctgaaaacaacaacaacaaaagtccattcatattttttaacaattgtataagtgcccaagtaattcactacagcctaaagccttgcctttgtaatttgacttctgacatgttggcaatcaaagcatgcacttgtaacaatgaaaaagaaaaagcattttatattactactcaataaaatgtgcatgaacttacagaattctcatccttccactgagtccgctgaagggatttatgtgcacaaccaccatgtgtcttctaggtgctggcccaccaccacacatcacaggctgatttccacaggcttcttcctaggggcctcgtgatctgaggggtggtgcctacttccactgtaagaaagaatcttggtggatttgtgtctcaaatcagataagagaagcctgtttaaagagcagatgccatcttctggcttcctcaaggagccagttaaaaaaccagagcattcctttttattgaaaaataaaattaatttgttatcaggttgtttcagttgtattggatgccctatctatctgctaaagcaaaaagtactaggctactaagtgcattttcatcacagaaaagagttgcatttgtattaacaagaaatttgtatacccacgcttcagctactatctaatcatcacccgaagatttaagatacaccaaatttcagtttgtttgtaacattgttcatctttagtgcactttgttttatataataaagtatgcctgttatattaaataataagaatatggcaattagcgatatagcatacccaaacaaagatgttctcgatacagtctggcaaagactatcccaaggttattttaatgaattcagacattttttcctgtggatatttctccatcctaaaaaaagtggcaaccaaggaaaatatttagatgcaacttactagagtgatgatgtgaaagaaatggtgattctggtatcatggtgtttattttctttcttataactgcagagaaaatatcctgactaaaaaaaattcatttttttggattcctttcttttacaaattgtgctgaggcaactatggcatagaaataaacatttgacattaaaataag

SEQ ID NO: 171292 - DNA, 4007 bp, Homo sapiens
  Payload ID: 13691
  Gene Symbol: PPP3CA
  Gene Name: protein phosphatase 3, catalytic subunit, alpha isozyme
  Uniprot ID: Q08209
  ENST ID: ENST00000512215
  CDS Start-End: 682-1551
gagtggaggagcggcgcggggaggcagaggcgagcgcgggcgatcgcggcggcgggacgtctccggcggccgcggcaccagcggcggcgctctgtgtggagaagcaggggcagcggcagcagcaacagcggcagcggcagcagcagcggcagcagcggcggccgcctctccgccgccggggacgccaaggtgcggctggtggcactgacatcggcggccctgcctctcctccctcgcccccggccttccccatgtgatcggtcttaatcctggccgtgtgtgcgcgcgtggggctccattccgcggtgctgggtctccgtgccggggtgggtgctcgtgtgtgcgcttctcctccccatcccccttcccccaagaataaaagaagaaccgggaggcgtgctcagaaaataaataaataaccaccacacacgcgcagcccggagcgagtcggcggggctggcggcagcggcggaggaggagtgaaggcggcggcggcggaggagggacgcgcggaaaaggcagcaactttaaagccagctcagagcctagacctccagccgagcggtttgcagcgcggcggcggcggcggcggcggcggcgttgagtgtctggcccgccggtccggtcggggtgtgcagtcggacggacgagcagcgcgtcgctgtcctccggcagctggagatgtccgagcccaaggcaattgatcccaagttgtcgacgaccgacagggtggtgaaagctgttccatttcctccaagtcaccggcttacagcaaaagaagtgtttgataatgatggaaaacctcgtgtggatatcttaaaggcgcatcttatgaaggagggaaggctggaagagagtgttgcattgagaataataacagagggtgcatcaattcttcgacaggaaaaaaatttgctggatattgatgcgccagtcactgctgcagtattgaagtatgagaacaatgttatgaatatcaggcaattcaactgttctcctcatccatactggcttccaaatttcatggatgtttttacttggtcccttccatttgttggggaaaaagtgactgagatgctggtaaatgtcctcaacatctgctcagatgatgaactagggtcagaagaagatggatttgatggtgcaacagctgcagcccggaaagaggtgataaggaacaagatccgagcaataggcaaaatggccagagtgttctcagtgctcagagaagagagtgagagtgtgctgacgctgaaaggcttgaccccaactggcatgctccccagcggagtactttctggagggaagcaaaccctgcaaagcgctactgttgaggctattgaggctgatgaagctatcaaaggattttcaccacaacataagatcactagcttcgaggaagccaagggcttagaccgaattaatgagaggatgccgcctcgcagagatgccatgccctctgacgccaaccttaactccatcaacaaggctctcacctcagagactaacggcacggacagcaatggcagtaatagcagcaatattcagtgaccacttcctgttcactttttttttttttttttttttttttttttgagctgcggggcatgatggggattgctgcatatcagcagttggatgttcttgcctctgacagtagcttatttgctctgggggccaggaattggattcagtttacactatcattaaaaaagagggagagagataataaactatattttggtggggatggtgattaaacacctcttttgggtatgccttttaaaaatgcttatagagaaaaaaaattttaaaaagaaagctaatgctagtatatactgcaatgttaggggaatgaacatgttttcctactgcattggggacttctagataggttaatgaaaggccttttattctgttactggacatgaaaactttgtctaatttcttactctattgtacgtttacagtcgcagcactaaaaatggatgacatcaaacatttttaacaaaatgatgtacaaactaaggactatttattgataatgttttgctactcttgtcagacaatggctataaactgaattaggcagtcttaaaaaaaaaaaaaaacagaaaaagaaaaaaaagaacgttgcaaatttgttaaaatgccaaaaaggacagtttaattttgtacagattatgcttacctcaggtttctttagtgtgcttgaatgcccttctttccatataacacttatcttcttcttaattcggcaatggaatatcttttaagttttaaaaaaactggaataattatatctatcttttttgccgtttatatttaggggtttttgttgataaaatcaagtcttggttgtggcttgctgaattaaatatttatgagtggtgcatttttaagtatagtgaacaagacaccatattaagtacagtgataaagcatctatattctgtaaaaaaaaaaaaaatctgcctatgcatgttttttaagaaaaaaaaaatggctgtatcggcctgtatgggactgtaatgcgcttagtggtctgacatatactggaaatgtatgtatactggcgtactttatattctctaaaatgcttaatgcctttgaaattttgtaatcaaaaaaaagctttgaaaaaatctaaaggggagagtattctttaaagtttttaacataagcttgtcaatgcacatgtagatggttagcatgtttagcaaaccttgtgaaattataataagtttgtagttacatgtgaaactctaaatgcatggcaactgttaatgtcataacagtttagttattttgttctgttctgtcatgtgccacaaaatatgtacttttttcacttttttccctttgtatatcagttacgggttacaactggttcattctgaaaacaacaacaacaaaagtccattcatattttttaacaattgtataagtgcccaagtaattcactacagcctaaagccttgcctttgtaatttgacttctgacatgttggcaatcaaagcatgcacttgtaacaatgaaaaagaaaaagcattttatattactactcaataaaatgtgcatgaacttacagaattctcatccttccactgagtccgctgaagggatttatgtgcacaaccaccatgtgtcttctaggtgctggcccaccaccacacatcacaggctgatttccacaggcttcttcctaggggcctcgtgatctgaggggtggtgcctacttccactgtaagaaagaatcttggtggatttgtgtctcaaatcagataagagaagcctgtttaaagagcagatgccatcttctggcttcctcaaggagccagttaaaaaaccagagcattcctttttattgaaaaataaaattaatttgttatcaggttgtttcagttgtattggatgccctatctatctgctaaagcaaaaagtactaggctactaagtgcattttcatcacagaaaagagttgcatttgtattaacaagaaatttgtatacccacgcttcagctactatctaatcatcacccgaagatttaagatacaccaaatttcagtttgtttgtaacattgttcatctttagtgcactttgttttatataataaagtatgcctgttatattaaataataagaatatggcaattagcgatatagcatacccaaacaaagatgttctcgatacagtctggcaaagactatcccaaggttattttaatgaattcagacattttttcctgtggatatttctccatcctaaaaaaagtggcaaccaaggaaaatatttagatgcaacttactagagtgatgatgtgaaagaaatggtgattctggtatcatggtgtttattttctttcttataactgcagagaaaatatcctgactaaaaaaaattcatttttttggattcctttcttttacaaattgtgctgaggcaactatggcatagaaataaacatttgacattaaaataagcagttgatgtgagtattgctt

SEQ ID NO: 171293 - DNA, 1958 bp, Homo sapiens
  Payload ID: 13691
  Gene Symbol: PPP3CA
  Gene Name: protein phosphatase 3, catalytic subunit, alpha isozyme
  ENST ID: ENST00000507176
  CDS Start-End: 140-1411
cagtcggacggacgagcagcgcgtcgctgtcctccggcagctggagatgtccgagcccaaggcaattgatcccaagttgtcgacgaccgacagggtggtgaaagtttgtggggacattcatggacaattctttgatttgatgaagctctttgaagtcgggggatctcctgccaacactcgctacctcttcttaggggactatgttgacagagggtacttcagtattgaatgtgtgctgtatttgtgggccttgaaaattctctaccccaaaacactgtttttacttcgtggaaatcatgaatgtagacatctaacagagtatttcacatttaaacaagaatgtaaaataaagtattcagaacgcgtatatgatgcctgtatggatgcctttgactgccttcccctggctgccctgatgaaccaacagttcctgtgtgtgcatggtggtttgtctccagagattaacactttagatgatatcagaaaattagaccgattcaaagaaccacctgcatatggacctatgtgtgatatcctgtggtcagaccccctggaagattttggaaatgagaagactcaggaacatttcactcacaacacagtcagggggtgttcatacttctacagttacccggctgtatgtgaattcttacagcacaataacttgttatctatactccgagcccacgaagcccaagatgcagggtaccgcatgtacaggaaaagccaaacaacaggcttcccttctctaattacaattttttcagcaccaaattacttagatgtatacaataacaaagctgcagtattgaagtatgagaacaatgttatgaatatcaggcaattcaactgttctcctcatccatactggcttccaaatttcatggatgtttttacttggtcccttccatttgttggggaaaaagtgactgagatgctggtaaatgtcctcaacatctgctcagatgatgaactagggtcagaagaagatggatttgatggtgcaacagctgcagcccggaaagaggtgataaggaacaagatccgagcaataggcaaaatggccagagtgttctcagtgctcagagaagagagtgagagtgtgctgacgctgaaaggcttgaccccaactggcatgctccccagcggagtactttctggagggaagcaaaccctgcaaagcgctactgttgaggctattgaggctgatgaagctatcaaaggattttcaccacaacataagatcactagcttcgaggaagccaagggcttagaccgaattaatgagaggatgccgcctcgcagagatgccatgccctctgacgccaaccttaactccatcaacaaggctctcacctcagagactaacggcacggacagcaatggcagtaatagcagcaatattcagtgaccacttcctgttcactttttttttttttttttttttttttttttgagctgcggggcatgatggggattgctgcatatcagcagttggatgttcttgcctctgacagtagcttatttgctctgggggccaggaattggattcagtttacactatcattaaaaaagagggagagagataataaactatattttggtggggatggtgattaaacacctcttttgggtatgccttttaaaaatgcttatagagaaaaaaaattttaaaaagaaagctaatgctagtatatactgcaatgttaggggaatgaacatgttttcctactgcattggggacttctagataggttaatgaaaggccttttattctgttactggacatgaaaactttgtctaatttcttactctattgtacgtttacagtcgcagcactaaaaatggatgacatcaaacatttttaacaaaatgatgtacaaactaaggactatttattgataatgttttgctactcttgtcagacaatggctataaactgaattaggcagtcttaa

SEQ ID NO: 171294 - DNA, 836 bp, Homo sapiens
  Payload ID: 13691
  Gene Symbol: PPP3CA
  Gene Name: protein phosphatase 3, catalytic subunit, alpha isozyme
  ENST ID: ENST00000492351
  CDS Start-End: 1-51
gcgccagtcactgaagctccacagatgaccccgattcacacaccaaggtaaaaacggatggctttcaaatgacacagaaaggagatttcacacatggcagggaaggaatgtaaactactgacaaccacccaaaggacttttctctgtgtaccttggtttgtggggacattcatggacaattctttgatttgatgaagctctttgaagtcgggggatctcctgccaacactcgctacctcttcttaggggactatgttgacagagggtacttcagtattgaaggtaatttgtcaaactcattaattaaaacaaaacagataacctttgaatagaggttcttccacagcctcccatctgcatctgctttagtgtgtgctgtatttgtgggccttgaaaattctctaccccaaaacactgtttttacttcgtggaaatcatgaatgtagacatctaacagagtatttcacatttaaacaagaatgtaaaataaagtattcagaacgcgtatatgatgcctgtatggatgcctttgactgccttcccctggctgccctgatgaaccaacagttcctgtgtgtgcatggtggtttgtctccagagattaacactttagatgatatcagaaaattagaccgattcaaagaaccacctgcatatggacctatgtgtgatatcctgtggtcagaccccctggaagattttggaaatgagaagactcaggaacatttcactcacaacacagtcagggggtgttcatacttctacagttacccggctgtatgtgaattcttacagcacaataacttgttatctatactccgagcccacgaagccca

SEQ ID NO: 171295 - DNA, 579 bp, Homo sapiens
  Payload ID: 13691
  Gene Symbol: PPP3CA
  Gene Name: protein phosphatase 3, catalytic subunit, alpha isozyme
  ENST ID: ENST00000529324
  CDS Start-End: 139-579
aaaaacaaccgtacaccgcatcgcagtcgtagctcttctccgcaagctgttccatttcctccaagtcaccggcttacagcaaaagaagtgtttgataatgatggaaaacctcgtgtggatatcttaaaggcgcatcttatgaaggagggaaggctggaagagagtgttgcattgagaataataacagagggtgcatcaattcttcgacaggaaaaaaatttgctggatattgatgcgccagtcactgtttgtggggacattcatggacaattctttgatttgatgaagctctttgaagtcgggggatctcctgccaacactcgctacctcttcttaggggactatgttgacagagggtacttcagtattgaatgtgtgctgtatttgtgggccttgaaaattctctaccccaaaacactgtttttacttcgtggaaatcatgaatgtagacatctaacagagtatttcacatttaaacaagaatgtaaaataaagtattcagaacgcgtatatgatgcctgtatggatgcctttgactgccttcccctggctgccctgatgaaccaacagttcctgtgt

SEQ ID NO: 171296 - DNA, 569 bp, Homo sapiens
  Payload ID: 13691
  Gene Symbol: PPP3CA
  Gene Name: protein phosphatase 3, catalytic subunit, alpha isozyme
  ENST ID: ENST00000525819
  CDS Start-End: 174-569
ggtgttggcggcggcggcggcggcggaggggggtaggttgtgcccgggactgtgtctgccgagctcggcggctgtgccttgctgttccatttcctccaagtcaccggcttacagcaaaagaagtgtttgataatgatggaaaacctcgtgtggatatcttaaaggcgcatcttatgaaggagggaaggctggaagagagtgttgcattgagaataataacagagggtgcatcaattcttcgacaggaaaaaaatttgctggatattgatgcgccagtcactgtttgtggggacattcatggacaattctttgatttgatgaagctctttgaagtcgggggatctcctgccaacactcgctacctcttcttaggggactatgttgacagagggtacttcagtattgaatgtgtgctgtatttgtgggccttgaaaattctctaccccaaaacactgtttttacttcgtggaaatcatgaatgtagacatctaacagagtatttcacatttaaacaagaatgtaaaataaagtattcagaacgcgtatatgatgcctgtatggatgccttt

SEQ ID NO: 171297 - DNA, 2418 bp, Homo sapiens
  Payload ID: 13692
  Gene Symbol: PPP3CB
  Gene Name: protein phosphatase 3, catalytic subunit, beta isozyme
  ENST ID: ENST00000342558
  CDS Start-End: 108-1598
agagggtccgccatgttccccggcggcgccgccgcttggctctggtagccgccgcccccgcccccaaccccgcccggcccagagcctagccgagccccgggcccagcatggccgccccggagccggcccgggctgcaccgcccccacccccgcccccgccgccccctcccggggctgaccgcgtcgtcaaagctgtccctttccccccaacacatcgcttgacatctgaagaagtatttgatttggatgggatacccagggttgatgttctgaagaaccacttggtgaaagaaggtcgagtagatgaagaaattgcgcttagaattatcaatgagggtgctgccatccttcggagagagaaaaccatgatagaagtagaagctccaatcacagtgtgtggtgacatccatggccaattttttgatctgatgaaactttttgaagtaggaggatcacctgctaatacacgatacctttttcttggcgattatgtggacagaggttattttagtatagagtgtgtcttatatttatgggttctgaagattctatacccaagcacattatttcttctgagaggcaaccatgaatgcagacaccttactgaatattttacctttaagcaggaatgtaaaattaagtattcggaaagagtctatgaagcttgtatggaagcttttgatagtttgcctcttgctgcacttttaaaccaacagtttctttgtgttcatggtggactttcaccagaaatacacacactggatgatattaggagattagatagattcaaagagccacctgcatttggaccaatgtgtgacttgttatggtccgatccttctgaagattttggaaatgaaaaatcacaggaacattttagtcacaatacagttcgaggatgttcttatttttataactatccagcagtgtgtgaatttttgcaaaacaataatttgttatcgattattagagctcatgaagctcaagatgcaggctatagaatgtacagaaaaagtcaaactacagggttcccttcattaataacaattttttcggcacctaattacttagatgtctacaataataaagctgctgtattaaagtatgaaaataatgtgatgaatattcgacagtttaactgttctccacatccttactggttgcctaattttatggatgtcttcacgtggtctttaccgtttgttggagaaaaagtgacagaaatgttggtaaatgttctgagtatttgctctgatgatgaactaatgactgaaggtgaagaccagtttgatggttcagctgcagcccggaaagaaatcataagaaacaaaattcgagcaattggcaagatggcaagagtcttctctgttctcagggaggagagtgaaagtgtgctgacactcaagggcctgactcccacagggatgttgcctagtggagtgttagctggaggacggcagaccctgcaaagtggtaatgatgttatgcaacttgctgtgcctcagatggactggggcacacctcactcttttgctaacaattcacataatgcatgcagggaattccttctgttttttagttcctgtctcagcagctgacctagacagggtactgtattagctagtgtctcattaatacctgatcagggcagaaaactgatagaatgggtattcctttcaattgaaaataatggtcagttcctcagcttttcatgaaatgatatgggagcagctcatatcataatgtctgaaatatttatttattcatctgtctaattcacccttttcttttaaaagccccagtttcagaatgtgaatcagggatattcctgttactaaaatggaaatgtaattccaagtttcttttttaattttttaaatttatgtcattgtattggactatgcttatatttaaaactacttaatttagagttaactacctgcttaggccccagaacattacttatgcccttcagttaccaaaagatttgtgcaaggttttgtaccctggtaaatgatgccaaagtttgttttctgtggtgtttgtcaaatgttctatgtataattaactgtctgtaacatgctgtttccttcctctgcagatgtagctgctttcctaaatctgtctgtctttctttaggttagctgtatgtctgtaaaagtatgttcaattaaattactccatcagacacttgtctgtcttgcaatgtagaagcagctttgtagcaccttgttttgaggtttgctgcatttgttgctgcactttgtgcattctgaacatgaatgtaacattagatattaagtcattgttataaggggttgaatttaaatcctgtaagtcaaaattgaaagggtgttattaagtgtgcctttattttgcatgaaaataaaaagaattatacgtaaagcattcctgtaa

SEQ ID NO: 171298 - DNA, 3501 bp, Homo sapiens
  Payload ID: 13692
  Gene Symbol: PPP3CB
  Gene Name: protein phosphatase 3, catalytic subunit, beta isozyme
  Uniprot ID: P16298
  ENST ID: ENST00000360663
  CDS Start-End: 113-1687
gggaaagagggtccgccatgttccccggcggcgccgccgcttggctctggtagccgccgcccccgcccccaaccccgcccggcccagagcctagccgagccccgggcccagcatggccgccccggagccggcccgggctgcaccgcccccacccccgcccccgccgccccctcccggggctgaccgcgtcgtcaaagctgtccctttccccccaacacatcgcttgacatctgaagaagtatttgatttggatgggatacccagggttgatgttctgaagaaccacttggtgaaagaaggtcgagtagatgaagaaattgcgcttagaattatcaatgagggtgctgccatccttcggagagagaaaaccatgatagaagtagaagctccaatcacagtgtgtggtgacatccatggccaattttttgatctgatgaaactttttgaagtaggaggatcacctgctaatacacgatacctttttcttggcgattatgtggacagaggttattttagtatagagtgtgtcttatatttatgggttctgaagattctatacccaagcacattatttcttctgagaggcaaccatgaatgcagacaccttactgaatattttacctttaagcaggaatgtaaaattaagtattcggaaagagtctatgaagcttgtatggaagcttttgatagtttgcctcttgctgcacttttaaaccaacagtttctttgtgttcatggtggactttcaccagaaatacacacactggatgatattaggagattagatagattcaaagagccacctgcatttggaccaatgtgtgacttgttatggtccgatccttctgaagattttggaaatgaaaaatcacaggaacattttagtcacaatacagttcgaggatgttcttatttttataactatccagcagtgtgtgaatttttgcaaaacaataatttgttatcgattattagagctcatgaagctcaagatgcaggctatagaatgtacagaaaaagtcaaactacagggttcccttcattaataacaattttttcggcacctaattacttagatgtctacaataataaagctgctgtattaaagtatgaaaataatgtgatgaatattcgacagtttaactgttctccacatccttactggttgcctaattttatggatgtcttcacgtggtctttaccgtttgttggagaaaaagtgacagaaatgttggtaaatgttctgagtatttgctctgatgatgaactaatgactgaaggtgaagaccagtttgatggttcagctgcagcccggaaagaaatcataagaaacaaaattcgagcaattggcaagatggcaagagtcttctctgttctcagggaggagagtgaaagtgtgctgacactcaagggcctgactcccacagggatgttgcctagtggagtgttagctggaggacggcagaccctgcaaagtgccacagttgaggctattgaggctgaaaaagcaatacgaggattctctccaccacatagaatctgcagttttgaagaggcaaagggtttggataggatcaatgagagaatgccacctcggaaagatgctgtacagcaagatggtttcaattctctgaacaccgcacatgccactgagaaccacgggacgggcaaccatactgcccagtgacccactacttcccagggactctcacatctcgggccccaaatggacagatcacccgaggagctggaggggtcggccaagctgactgtaaatttcacagtctctctgaagaaaccattgtgcttctgagaccctagcccccttcctggatggaggcttgagggccctgggacatgtgctatctgataagattgggtcatcgctgccaaggtggagagcagtgagcaaggggcttggggcaatttccagtggagggcatccacacctccattttatgcttgtggttcacacatttaagtttacaaatcagatttcttttccccttcagtagaattagattttgtttttcaatcatgatttcaaatgcaatcctaagagctaatgtggacttttctttttccatgaaatgtctttaaaggatgaattagcatggtcttaaaatacatttctgaggttactagctgtattttgaattgtgagcaaaatgccgagaaacccagttggcatttatacaaaatgttgacctcaggtctatagttcttaaatgtggctaattctgtaacatagtcttggtattttttaattatgaatgcatatcctatttccaggcaggctctcttacttgaacacaaatccaaaaactaatttagagtcttttttgcccagatcttttaagacttacaccccagagatttaagaagaaaacctctaaatttcaaaattatgaagaattacagaattactcatttaaggtactttaaaagaagtttgtacattgtcaaagtaaattttaattcaaatcatgtctgtaaaacttgacgtattttgtgtatgcatgttttcattttgcaaatatttaatatatagacctatgatgtacaggtacgacatgtataggttacctagatgttatgagaaattttagtttattgtgagtactcaagttgcttagagagccaccagggtgatttgctgctggctttctatcatttttatgttttaatgcaaaggaaattttaaaatgttctggaagtgtttttgattaagcaatgcagcctagaagcaatggttctgttcaatcattcagatgttagtggaagcataaaagtcaagactgcatgttgaaacctttcttttgatagttactgaactgcttggttaaactaaatggaaccatgtgctaatttttcacaattattgacctgtattgattgccactgtagtttggtatttccctttactttggtggcctgcttccctcatgccctggaatacaactcagagctccaggcagcggaaccatctattgttttgtttgccagaaagtgcaccctgtatggtctcctgtctaagttggaaatattatgcatgtgcaggactattcgagtattttataaacagtagcacacaataaattccatgcatgggccgctgctcctatctctgtgttgggttttatttggaagatgcaatctgatttgtccttttgatgcaaatcagaaaatcctgttactagagctgggatgtcctccggagattatctcgtggatagttcatggtaatttgattaattaaattctttataaattttgccttaaaaaaaacttttgttatatacttgttttacatgagcattagtaactgagcactagaggactttgaatgcctactgtaggcctcctaagtctaatatttaagatcactgtttattgtcttttaattgaaagaaaatatgttattgtctagaattttgttatagtggtattgggaatttactgggtgttctaacaataagaaaaatattagtgataattgca

SEQ ID NO: 171299 - DNA, 3119 bp, Homo sapiens
  Payload ID: 13692
  Gene Symbol: PPP3CB
  Gene Name: protein phosphatase 3, catalytic subunit, beta isozyme
  Uniprot ID: P16298
  ENST ID: ENST00000394828
  CDS Start-End: 136-1683
atgccggtcttagcccctctgtagggaaagagggtccgccatgttccccggcggcgccgccgcttggctctggtagccgccgcccccgcccccaaccccgcccggcccagagcctagccgagccccgggcccagcatggccgccccggagccggcccgggctgcaccgcccccacccccgcccccgccgccccctcccggggctgaccgcgtcgtcaaagctgtccctttccccccaacacatcgcttgacatctgaagaagtatttgatttggatgggatacccagggttgatgttctgaagaaccacttggtgaaagaaggtcgagtagatgaagaaattgcgcttagaattatcaatgagggtgctgccatccttcggagagagaaaaccatgatagaagtagaagctccaatcacagtgtgtggtgacatccatggccaattttttgatctgatgaaactttttgaagtaggaggatcacctgctaatacacgatacctttttcttggcgattatgtggacagaggttattttagtatagagtgtgtcttatatttatgggttctgaagattctatacccaagcacattatttcttctgagaggcaaccatgaatgcagacaccttactgaatattttacctttaagcaggaatgtaaaattaagtattcggaaagagtctatgaagcttgtatggaagcttttgatagtttgcctcttgctgcacttttaaaccaacagtttctttgtgttcatggtggactttcaccagaaatacacacactggatgatattaggagattagatagattcaaagagccacctgcatttggaccaatgtgtgacttgttatggtccgatccttctgaagattttggaaatgaaaaatcacaggaacattttagtcacaatacagttcgaggatgttcttatttttataactatccagcagtgtgtgaatttttgcaaaacaataatttgttatcgattattagagctcatgaagctcaagatgcaggctatagaatgtacagaaaaagtcaaactacagggttcccttcattaataacaattttttcggcacctaattacttagatgtctacaataataaagctgctgtattaaagtatgaaaataatgtgatgaatattcgacagtttaactgttctccacatccttactggttgcctaattttatggatgtcttcacgtggtctttaccgtttgttggagaaaaagtgacagaaatgttggtaaatgttctgagtatttgctctgatgatgaactaatgactgaaggtgaagaccagtttgatgtaggttcagctgcagcccggaaagaaatcataagaaacaaaattcgagcaattggcaagatggcaagagtcttctctgttctcagggaggagagtgaaagtgtgctgacactcaagggcctgactcccacagggatgttgcctagtggagtgttagctggaggacggcagaccctgcaaagtgcaatacgaggattctctccaccacatagaatctgcagttttgaagaggcaaagggtttggataggatcaatgagagaatgccacctcggaaagatgctgtacagcaagatggtttcaattctctgaacaccgcacatgccactgagaaccacgggacgggcaaccatactgcccagtgacccactacttcccagggactctcacatctcgggccccaaatggacagatcacccgaggagctggaggggtcggccaagctgactgtaaatttcacagtctctctgaagaaaccattgtgcttctgagaccctagcccccttcctggatggaggcttgagggccctgggacatgtgctatctgataagattgggtcatcgctgccaaggtggagagcagtgagcaaggggcttggggcaatttccagtggagggcatccacacctccattttatgcttgtggttcacacatttaagtttacaaatcagatttcttttccccttcagtagaattagattttgtttttcaatcatgatttcaaatgcaatcctaagagctaatgtggacttttctttttccatgaaatgtctttaaaggatgaattagcatggtcttaaaatacatttctgaggttactagctgtattttgaattgtgagcaaaatgccgagaaacccagttggcatttatacaaaatgttgacctcaggtctatagttcttaaatgtggctaattctgtaacatagtcttggtattttttaattatgaatgcatatcctatttccaggcaggctctcttacttgaacacaaatccaaaaactaatttagagtcttttttgcccagatcttttaagacttacaccccagagatttaagaagaaaacctctaaatttcaaaattatgaagaattacagaattactcatttaaggtactttaaaagaagtttgtacattgtcaaagtaaattttaattcaaatcatgtctgtaaaacttgacgtattttgtgtatgcatgttttcattttgcaaatatttaatatatagacctatgatgtacaggtacgacatgtataggttacctagatgttatgagaaattttagtttattgtgagtactcaagttgcttagagagccaccagggtgatttgctgctggctttctatcatttttatgttttaatgcaaaggaaattttaaaatgttctggaagtgtttttgattaagcaatgcagcctagaagcaatggttctgttcaatcattcagatgttagtggaagcataaaagtcaagactgcatgttgaaacctttcttttgatagttactgaactgcttggttaaactaaatggaaccatgtgctaatttttcacaattattgacctgtattgattgccactgtagtttggtatttccctttactttggtggcctgcttccctcatgccctggaatacaactcagagctccaggcagcggaaccatctattgttttgtttgccagaaagtgcaccctgtatggtctcctgtctaagttggaaatattatgcatgtgcaggactattcgagtattttataaacagtagcacacaataaattccatgcatgggccgctgctcct

SEQ ID NO: 171300 - DNA, 3149 bp, Homo sapiens
  Payload ID: 13692
  Gene Symbol: PPP3CB
  Gene Name: protein phosphatase 3, catalytic subunit, beta isozyme
  Uniprot ID: P16298
  ENST ID: ENST00000394829
  CDS Start-End: 136-1713
atgccggtcttagcccctctgtagggaaagagggtccgccatgttccccggcggcgccgccgcttggctctggtagccgccgcccccgcccccaaccccgcccggcccagagcctagccgagccccgggcccagcatggccgccccggagccggcccgggctgcaccgcccccacccccgcccccgccgccccctcccggggctgaccgcgtcgtcaaagctgtccctttccccccaacacatcgcttgacatctgaagaagtatttgatttggatgggatacccagggttgatgttctgaagaaccacttggtgaaagaaggtcgagtagatgaagaaattgcgcttagaattatcaatgagggtgctgccatccttcggagagagaaaaccatgatagaagtagaagctccaatcacagtgtgtggtgacatccatggccaattttttgatctgatgaaactttttgaagtaggaggatcacctgctaatacacgatacctttttcttggcgattatgtggacagaggttattttagtatagagtgtgtcttatatttatgggttctgaagattctatacccaagcacattatttcttctgagaggcaaccatgaatgcagacaccttactgaatattttacctttaagcaggaatgtaaaattaagtattcggaaagagtctatgaagcttgtatggaagcttttgatagtttgcctcttgctgcacttttaaaccaacagtttctttgtgttcatggtggactttcaccagaaatacacacactggatgatattaggagattagatagattcaaagagccacctgcatttggaccaatgtgtgacttgttatggtccgatccttctgaagattttggaaatgaaaaatcacaggaacattttagtcacaatacagttcgaggatgttcttatttttataactatccagcagtgtgtgaatttttgcaaaacaataatttgttatcgattattagagctcatgaagctcaagatgcaggctatagaatgtacagaaaaagtcaaactacagggttcccttcattaataacaattttttcggcacctaattacttagatgtctacaataataaagctgctgtattaaagtatgaaaataatgtgatgaatattcgacagtttaactgttctccacatccttactggttgcctaattttatggatgtcttcacgtggtctttaccgtttgttggagaaaaagtgacagaaatgttggtaaatgttctgagtatttgctctgatgatgaactaatgactgaaggtgaagaccagtttgatgtaggttcagctgcagcccggaaagaaatcataagaaacaaaattcgagcaattggcaagatggcaagagtcttctctgttctcagggaggagagtgaaagtgtgctgacactcaagggcctgactcccacagggatgttgcctagtggagtgttagctggaggacggcagaccctgcaaagtgccacagttgaggctattgaggctgaaaaagcaatacgaggattctctccaccacatagaatctgcagttttgaagaggcaaagggtttggataggatcaatgagagaatgccacctcggaaagatgctgtacagcaagatggtttcaattctctgaacaccgcacatgccactgagaaccacgggacgggcaaccatactgcccagtgacccactacttcccagggactctcacatctcgggccccaaatggacagatcacccgaggagctggaggggtcggccaagctgactgtaaatttcacagtctctctgaagaaaccattgtgcttctgagaccctagcccccttcctggatggaggcttgagggccctgggacatgtgctatctgataagattgggtcatcgctgccaaggtggagagcagtgagcaaggggcttggggcaatttccagtggagggcatccacacctccattttatgcttgtggttcacacatttaagtttacaaatcagatttcttttccccttcagtagaattagattttgtttttcaatcatgatttcaaatgcaatcctaagagctaatgtggacttttctttttccatgaaatgtctttaaaggatgaattagcatggtcttaaaatacatttctgaggttactagctgtattttgaattgtgagcaaaatgccgagaaacccagttggcatttatacaaaatgttgacctcaggtctatagttcttaaatgtggctaattctgtaacatagtcttggtattttttaattatgaatgcatatcctatttccaggcaggctctcttacttgaacacaaatccaaaaactaatttagagtcttttttgcccagatcttttaagacttacaccccagagatttaagaagaaaacctctaaatttcaaaattatgaagaattacagaattactcatttaaggtactttaaaagaagtttgtacattgtcaaagtaaattttaattcaaatcatgtctgtaaaacttgacgtattttgtgtatgcatgttttcattttgcaaatatttaatatatagacctatgatgtacaggtacgacatgtataggttacctagatgttatgagaaattttagtttattgtgagtactcaagttgcttagagagccaccagggtgatttgctgctggctttctatcatttttatgttttaatgcaaaggaaattttaaaatgttctggaagtgtttttgattaagcaatgcagcctagaagcaatggttctgttcaatcattcagatgttagtggaagcataaaagtcaagactgcatgttgaaacctttcttttgatagttactgaactgcttggttaaactaaatggaaccatgtgctaatttttcacaattattgacctgtattgattgccactgtagtttggtatttccctttactttggtggcctgcttccctcatgccctggaatacaactcagagctccaggcagcggaaccatctattgttttgtttgccagaaagtgcaccctgtatggtctcctgtctaagttggaaatattatgcatgtgcaggactattcgagtattttataaacagtagcacacaataaattccatgcatgggccgctgctcct

SEQ ID NO: 171301 - DNA, 608 bp, Homo sapiens
  Payload ID: 13692
  Gene Symbol: PPP3CB
  Gene Name: protein phosphatase 3, catalytic subunit, beta isozyme
  ENST ID: ENST00000430762
  CDS Start-End: 1-564
catccttactggttgcctaattttatggatgtcttcacgtggtctttaccgtttgttggagaaaaagtgacagaaatgttggtaaatgttctgagtatttgctctgatgatgaactaatgactgaaggtgaagaccagtttgatgaacggctcatatatggcaataaaaaagtaggttcagctgcagcccggaaagaaatcataagaaacaaaattcgagcaattggcaagatggcaagagtcttctctgttctcagggaggagagtgaaagtgtgctgacactcaagggcctgactcccacagggatgttgcctagtggagtgttagctggaggacggcagaccctgcaaagtgccacagttgaggctattgaggctgaaaaagcaatacgaggattctctccaccacatagaatctgcagttttgaagaggcaaagggtttggataggatcaatgagagaatgccacctcggaaagatgctgtacagcaagatggtttcaattctctgaacaccgcacatgccactgagaaccacgggacgggcaaccatactgcccagtgacccactacttcccagggactctcacatctcgggccccaaatgga

SEQ ID NO: 171302 - DNA, 2189 bp, Homo sapiens
  Payload ID: 13693
  Gene Symbol: PPP3CC
  Gene Name: protein phosphatase 3, catalytic subunit, gamma isozyme
  Uniprot ID: P48454
  ENST ID: ENST00000240139
  CDS Start-End: 328-1866
cacgagggcccgggccgcgagcagccgcggccgtcccggtcgccacccttagcagcggtcgcggtcggtgccgaagcggtgttccccgccttagccgctggcgcctcccaagagagcggccggtgggccctcgtcctgtcagtggcgtcggaggccggcgctgcggtggccgcgcccttctggtgctcggacaccgctgaggagccggggccgggcacggctggctgacggctccgggcagctaaggctgcccgaggagaaggcggcggccgcggcgtaggcgcacgtccggcgggctcctggagcctggaggaggccgaggggaccatgtccgggaggcgcttccacctctccaccaccgaccgcgtcatcaaagctgtcccctttcctccaacccaacggcttactttcaaggaagtatttgagaatgggaaacctaaagttgatgttttaaaaaaccatttggtaaaggaaggacgactggaagaggaagtagccttaaagataatcaatgatggggctgccatcctgaggcaagagaagactatgatagaagtagatgctccaatcacagtatgtggtgatattcatggacaattctttgacctaatgaagttatttgaagttggaggatcacctagtaacacacgctacctctttctgggtgactatgtggacagaggctatttcagtatagagtgtgtgctgtatttatggagtttaaagattaatcatcccaaaacattgtttctgcttcggggaaatcatgaatgcaggcatcttacagactatttcaccttcaaacaggaatgtcgaatcaaatattcggaacaggtgtatgatgcctgtatggagacatttgactgtcttcctcttgctgccctcttaaaccagcagtttctctgtgtacatggaggaatgtcacctgaaattacttctttagatgacattaggaaattagacaggtttacggaacctcccgcctttggacctgtgtgtgacctgctttggtctgatccctcagaggattatggcaatgagaagaccttggagcactatacccacaacactgtccgagggtgctcttatttctacagttaccctgcagtttgtgaatttttgcagaacaataatttactatcaattatcagagcccatgaagcccaagatgctgggtatcgaatgtacaggaagagccaagccacaggctttccatcacttattacaattttctctgcccccaattacctagatgtctataacaataaagctgctgtgttgaaatatgaaaacaatgtcatgaatatcaggcagtttaactgttctccacacccctactggcttccaaactttatggatgttttcacatggtctttgccttttgttggggaaaaagtcacagagatgctggtaaatgtgctcaacatatgctctgatgacgaactgatttctgatgatgaagcagaaggaagcactacagttcgtaaggagatcatcaggaataagatcagagccattgggaagatggcacgggtcttttcaattcttcggcaagaaagtgagagtgtgctgactctcaagggcctgactcccacaggcacactccctctgggcgtcctctcaggaggcaagcagactatcgagacagccacagtagaagcggtagaggcccgggaagccatcagagggttctcgcttcagcacaagatccggagttttgaagaagcgcgaggtctggaccgaattaatgagcgaatgccaccccgaaaggatagcatacacgctggtgggccaatgaaatctgtaacctcagcacactcacatgctgcgcacaggagcgaccaagggaagaaagcccattcatgacttagagtcctgccgtggctcaggtggatctaaaactcaagaacaaattctatttatttattattggaaaatgaaaagcaactcaaaacaacttcaacgtggaggtgcatttataattcagtctgcatttattctgtaaaaaggtggctgttttataaattcttttaatttatgttcaatatatataaaaagtgcatctgttttgtttttcccttttttctccataattttaagaaatgaatctgattgttgtcaacacatttgtgaagtcttgtgctataaaggggaacttcccctaataaaagggccttggaaacctcaaa

SEQ ID NO: 171303 - DNA, 2135 bp, Homo sapiens
  Payload ID: 13693
  Gene Symbol: PPP3CC
  Gene Name: protein phosphatase 3, catalytic subunit, gamma isozyme
  Uniprot ID: P48454
  ENST ID: ENST00000289963
  CDS Start-End: 287-1795
gccacccttagcagcggtcgcggtcggtgccgaagcggtgttccccgccttagccgctggcgcctcccaagagagcggccggtgggccctcgtcctgtcagtggcgtcggaggccggcgctgcggtggccgcgcccttctggtgctcggacaccgctgaggagccggggccgggcacggctggctgacggctccgggcagctaaggctgcccgaggagaaggcggcggccgcggcgtaggcgcacgtccggcgggctcctggagcctggaggaggccgaggggaccatgtccgggaggcgcttccacctctccaccaccgaccgcgtcatcaaagctgtcccctttcctccaacccaacggcttactttcaaggaagtatttgagaatgggaaacctaaagttgatgttttaaaaaaccatttggtaaaggaaggacgactggaagaggaagtagccttaaagataatcaatgatggggctgccatcctgaggcaagagaagactatgatagaagtagatgctccaatcacagtatgtggtgatattcatggacaattctttgacctaatgaagttatttgaagttggaggatcacctagtaacacacgctacctctttctgggtgactatgtggacagaggctatttcagtatagagtgtgtgctgtatttatggagtttaaagattaatcatcccaaaacattgtttctgcttcggggaaatcatgaatgcaggcatcttacagactatttcaccttcaaacaggaatgtcgaatcaaatattcggaacaggtgtatgatgcctgtatggagacatttgactgtcttcctcttgctgccctcttaaaccagcagtttctctgtgtacatggaggaatgtcacctgaaattacttctttagatgacattaggaaattagacaggtttacggaacctcccgcctttggacctgtgtgtgacctgctttggtctgatccctcagaggattatggcaatgagaagaccttggagcactatacccacaacactgtccgagggtgctcttatttctacagttaccctgcagtttgtgaatttttgcagaacaataatttactatcaattatcagagcccatgaagcccaagatgctgggtatcgaatgtacaggaagagccaagccacaggctttccatcacttattacaattttctctgcccccaattacctagatgtctataacaataaagctgctgtgttgaaatatgaaaacaatgtcatgaatatcaggcagtttaactgttctccacacccctactggcttccaaactttatggatgttttcacatggtctttgccttttgttggggaaaaagtcacagagatgctggtaaatgtgctcaacatatgctctgatgacgaactgatttctgatgatgaagcagaaggaagcactacagttcgtaaggagatcatcaggaataagatcagagccattgggaagatggcacgggtcttttcaattcttcggcaagaaagtgagagtgtgctgactctcaagggcctgactcccacaggcacactccctctgggcgtcctctcaggaggcaagcagactatcgagacagccatcagagggttctcgcttcagcacaagatccggagttttgaagaagcgcgaggtctggaccgaattaatgagcgaatgccaccccgaaaggatagcatacacgctggtgggccaatgaaatctgtaacctcagcacactcacatgctgcgcacaggagcgaccaagggaagaaagcccattcatgacttagagtcctgccgtggctcaggtggatctaaaactcaagaacaaattctatttatttattattggaaaatgaaaagcaactcaaaacaacttcaacgtggaggtgcatttataattcagtctgcatttattctgtaaaaaggtggctgttttataaattcttttaatttatgttcaatatatataaaaagtgcatctgttttgtttttcccttttttctccataattttaagaaatgaatctgattgttgtcaacacatttgtgaagtcttgtgctataaaggggaacttcccctaataaaagggccttggaaacctcaaacctgggtttctgacttg

SEQ ID NO: 171304 - DNA, 2094 bp, Homo sapiens
  Payload ID: 13693
  Gene Symbol: PPP3CC
  Gene Name: protein phosphatase 3, catalytic subunit, gamma isozyme
  Uniprot ID: P48454
  ENST ID: ENST00000397775
  CDS Start-End: 275-1840
agcggtcgcggtcggtgccgaagcggtgttccccgccttagccgctggcgcctcccaagagagcggccggtgggccctcgtcctgtcagtggcgtcggaggccggcgctgcggtggccgcgcccttctggtgctcggacaccgctgaggagccggggccgggcacggctggctgacggctccgggcagctaaggctgcccgaggagaaggcggcggccgcggcgtaggcgcacgtccggcgggctcctggagcctggaggaggccgaggggaccatgtccgggaggcgcttccacctctccaccaccgaccgcgtcatcaaagctgtcccctttcctccaacccaacggcttactttcaaggaagtatttgagaatgggaaacctaaagttgatgttttaaaaaaccatttggtaaaggaaggacgactggaagaggaagtagccttaaagataatcaatgatggggctgccatcctgaggcaagagaagactatgatagaagtagatgctccaatcacagtatgtggtgatattcatggacaattctttgacctaatgaagttatttgaagttggaggatcacctagtaacacacgctacctctttctgggtgactatgtggacagaggctatttcagtatagagtgtgtgctgtatttatggagtttaaagattaatcatcccaaaacattgtttctgcttcggggaaatcatgaatgcaggcatcttacagactatttcaccttcaaacaggaatgtcgaatcaaatattcggaacaggtgtatgatgcctgtatggagacatttgactgtcttcctcttgctgccctcttaaaccagcagtttctctgtgtacatggaggaatgtcacctgaaattacttctttagatgacattaggaaattagacaggtttacggaacctcccgcctttggacctgtgtgtgacctgctttggtctgatccctcagaggattatggcaatgagaagaccttggagcactatacccacaacactgtccgagggtgctcttatttctacagttaccctgcagtttgtgaatttttgcagaacaataatttactatcaattatcagagcccatgaagcccaagatgctgggtatcgaatgtacaggaagagccaagccacaggctttccatcacttattacaattttctctgcccccaattacctagatgtctataacaataaagctgctgtgttgaaatatgaaaacaatgtcatgaatatcaggcagtttaactgttctccacacccctactggcttccaaactttatggatgttttcacatggtctttgccttttgttggggaaaaagtcacagagatgctggtaaatgtgctcaacatatgctctgatgacgaactgatttctgatgatgaagcagaagatcactacattccaagctatcagaaaggaagcactacagttcgtaaggagatcatcaggaataagatcagagccattgggaagatggcacgggtcttttcaattcttcggcaagaaagtgagagtgtgctgactctcaagggcctgactcccacaggcacactccctctgggcgtcctctcaggaggcaagcagactatcgagacagccacagtagaagcggtagaggcccgggaagccatcagagggttctcgcttcagcacaagatccggagttttgaagaagcgcgaggtctggaccgaattaatgagcgaatgccaccccgaaaggatagcatacacgctggtgggccaatgaaatctgtaacctcagcacactcacatgctgcgcacaggagcgaccaagggaagaaagcccattcatgacttagagtcctgccgtggctcaggtggatctaaaactcaagaacaaattctatttatttattattggaaaatgaaaagcaactcaaaacaacttcaacgtggaggtgcatttataattcagtctgcatttattctgtaaaaaggtggctgttttataaattcttttaatttatgttcaatatatataaaaagtgcatctgttttgtttttcccttttttctccataattttaagaaatgaatctgattgttgtc

SEQ ID NO: 171305 - DNA, 460 bp, Homo sapiens
  Payload ID: 13693
  Gene Symbol: PPP3CC
  Gene Name: protein phosphatase 3, catalytic subunit, gamma isozyme
  ENST ID: ENST00000522000
  CDS Start-End: 1-460
gcacgtccggcgggctcctggagcctggaggaggccgaggggaccatgtccgggaggcgcttccacctctccaccaccgaccgcgtcatcaaagctgtcccctttcctccaacccaacggcttactttcaaggaagtatttgagaatgggaaacctaaagttgatgttttaaaaaaccatttggtaaaggaaggacgactggaagaggaagtagccttaaagataatcaatgatggggctgccatcctgaggcaagagaagactatgatagaagtagatgctccaatcacagtatgtggtgatattcatggacaattctttgacctaatgaagttatttgaagttggaggatcacctagtaacacacgctacctctttctgggtgactatgtggacagaggctatttcagtatagaggtaaaaattaaactggatatgttgggactattatattgtcttt

SEQ ID NO: 171306 - DNA, 680 bp, Homo sapiens
  Payload ID: 13693
  Gene Symbol: PPP3CC
  Gene Name: protein phosphatase 3, catalytic subunit, gamma isozyme
  ENST ID: ENST00000521651
  CDS Start-End: 1-608
agtgtgtgctgtatttatggagtttaaagattaatcatcccaaaacattgtttctgcttcggggaaatcatgaatgcaggcatcttacagactatttcaccttcaaacaggaatgtcgaatcaaatattcggaacaggtgtatgatgcctgtatggagacatttgactgtcttcctcttgctgccctcttaaaccagcagtttctctgtgtacatggaggaatgtcacctgaaattacttctttagatgacattaggaaattagacaggtttacggaacctcccgcctttggacctgtgtgtgacctgctttggtctgatccctcagaggattatggcaatgagaagaccttggagcactatacccacaacactgtccgagggtgctcttatttctacagttaccctgcagtttgtgaatttttgcagaacaataatttactatcaattatcagagcccatgaagcccaagatgctgggtatcgaatgtacaggaagagccaagccacaggctttccatcacttattacaattttctctgcccccaattacctagatgtctataacaataaagagtctgcgacacattcttttgattatcctcaatgatgggaaatcttcgtcctttgagggtggatttgatttttggacagccaaaagtcattcggagtcaagactgat

SEQ ID NO: 171307 - DNA, 1598 bp, Homo sapiens
  Payload ID: 13693
  Gene Symbol: PPP3CC
  Gene Name: protein phosphatase 3, catalytic subunit, gamma isozyme
  ENST ID: ENST00000518852
  CDS Start-End: 592-1572
gttccgggcccgggtaggggctggcaggagagaaggggccggctgcggggagggctggctgagaagaagcgaaaatgggcggttagcagcagggacccggagccggaggagccgagagcagcgcgtgcgccgagctctactgcctcgcgggaaggcggaagggtggggagggcggcgctcggggcgggaggcccggccgggtccgctaggacagcggggccgctgggaagttgtgagagcggcgctcgggggcgcgcttgcgtgcacgagggcccgggccgcgagcagccgcggccgtcccggtcgccacccttagcagcggtcgcggtcggtgccgaagcggtgttccccgccttagccgctggcgcctcccaagagagcggccggtgggccctcgtcctgtcagtggcgtcggaggccggcgctgcggtggccgcgcccttctggtgctcggacaccgctgaggagccggggccgggcacggctggctgacggctccgggcagctaaggctgcccgaggagaaggcggcggccgcggcgtaggcgcacgtccggcgggctcctggagcctggaggaggccgaggggaccatgtccgggaggcgcttccacctctccaccaccgaccgcgtcatcaaagctgtcccctttcctccaacccaacggcttactttcaaggaagtatttgagaatgggaaacctaaagttgatgttttaaaaaaccatttggtaaaggaaggacgactggaagaggaagtagccttaaagataatcaatgatggggctgccatcctgaggcaagagaagactatgatagaagtagatgctccaatcacagtatgtggtgatattcatggacaattctttgacctaatgaagttatttgaagttggaggatcacctagtaacacacgctacctctttctgggtgactatgtggacagaggctatttcagtatagagtgtgtgctgtatttatggagtttaaagattaatcatcccaaaacattgtttctgcttcggggaaatcatgaatgcaggcatcttacagactatttcaccttcaaacaggaatgtcgaatcaaatattcggaacaggtgtatgatgcctgtatggagacatttgactgtcttcctcttgctgccctcttaaaccagcagtttctctgtgtacatggaggaatgtcacctgaaattacttctttagatgacattaggaaattagacaggtttacggaacctcccgcctttggacctgtgtgtgacctgctttggtctgatccctcagaggattatggcaatgagaagaccttggagcactatacccacaacactgtccgagggtgctcttatttctacagttaccctgcagtttgtgaatttttgcagaacaataatttactatcaattatcagagcccatgaagcccaagatgctgggtatcgaatgtacaggaagagccaagccacaggctttccatcacttattacaattttctctgcccccaattacctagatgtctataacaataaaggtaaaggaatccagcaatatttgagtttgaatttatgagtaaacgtgagctctggtttaattgt

SEQ ID NO: 171308 - DNA, 619 bp, Homo sapiens
  Payload ID: 13693
  Gene Symbol: PPP3CC
  Gene Name: protein phosphatase 3, catalytic subunit, gamma isozyme
  ENST ID: ENST00000523620
  CDS Start-End: 217-619
gaggtattgttaacctattatccacaacttttcaaaagtatctttacaaagataattgtgctttcaaatcatctaaaataaatggctctaaagtagcttcatattctcctggcctatatcctttttcaaatgtgatacgttttagttcttccattgactggttttccttttttgttaggtcgaatcaaatattcggaacaggtgtatgatgcctgtatggagacatttgactgtcttcctcttgctgccctcttaaaccagcagtttctctgtgtacatggaggaatgtcacctgaaattacttctttagatgacattaggaaattagacaggtttacggaacctcccgcctttggacctgtgtgtgacctgctttggtctgatccctcagaggattatggcaatgagaagaccttggagcactatacccacaacactgtccgagggtgctcttatttctacagttaccctgcagtttgtgaatttttgcagaacaataatttactatcaattatcagagcccatgaagcccaagatgctgggtatcgaatgtacaggaagagccaagccacaggctttccatcacttattacaattttctctgcccccaattacctag

SEQ ID NO: 171309 - DNA, 626 bp, Homo sapiens
  Payload ID: 13693
  Gene Symbol: PPP3CC
  Gene Name: protein phosphatase 3, catalytic subunit, gamma isozyme
  ENST ID: ENST00000522034
  CDS Start-End: 1-626
gactatgtggacagaggctatttcagtatagaggtcgaatcaaatattcggaacaggtgtatgatgcctgtatggagacatttgactgtcttcctcttgctgccctcttaaaccagcagtttctctgtgtacatggaggaatgtcacctgaaattacttctttagatgacattaggaaattagacaggtttacggaacctcccgcctttggacctgtgtgtgacctgctttggtctgatccctcagaggattatggcaatgagaagaccttggagcactatacccacaacactgtccgagggtgctcttatttctacagttaccctgcagtttgtgaatttttgcagaacaataatttactatcaattatcagagcccatgaagcccaagatgctgggtatcgaatgtacaggaagagccaagccacaggctttccatcacttattacaattttctctgcccccaattacctagatgtctataacaataaagctgctgtgttgaaatatgaaaacaatgtcatgaatatcaggcagtttaactgttctccacacccctactggcttccaaactttatggatgttttcacatggtctttgccttttgttggggaaaaaggtaagaga

SEQ ID NO: 171310 - DNA, 3023 bp, Homo sapiens
  Payload ID: 13694
  Gene Symbol: PPP3R1
  Gene Name: protein phosphatase 3, regulatory subunit B, alpha
  Uniprot ID: P63098
  ENST ID: ENST00000234310
  CDS Start-End: 405-917
tgccttgaggttgcgggtcagcgcgagccgctgcagtgagtccgtcacggctccggcgcgagcgcgaggctgcagcccccgagtttcccggccgtcttcgccccctctccccctcctttcttcttctctgcctctcctgcctctcgccgctgctcctcccgcgctctccggctctgaatctcgaccttaatttatttccccctaccctgcccgctccctcgcgtgcccaatcgcccggccggcgcgggccccgcggcgccgcctcccctcccccacgcgcgccccctccccgccggcgacccgagggccgcagctgggccgccgccgccgtttcctgcgagccagcctgagcgcaacacttctccgagccagcgagccagcgagccgccgacccgccgagcaaaatgggaaatgaggcaagttatcctttggaaatgtgctcacactttgatgcggatgaaattaaaaggctaggaaagagatttaagaagcttgatttggacaattctggttctttgagtgtggaagagttcatgtctctgcctgagttacaacagaatcctttagtacagcgagtaatagatatattcgacacagatgggaatggagaagtagactttaaagaattcattgagggcgtctctcagttcagtgtcaaaggagataaggagcagaaattgaggtttgctttccgtatctatgacatggataaagatggctatatttccaatggggaactcttccaggtattgaagatgatggtggggaacaatctgaaagatacacagttacagcaaattgtagacaaaaccataataaatgcagataaggatggagatggaagaatatcctttgaagaattctgtgctgttgtaggtggcctagatatccacaaaaagatggtggtagatgtgtgactcttatcagagagtaccacccaacacttttgctttcttctccatctctgaagatctgctcaagacgtccagcaatgctctctgtgtatttaaatggaagtatttttctctgtgaagccacattttccaacatgagcctcatgaagccaactaagtgttattgaactgtaattctctcaataactcagtgtagcactttaaagtctgaaggacagcaacatgaaaagagcatatcaatgtggtggagaaagggaaggggttggctttttaatttatttttcttcatcttttataacaagaaagtatctatatatacatatgtaaatatttatatatagatatatgtagctttctatatatgtagtaggttggctttaatttaatatacttgattcagaaacaaaacaatagagtacaaaagtgccaagcagaacataaaacatccttacttttatttcacacagttttatatatagatagaagactgtacaatttgagccgggtgttaggccagctattttccttttcctgtgctttctcctttgagagattgacaaagcatttgttaacgtcctattatttaccttaattacatttttgtaacaaaggagtctgtaactttatttatacttatgaatatatccagggactacttctcattgctgagcagcttttaatacacctctgcttgaggagaaagtctagttcattgctactgccaagagctagttcttgtgttcatatagtaactgcacagggcttatagctgcttcattctgctactttgtaactaggagccattgcatttattaaatgtccctcagtaacgttaagtgctagttgtgattttatacataaaggccagaagctgtctgaggcaatcatgattgattgtatgtatcacttactgaagaatacctgaagtgatcatgtaactacttataagggatatccatttgtttgattacatgggtaaataatttgtcattaaacttgtgtttgaatcatgaattcccttgtttcaaaagacttgcagctaatctaaaaaactggtgatatttaatatgcatgtatgtatctaaacacccacatatatttgtggtttaagtgtgagaaatcttgctaatctatatgccacagaagagcaaaattgtatccaaatttatgccacttaaatttctttaccacgagggatagagcatgcatactggtttttttttcttgatttgcccatataattggtaatggataacttaataaatttgtgtgatataaaagtagtgtatcatgttctactgtttgatcttatcccttcccatttctgcaaaggtactgttagctggaagaaaaacattttggttagctttgtatgacagtagtctttccctttatagtttctctataaaaactggttttaaaatcagtggaaaagggcaggttgaatcaaggtgaatcaatctgaaattgagcacacctgcctgccatcgctgttccttcaactgagtgctgcacatcatgggctctgtctgtgagagaaaaatcccggtgcttggtgtccttgcatgacatggagttttgcatgtagatcaatttaaaatgtacctcttgtttacataatttgcataattttaaaagataatgttgccaaactttggaaatgttaatgttcagactgaaaatctccactacatgtaactttcttcctctggatcagtggcatggcttataatcccagccagtggtttgaactgttccagtgtcaactgccatgtgctctgcttcaagggggaactagccttttgtgaattttttgtacataagtatttgttacaaatattttagcaaatgctttctatttctcttgcttgtgcatatcttggctggcgttacagaaaaatagtgtaaacattatttccttaccggggaatgagggttttttctttttctttttttttttttttttttttagtttgtgtgtgggggtgggtaagggaggggatggtttatgttgaatgtttagtttttcttctgcatgatacgtcatgttgtgggatctttagaaaacttcatactgtatgaataagaaaataaaatatttgaaacttg

SEQ ID NO: 171311 - DNA, 684 bp, Homo sapiens
  Payload ID: 13694
  Gene Symbol: PPP3R1
  Gene Name: protein phosphatase 3, regulatory subunit B, alpha
  ENST ID: ENST00000409377
  CDS Start-End: 186-668
agtcgttagtttcctctttgtaatcaagagttgtatacacagtagagaaagttcagagtgctattccgcgtatatcagatactccatcatgcgattcagttattaggctttctctaaaagtctttgaacagttgtcagaagacttaaactggttgacgggaaatgaggcaagttatcctttggaaatgtgctcacactttgatgcggatgaaattaaaaggctaggaaagagatttaagaagcttgatttggacaattctggttctttgagtgtggaagagttcatgtctctgcctgagttacaacagaatcctttagtacagcgagtaatagatatattcgacacagatgggaatggagaagtagactttaaagaattcattgagggcgtctctcagttcagtgtcaaaggagataaggagcagaaattgaggtttgctttccgtatctatgacatggataaagatggctatatttccaatggggaactcttccaggtattgaagatgatggtggggaacaatctgaaagatacacagttacagcaaattgtagacaaaaccataataaatgcagataaggatggagatggaagaatatcctttgaagaattctgtgctgttgtaggtggcctagatatccacaaaaagatggtggtagatgtgtgactcttatcagagagta

SEQ ID NO: 171312 - DNA, 851 bp, Homo sapiens
  Payload ID: 13694
  Gene Symbol: PPP3R1
  Gene Name: protein phosphatase 3, regulatory subunit B, alpha
  ENST ID: ENST00000409752
  CDS Start-End: 123-692
ttggcatctcaggtgcctgggagccctttctcaaccacaccctggagtagggggctagcttgcatccctgcgttctcctcattacaaaaaagaattctgagaaggaaggtgatctattccctatgcaacctcagtgtccactgagaagggaatcttgtggtatggaactatgtggcaaaaagggaaatgaggcaagttatcctttggaaatgtgctcacactttgatgcggatgaaattaaaaggctaggaaagagatttaagaagcttgatttggacaattctggttctttgagtgtggaagagttcatgtctctgcctgagttacaacagaatcctttagtacagcgagtaatagatatattcgacacagatgggaatggagaagtagactttaaagaattcattgagggcgtctctcagttcagtgtcaaaggagataaggagcagaaattgaggtttgctttccgtatctatgacatggataaagatggctatatttccaatggggaactcttccaggtattgaagatgatggtggggaacaatctgaaagatacacagttacagcaaattgtagacaaaaccataataaatgcagataaggatggagatggaagaatatcctttgaagaattctgtgctgttgtaggtggcctagatatccacaaaaagatggtggtagatgtgtgactcttatcagagagtaccacccaacacttttgctttcttctccatctctgaagatctgctcaagacgtccagcaatgctctctgtgtatttaaatggaagtatttttctctgtgaagccacattttccaacatgagcctcatgaagccaactaagtgtt

SEQ ID NO: 171313 - DNA, 3387 bp, Homo sapiens
  Payload ID: 13695
  Gene Symbol: PPP3R2
  Gene Name: protein phosphatase 3, regulatory subunit B, beta
  Uniprot ID: Q96LZ3
  ENST ID: ENST00000374806
  CDS Start-End: 72-593
gggcacgagccccgcccgagctcaccgcccctgctcccctctccgaccctttgagccgtggccgttgccagatgtccacaatgggaaacgaggccagttacccggcggagatgtgctcccactttgacaatgatgaaattaaaaggctgggcaggaggtttaagaagttggacttggacaaatcagggtctctgagcgtggaggagttcatgtccctgccggagctgcgccacaacccgttggtgcggcgagtgatcgacgtcttcgacaccgacggtgatggagaagtggacttcaaggaattcatcctggggacctcccagttcagcgtcaagggcgacgaggagcagaagttgaggtttgcgttcagcatttacgacatggataaagatggctacatttccaacggggagctcttccaggtgctgaagatgatggtgggcaacaacctgacggactggcagctccagcagctggtcgacaaaaccatcatcatcctggacaaggatggcgatgggaagatatcctttgaggaattcagtgctgtggtcagagacctggagatccacaagaagctggtcctcatcgtatgagcctttttcttacaagcaccacccaacaacttctgctttcttccctatctctttcaagatttgctcaagacgtccaactgtctctctgacttatctggaagtatttctttttgtgaagccatatgtcctaacaggagcttcatcaccaactcagtgctattaattctccttctctgaatgactcagggtaccctatagggggaagagcaagtcaaatgagcatagtggggaaagaaaaggaaatggcttttataaacatcttttactttgttttgattcaaagaccaaactagaactttaaaagttcaaaaataagaaagtatacatttttgctgttatttctcatcattttgtatatgggaggaaatttataatttgcatgggtgttaggtgaactgttttcatttgcttgtgttcagatatcttgccagattgttaacttcctattgtagcaacagggacaaatatatttgtctttgctgggcatctcgtaatcacttttcttaggggacagaatcccatcttttccttcggcagattgcagccccattccccacaatgcatccagaaatcgctgtgcatgtttgaggggtaggagttcatttggcctcctcctgacttgttgctccagctcctgaacagaaactagcttcagggctcttataggaaatgctaagcctggactaagtgcccagctcagccatcatcctcattagcagtgggtttccagggttggcagcccacaccagcattaatttcaatgaaggggacctccagctaaatagggcaagcaaagtgttctcccagaaagtgctctcacctccgacactggtccctacccccaggtggagacaatgagacatttagttagttgtcctacggaggagaggcagtagagtcaggctgcagtggaatctccctaggatgccaaagtggcattatgtctgttgctcacagatgcagagactgacaattgtgtctccacagcagaggtggatgctagctacaccagctatgctgattttgaaaatcagatctgaggcctagaagagaaactgagagctctctcattccaggaagccttttccctagtggaacattcagtgcagaagtcctcacacactaacagatctccaccattgggtgagccggagcctgtggttccaggggagatccagaatgcatgtgtctcttcccacgcatttatgtcatgttggtagctttagatcagccatggtgagaaaagaacaaaagcttttagttgtttttgttttgttttggagaatttgtttaccagtaaatacatcactgcctgtaccccaaatgttaccagctccctgaggtgtcccacatactattgtgagttctcagagcatgaactgtcctcagaagagcagggctaggacttgtcccagcatctgtgcctccataccaatcctctttctcacagagaaccacttcccatataagatgcttaaggctctcaaaacagcagaacaatgaaacatactctccctacacttgcttagccaagagataccactcaggtaacttttttcaggacatggaagatctgtttcaaggagatttactgctattttatttggaagaagctggcaactggtcttgaccaaaatagaaaaaaaaaaaaaaagtccacaaatttaatcacttgtagggaacccatctatcaaggtaccctaccatatacttttgtatttaatagattacttagaaaccacaaaaataggaatccttaccccttcaattcctgttcaaccctaaaaactgtgataaacgctcccaaccctgtggtgatcagggttatgtaatgttcaaagattcagacacacctgggtttggattcagttgcaactgggttgttatcacactcacttctttttagctgtgtgagcatgaataatttacttagcctctctgtgtctttccacctaattaaagaggatccaccccagggttattttgaggattcaaaaaggcatgcaacacacctggagcacaattccactttcattcaactaattcccttcccttcccccttcttccccttctacaagatcaatatgtaaaggagacatgaggcttactggttgcttttgaacacttacttagttcttagctacacccactctaaaattaactggacattagtgtacagcccatgtccaagcccagagagaaaacaatgggaacaatttcaaggtcctcaccactccttcatttgcagaggggacaacagactttctgacctgagaactggagaatttttaaaacaaaatctctcattccagcccaacctatttaactttttgtggaggaattttacatggaggaagtgagcacatgtcatgctagccaagaggacattattgtcattaaagagaggcattatttatacaccctgcaatgtgcacattaaaatatggaaattttaaaattatgaccaagggcttgaaacatattggattacatgctcacatttaacaaagagaggaaatgtgtttcagtttctggagtggctggaatttacaagctaattgttcaataaatctactcaagatagttacctaaggctttgtggcaatgaccttgaactgagagcctgtatctggatttagcacttgaaagatctaactggatatttgggttaaaagaatcacatttattcccaaatcggaatgctttgtttttcctgtcagttaattgccagttgccaacaaatctagttctatacagtttcttgggatgatgataataaacatttattgagcaa

SEQ ID NO: 171314 - DNA, 1407 bp, Homo sapiens
  Payload ID: 13696
  Gene Symbol: PPP4C
  Gene Name: protein phosphatase 4, catalytic subunit
  Uniprot ID: P60510
  ENST ID: ENST00000279387
  CDS Start-End: 169-1092
cggggccggaagtaggagcggcggcggcggcggcggcggcggtcgaaagcggagtgaaagagggaggcagggagccggagagccggaaccggagtcgcagcggcggagacccctgtgcggtgcggagggggcggcggccccgactctgacccgcgccgggggtgggccatggcggagatcagcgacctggaccggcagatcgagcagctgcgtcgctgcgagctcatcaaggagagcgaagtcaaggccctgtgcgctaaggccagagagatcttggtagaggagagcaacgtgcagagggtggactcgccagtcacagtgtgcggcgacatccatggacaattctatgacctcaaagagctgttcagagtaggtggcgacgtccctgagaccaactacctcttcatgggggactttgtggaccgtggcttctatagcgtcgaaacgttcctcctgctgctggcacttaaggttcgctatcctgatcgcatcacactgatccggggcaaccatgagagtcgccagatcacgcaggtctatggcttctacgatgagtgcctgcgcaagtacggctcggtgactgtgtggcgctactgcactgagatctttgactacctcagcctgtcagccatcatcgatggcaagatcttctgcgtgcacgggggcctctccccctccatccagaccctggatcagattcggacaatcgaccgaaagcaagaggtgcctcatgatgggcccatgtgtgacctcctctggtctgacccagaagacaccacaggctggggcgtgagcccccgaggagccggctacctatttggcagtgacgtggtggcccagttcaacgcagccaatgacattgacatgatctgccgtgcccaccaactggtgatggaaggttacaagtggcacttcaatgagacggtgctcactgtgtggtcggcacccaactactgctaccgctgtgggaatgtggcagccatcttggagctggacgagcatctccagaaagatttcatcatctttgaggctgctccccaagagacacggggcatcccctccaagaagcccgtggccgactacttcctgtgaccccgcccggcccctgccccctccaacccttctggccctcgcaccactgtgactctgccatcttcctcagacggaggctgggcgtggggggggctgtcctggctctgctgtcccccaagagggtgcttcgagggtgaggacttctctggagaggcctggagacctagctccatgttcctcctcctctctccccacttgaaccatgaagtttccaataatttttttttctttttttccttcttttttctgtttgtttttagataaaaattttgagaaaaaaaatgaaaaaattctaataaaagaagaaaaatggtt

SEQ ID NO: 171315 - DNA, 846 bp, Homo sapiens
  Payload ID: 13696
  Gene Symbol: PPP4C
  Gene Name: protein phosphatase 4, catalytic subunit
  ENST ID: ENST00000563732
  CDS Start-End: 181-333
ttgcttccgcggcggggccggaagtaggagcggcggcggcggcggcggcggcggtcgaaagcggagtgaaagagggaggcagggagccggagagccggaaccggagtcgcagcggcggagacccctgtgcggtgcggagggggcggcggccccgactctgacccgcgccgggggtgggccatggcggagatcagcgacctggaccggcagatcgagcagctgcgtcgctgcgagctcatcaaggagagcgaagtcaaggccctgtgcgctaaggccaggtgtgcggcgacatccatggacaattctatgacctcaaagagctgttcagagtaggtggcgacgtccctgagaccaactacctcttcatgggggactttgtggaccgtggcttctatagcgtcgaaacgttcctcctgctgctggcacttaaggttcgctatcctgatcgcatcacactgatccggggcaaccatgagagtcgccagatcacgcaggtctatggcttctacgatgagtgcctgcgcaagtacggctcggtgactgtgtggcgctactgcactgagatctttgactacctcagcctgtcagccatcatcgatggcaagatcttctgcgtgcacgggggcctctccccctccatccagaccctggatcagattcggacaatcgaccgaaagcaagaggtgcctcatgatgggcccatgtgtgacctcctctggtctgacccagaagacaccacaggctggggcgtgagcccccgaggagccggctacctatttggcagtgacgtggtggcccagttcaacgcagccaatgacattgacatgatctgccgtgcccaccaac

SEQ ID NO: 171316 - DNA, 1333 bp, Homo sapiens
  Payload ID: 13696
  Gene Symbol: PPP4C
  Gene Name: protein phosphatase 4, catalytic subunit
  Uniprot ID: P60510
  ENST ID: ENST00000561610
  CDS Start-End: 154-1077
gtgggggagccgggccggctctagaatcgagttgtccgctccgagccccggacggacactgatccgcgggctcgtcttggcctttcccaggagacccctgtgcggtgcggagggggcggcggccccgactctgacccgcgccgggggtgggccatggcggagatcagcgacctggaccggcagatcgagcagctgcgtcgctgcgagctcatcaaggagagcgaagtcaaggccctgtgcgctaaggccagagagatcttggtagaggagagcaacgtgcagagggtggactcgccagtcacagtgtgcggcgacatccatggacaattctatgacctcaaagagctgttcagagtaggtggcgacgtccctgagaccaactacctcttcatgggggactttgtggaccgtggcttctatagcgtcgaaacgttcctcctgctgctggcacttaaggttcgctatcctgatcgcatcacactgatccggggcaaccatgagagtcgccagatcacgcaggtctatggcttctacgatgagtgcctgcgcaagtacggctcggtgactgtgtggcgctactgcactgagatctttgactacctcagcctgtcagccatcatcgatggcaagatcttctgcgtgcacgggggcctctccccctccatccagaccctggatcagattcggacaatcgaccgaaagcaagaggtgcctcatgatgggcccatgtgtgacctcctctggtctgacccagaagacaccacaggctggggcgtgagcccccgaggagccggctacctatttggcagtgacgtggtggcccagttcaacgcagccaatgacattgacatgatctgccgtgcccaccaactggtgatggaaggttacaagtggcacttcaatgagacggtgctcactgtgtggtcggcacccaactactgctaccgctgtgggaatgtggcagccatcttggagctggacgagcatctccagaaagatttcatcatctttgaggctgctccccaagagacacggggcatcccctccaagaagcccgtggccgactacttcctgtgaccccgcccggcccctgccccctccaacccttctggccctcgcaccactgtgactctgccatcttcctcagacggaggctgggcgtggggggggctgtcctggctctgctgtcccccaagagggtgcttcgagggtgaggacttctctggagaggcctggagacctagctccatgttcctcctcctctctccccacttgaaccatgaagtttccaataatttttttttctttttttccttcttttttctgtttgttt

SEQ ID NO: 171317 - DNA, 941 bp, Homo sapiens
  Payload ID: 13696
  Gene Symbol: PPP4C
  Gene Name: protein phosphatase 4, catalytic subunit
  ENST ID: ENST00000562664
  CDS Start-End: 141-941
ggcggcggcggcggtcgaaagcggagtgaaagagggaggcagggagccggagagccggaaccggagtcgcagcggcggagacccctgtgcggtgcggagggggcggcggccccgactctgacccgcgccgggggtgggccatggcggagatcagcgacctggaccggcagatcgagcagctgcgtcgctgcgagctcatcaaggagagcgaagtcaaggccctgtgcgctaaggccagagagatcttggtagaggagagcaacgtgcagagggtggactcgccagtcacagtgtgcggcgacatccatggacaattctatgacctcaaagagctgttcagagttcgctatcctgatcgcatcacactgatccggggcaaccatgagagtcgccagatcacgcaggtctatggcttctacgatgagtgcctgcgcaagtacggctcggtgactgtgtggcgctactgcactgagatctttgactacctcagcctgtcagccatcatcgatggcaagatcttctgcgtgcacgggggcctctccccctccatccagaccctggatcagattcggacaatcgaccgaaagcaagaggtgcctcatgatgggcccatgtgtgacctcctctggtctgacccagaagacaccacaggctggggcgtgagcccccgaggagccggctacctatttggcagtgacgtggtggcccagttcaacgcagccaatgacattgacatgatctgccgtgcccaccaactggtgatggaaggttacaagtggcacttcaatgagacggtgctcactgtgtggtcggcacccaactactgctaccgctgtgggaatgtggcagccatcttggagctggacgagcatctccagaaagatttcatcatctttgaggctgctccccaagagacacggggcatcccctccaagaagccc

SEQ ID NO: 171318 - DNA, 742 bp, Homo sapiens
  Payload ID: 13696
  Gene Symbol: PPP4C
  Gene Name: protein phosphatase 4, catalytic subunit
  ENST ID: ENST00000562222
  CDS Start-End: 133-742
tcgaaagcggagtgaaagagggaggcagggagccggagagccggaaccggagtcgcagcggcggtaatagagacccctgtgcggtgcggagggggcggcggccccgactctgacccgcgccgggggtgggccatggcggagatcagcgacctggaccggcagatcgagcagctgcgtcgctgcgagctcatcaaggagagcgaagtcaaggccctgtgcgctaaggccagagagatcttggtagaggagagcaacgtgcagagggtggactcgccagtcacagtgtgcggcgacatccatggacaattctatgacctcaaagagctgttcagagttcgctatcctgatcgcatcacactgatccggggcaaccatgagagtcgccagatcacgcaggtctatggcttctacgatgagtgcctgcgcaagtacggctcggtgactgtgtggcgctactgcactgagatctttgactacctcagcctgtcagccatcatcgatggcaagatcttctgcgtgcacgggggcctctccccctccatccagaccctggatcagattcggacaatcgaccgaaagcaagaggtgcctcatgatgggcccatgtgtgacctcctctggtctgacccagaagacaccacaggctggggcgtgagcccccgaggagccggctacctatttggcagtgacgtggtggcccagttcaacgcagccaatgacattgacatgatctgccgtgccc

SEQ ID NO: 171319 - DNA, 815 bp, Homo sapiens
  Payload ID: 13696
  Gene Symbol: PPP4C
  Gene Name: protein phosphatase 4, catalytic subunit
  ENST ID: ENST00000563597
  CDS Start-End: 154-324
gagcggcggcggcggcggcggcggcggtcgaaagcggagtgaaagagggaggcagggagccggagagccggaaccggagtcgcagcggcggagacccctgtgcggtgcggagggggcggcggccccgactctgacccgcgccgggggtgggccatggcggagatcagcgacctggaccggcagatcgagcagctgcgtcgctgcgagctcatcaaggagagcgaagtcaaggccctgtgcgctaaggccaggtcaggaattgggctgggctggcctggctgtggtgaccctggtcttctcctgtctccagagagatcttggtagaggagagcaacgtgcagagggtggactcgccagtcacagtgtgcggcgacatccatggacaattctatgacctcaaagagctgttcagagtaggtggcgacgtccctgagaccaactacctcttcatgggggactttgtggaccgtggcttctatagcgtcgaaacgttcctcctgctgctggcacttaaggttcgctatcctgatcgcatcacactgatccggggcaaccatgagagtcgccagatcacgcaggtctatggcttctacgatgagtgcctgcgcaagtacggctcggtgactgtgtggcgctactgcactgagatctttgactacctcagcctgtcagccatcatcgatggcaagatcttctgcgtgcacgggggcctctccccctccatccagaccctggatcagattcggacaatcgaccgaaagcaagaggtgcctcatgatgggcccatgtgtgacctcctctggtctgacccagaa

SEQ ID NO: 171320 - DNA, 1490 bp, Homo sapiens
  Payload ID: 13696
  Gene Symbol: PPP4C
  Gene Name: protein phosphatase 4, catalytic subunit
  ENST ID: ENST00000566749
  CDS Start-End: 142-504
cggcggcggcggcggtcgaaagcggagtgaaagagggaggcagggagccggagagccggaaccggagtcgcagcggcggagacccctgtgcggtgcggagggggcggcggccccgactctgacccgcgccgggggtgggccatggcggagatcagcgacctggaccggcagatcgagcagctgcgtcgctgcgagctcatcaaggagagcgaagtcaaggccctgtgcgctaaggccagagagatcttggtagaggagagcaacgtgcagagggtggactcgccagtcacagtgtgcggcgacatccatggacaattctatgacctcaaagagctgttcagagtaggtggcgacgtccctgagaccaactacctcttcatgggggactttgtggaccgtggcttctatagcgtcgaaacgttcctcctgctgctggcacttaaggtggcagtccccggcttctgcacccccaacctgggcgacctcgggccgggcctgtcttagtccgttccgccctcatctcctatcgtgaccagccccaccttggagctgtgtcactggttcgctatcctgatcgcatcacactgatccggggcaaccatgagagtcgccagatcacgcaggtctatggcttctacgatgagtgcctgcgcaagtacggctcggtgactgtgtggcgctactgcactgagatctttgactacctcagcctgtcagccatcatcgatggcaagatcttctgcgtgcacgggggcctctccccctccatccagaccctggatcagattcggacaatcgaccgaaagcaagaggtgcctcatgatgggcccatgtgtgacctcctctggtctgacccagaagacaccacaggctggggcgtgagcccccgaggagccggctacctatttggcagtgacgtggtggcccagttcaacgcagccaatgacattgacatgatctgccgtgcccaccaactggtgatggaaggttacaagtggcacttcaatgagacggtgctcactgtgtggtcggcacccaactactgctaccgctgtgggaatgtggcagccatcttggagctggacgagcatctccagaaagatttcatcatctttgaggctgctccccaagagacacggggcatcccctccaagaagcccgtggccgactacttcctgtgaccccgcccggcccctgccccctccaacccttctggccctcgcaccactgtgactctgccatcttcctcagacggaggctgggcgtggggggggctgtcctggctctgctgtcccccaagagggtgcttcgagggtgaggacttctctggagaggcctggagacctagctccatgttcctcctcctctctccccacttgaaccatgaagtttccaataatttttttttctttttttccttcttttttctgtttgtttttagataaaaattttgagaaaaaaaatgaaaaaattctaataaaagaagaaaa

SEQ ID NO: 171321 - DNA, 1301 bp, Homo sapiens
  Payload ID: 13696
  Gene Symbol: PPP4C
  Gene Name: protein phosphatase 4, catalytic subunit
  ENST ID: ENST00000627746
  CDS Start-End: 136-288
cggcggcggtcgaaagcggagtgaaagagggaggcagggagccggagagccggaaccggagtcgcagcggcggagacccctgtgcggtgcggagggggcggcggccccgactctgacccgcgccgggggtgggccatggcggagatcagcgacctggaccggcagatcgagcagctgcgtcgctgcgagctcatcaaggagagcgaagtcaaggccctgtgcgctaaggccaggtgtgcggcgacatccatggacaattctatgacctcaaagagctgttcagagtaggtggcgacgtccctgagaccaactacctcttcatgggggactttgtggaccgtggcttctatagcgtcgaaacgttcctcctgctgctggcacttaaggttcgctatcctgatcgcatcacactgatccggggcaaccatgagagtcgccagatcacgcaggtctatggcttctacgatgagtgcctgcgcaagtacggctcggtgactgtgtggcgctactgcactgagatctttgactacctcagcctgtcagccatcatcgatggcaagatcttctgcgtgcacgggggcctctccccctccatccagaccctggatcagattcggacaatcgaccgaaagcaagaggtgcctcatgatgggcccatgtgtgacctcctctggtctgacccagaagacaccacaggctggggcgtgagcccccgaggagccggctacctatttggcagtgacgtggtggcccagttcaacgcagccaatgacattgacatgatctgccgtgcccaccaactggtgatggaaggttacaagtggcacttcaatgagacggtgctcactgtgtggtcggcacccaactactgctaccgctgtgggaatgtggcagccatcttggagctggacgagcatctccagaaagatttcatcatctttgaggctgctccccaagagacacggggcatcccctccaagaagcccgtggccgactacttcctgtgaccccgcccggcccctgccccctccaacccttctggccctcgcaccactgtgactctgccatcttcctcagacggaggctgggcgtggggggggctgtcctggctctgctgtcccccaagagggtgcttcgagggtgaggacttctctggagaggcctggagacctagctccatgttcctcctcctctctccccacttgaaccatgaagtttccaataatttttttttctttttttccttcttttttctgtttgtttttagataaaaattttgagaaaaaaaatgaaaaaattct

SEQ ID NO: 171322 - DNA, 2917 bp, Homo sapiens
  Payload ID: 13697
  Gene Symbol: PPP4R1
  Gene Name: protein phosphatase 4, regulatory subunit 1
  ENST ID: ENST00000285124
  CDS Start-End: 22-276
ggaggagggggcgaccacaagatggcggacctctcgctgcttcaggaggacctgcaggaggacgcagacggatccctggactttgtctcacaagatgaaatgttgacgcccctggggagattggacaagtatgctgcaagtgagaacatatttaacagaaccaactgtgagagcggagctgatggaacaggtgcctcacatcgcactgttttgtcaagaaaaccggccttcaataccatatgctttttcaaaattcttactacctattgtggttagataccttgcagatcagaataatcaggtgaggaaaacaagtcaggcagctttgctggctctgttggagcaggagctcattgaacgatttgatgtggagaccaaagtgtgccctgtcctcatagagctgacagccccagatagcaatgatgatgtgaaaacagaagctgtggctataatgtgcaaaatggctcccatggttgggaaggatattacagagcgtcttatcctccctaggttttgtgagatgtgctgcgattgcagaatgtttcacgttcgaaaggtctgtgctgccaattttggagatatttgcagtgtagttggccagcaagctactgaagaaatgttgctgcccagatttttccagctttgttctgataatgtatggggagtccgaaaggcttgtgctgaatgcttcatggcggtttcatgtgcaacatgtcaagaaatccgacggaccaaattatcagcactttttattaatttgatcagtgatccttcacgttgggttcgccaagcagcttttcagtctctgggacctttcatatctacttttgctaatccatctagctcaggccagtattttaaagaagaaagcaaaagttcagaagagatgtcagtagaaaacaaaaataggaccagagatcaagaagccccagaggatgtacaagtcaggccagaggatactccttcagatctcagtgttagtaattccagtgtcatactggaaaacacgatggaagaccatgctgctgaggcatccgggaagcctctaggtgaaattagtgttccactggacagctctttactttgtactttgtcctcagaatctcaccaggaagcagctagtaatgagaatgataaaaaacctggtaactacaaatctatgttacgaccagaggttggcaccacttcacaagattcagctctcttagatcaggaattgtataactccttccatttctggaggactcctcttcctgaaatagatctagacatagagcttgaacagaactctgggggaaaacccagcccagagggaccagaggaagaatctgagggccctgtgcccagttctccaaacatcaccatggccaccagaaaggaactggaagaaatgatagaaaatctagagccccacattgatgatccagatgttaaagcacaagtggaagtgctgtccgctgcactacgtgcttccagcctggatgcacatgaagagaccatcagtatagaaaagagaagtgatttgcaagatgaactggatataaatgagctaccaaattgtaaaataaatcaagaagattctgtgcctttaatcagcgatgctgttgagaggtgctttgtttctgatcggaccatttcactgcagcaagcaacacagtattctgagcagaagatcgggacttgaggccatgttgcggagggccagtgacattatctggactctggagtgtgaggaatatggactccactcttcactatattcacagcgattcagacttgagcaacaatagcagttttagccctgatgaggaaaggagaactaaagtacaagatgttgtacctcaggcgttgttagatcagtatttatctatgactgacccttctcgtgcacagacggttgacactgaaattgctaagcactgtgcatatagcctccctggtgtggccttgacactcggaagacagaattggcactgcctgagagagacgtatgagactctggcctcagacatgcagtggaaagttcgacgaactctagcattctccatccacgagcttgcagttattcttggagatcaattgacagctgcagatctggttccaatttttaatggatttttaaaagacctcgatgaagtcaggataggtgttcttaaacacttgcatgattttctgaagcttcttcatattgacaaaagaagagaatatctttatcaacttcaggagtttttggtgacagataatagtagaaattggcggtttcgagctgaactggctgaacagctgattttacttctagagttatatagtcccagagatgtttatgactatttacgtcccattgctctgaatctgtgtgcagacaaagtttcttctgttcgttggatttcctacaagttggtcagcgagatggtgaagaagctgcacgcggcaacaccaccaacgttcggagtggacctcatcaatgagcttgtggagaactttggcagatgtcccaagtggtctggtcggcaagcctttgtctttgtctgccagactgtcattgaggatgactgccttcccatggaccagtttgctgtgcatctcatgccgcatctgctaaccttagcaaatgacagggttcctaacgtgcgagtgctgcttgcaaagacattaagacaaactctactagaaaaagactatttcttggcctctgccagctgccaccaggaggctgtggagcagaccatcatggctcttcagatggaccgtgacagcgatgtcaagtattttgcaagcatccaccctgccagtaccaaaatctccgaagatgccatgagcacagcgtcctcaacctactagaaggcttgaatctcggtgtctttcctgcttccatgagagccgaggttcagtgggcattcgccacgcatgtgacctg

SEQ ID NO: 171323 - DNA, 3885 bp, Homo sapiens
  Payload ID: 13697
  Gene Symbol: PPP4R1
  Gene Name: protein phosphatase 4, regulatory subunit 1
  Uniprot ID: Q8TF05
  ENST ID: ENST00000400555
  CDS Start-End: 86-2887
gcgcgcgtccaccggctccccggctcgcgccgctccatgtagccccggctccccgggcggccgcggaggagggggcgaccacaagatggcggacctctcgctgcttcaggaggacctgcaggaggacgcagacggatccctggactttgtctcacaagatgaaatgttgacgcccctggggagattggacaagtatgctgcaagtgagaacatatttaacagacaaatggtggcccggagtttgctcgataccttgagggaagtctgcgatgatgaaagagattgtattgctgttttggaaagaattagcagattggccgatgattcagaaccaactgtgagagcggagctgatggaacaggtgcctcacatcgcactgttttgtcaagaaaaccggccttcaataccatatgctttttcaaaattcttactacctattgtggttagataccttgcagatcagaataatcaggtgaggaaaacaagtcaggcagctttgctggctctgttggagcaggagctcattgaacgatttgatgtggagaccaaagtgtgccctgtcctcatagagctgacagccccagatagcaatgatgatgtgaaaacagaagctgtggctataatgtgcaaaatggctcccatggttgggaaggatattacagagcgtcttatcctccctaggttttgtgagatgtgctgcgattgcagaatgtttcacgttcgaaaggtctgtgctgccaattttggagatatttgcagtgtagttggccagcaagctactgaagaaatgttgctgcccagatttttccagctttgttctgataatgtatggggagtccgaaaggcttgtgctgaatgcttcatggcggtttcatgtgcaacatgtcaagaaatccgacggaccaaattatcagcactttttattaatttgatcagtgatccttcacgttgggttcgccaagcagcttttcagtctctgggacctttcatatctacttttgctaatccatctagctcaggccagtattttaaagaagaaagcaaaagttcagaagagatgtcagtagaaaacaaaaataggaccagagatcaagaagccccagaggatgtacaagtcaggccagaggatactccttcagatctcagtgttagtaattccagtgtcatactggaaaacacgatggaagaccatgctgctgaggcatccgggaagcctctaggtgaaattagtgttccactggacagctctttactttgtactttgtcctcagaatctcaccaggaagcagctagtaatgagaatgataaaaaacctggtaactacaaatctatgttacgaccagaggttggcaccacttcacaagattcagctctcttagatcaggaattgtataactccttccatttctggaggactcctcttcctgaaatagatctagacatagagcttgaacagaactctgggggaaaacccagcccagagggaccagaggaagaatctgagggccctgtgcccagttctccaaacatcaccatggccaccagaaaggaactggaagaaatgatagaaaatctagagccccacattgatgatccagatgttaaagcacaagtggaagtgctgtccgctgcactacgtgcttccagcctggatgcacatgaagagaccatcagtatagaaaagagaagtgatttgcaagatgaactggatataaatgagctaccaaattgtaaaataaatcaagaagattctgtgcctttaatcagcgatgctgttgagaatatggactccactcttcactatattcacagcgattcagacttgagcaacaatagcagttttagccctgatgaggaaaggagaactaaagtacaagatgttgtacctcaggcgttgttagatcagtatttatctatgactgacccttctcgtgcacagacggttgacactgaaattgctaagcactgtgcatatagcctccctggtgtggccttgacactcggaagacagaattggcactgcctgagagagacgtatgagactctggcctcagacatgcagtggaaagttcgacgaactctagcattctccatccacgagcttgcagttattcttggagatcaattgacagctgcagatctggttccaatttttaatggatttttaaaagacctcgatgaagtcaggataggtgttcttaaacacttgcatgattttctgaagcttcttcatattgacaaaagaagagaatatctttatcaacttcaggagtttttggtgacagataatagtagaaattggcggtttcgagctgaactggctgaacagctgattttacttctagagttatatagtcccagagatgtttatgactatttacgtcccattgctctgaatctgtgtgcagacaaagtttcttctgttcgttggatttcctacaagttggtcagcgagatggtgaagaagctgcacgcggcaacaccaccaacgttcggagtggacctcatcaatgagcttgtggagaactttggcagatgtcccaagtggtctggtcggcaagcctttgtctttgtctgccagactgtcattgaggatgactgccttcccatggaccagtttgctgtgcatctcatgccgcatctgctaaccttagcaaatgacagggttcctaacgtgcgagtgctgcttgcaaagacattaagacaaactctactagaaaaagactatttcttggcctctgccagctgccaccaggaggctgtggagcagaccatcatggctcttcagatggaccgtgacagcgatgtcaagtattttgcaagcatccaccctgccagtaccaaaatctccgaagatgccatgagcacagcgtcctcaacctactagaaggcttgaatctcggtgtctttcctgcttccatgagagccgaggttcagtgggcattcgccacgcatgtgacctgggatagctttcgggggaggagagaccttcctctcctgcggacttcattgcaggtgcaagttgcctacacccaataccagggatttcaagagtcaagagaaagtacagtaaacactattatcttatcttgactttaaggggaaataatttctcagaggattataattgtcaccgaagccttaaatccttctgtcttcctgactgaatgaaacttgaattggcagagcattttccttatggaagggatgagattcccagagacctgcattgctttctcctggttttatttaacaatcgacaaatgaaattcttacagcctgaaggcagacgtgtgcccagatgtgaaagagaccttcagtatcagccctaactcttctctcccaggaaggacttgctgggctctgtggccagctgtccagcccagccctgtgtgtgaatcgtttgtgacgtgtgcaaatgggaaaggaggggtttttacatctcctaaaggacctgatgccaacacaagtaggattgacttaaactcttaagcgcagcatattgctgtacacatttacagaatggttgctgagtgtctgtgtctgattttttcatgctggtcatgacctgaaggaaatttattagacgtataatgtatgtctggtgtttttaacttgatcatgatcagctctgaggtgcaacttcttcacatactgtacatacctgtgaccactcttgggagtgctgcagtctttaatcatgctgtttaaactgttgtggcacaagttctcttgtccaaataaaatttattaataagatctatagagagagatatatacacttttgattgttttctagatgtctaccaataaatgcaatttgtgacctgtattaatgatttaaagtggggaaactagattaaaatatttgtcttttaactagtt

SEQ ID NO: 171324 - DNA, 3925 bp, Homo sapiens
  Payload ID: 13697
  Gene Symbol: PPP4R1
  Gene Name: protein phosphatase 4, regulatory subunit 1
  Uniprot ID: Q8TF05
  ENST ID: ENST00000400556
  CDS Start-End: 75-2927
ccggctccccggctcgcgccgctccatgtagccccggctccccgggcggccgcggaggagggggcgaccacaagatggcggacctctcgctgcttcaggaggacctgcaggaggacgcagacggatttggtgtggatgactacagctcagagtctgatgtgattattataccttcagccctggactttgtctcacaagatgaaatgttgacgcccctggggagattggacaagtatgctgcaagtgagaacatatttaacagacaaatggtggcccggagtttgctcgataccttgagggaagtctgcgatgatgaaagagattgtattgctgttttggaaagaattagcagattggccgatgattcagaaccaactgtgagagcggagctgatggaacaggtgcctcacatcgcactgttttgtcaagaaaaccggccttcaataccatatgctttttcaaaattcttactacctattgtggttagataccttgcagatcagaataatcaggtgaggaaaacaagtcaggcagctttgctggctctgttggagcaggagctcattgaacgatttgatgtggagaccaaagtgtgccctgtcctcatagagctgacagccccagatagcaatgatgatgtgaaaacagaagctgtggctataatgtgcaaaatggctcccatggttgggaaggatattacagagcgtcttatcctccctaggttttgtgagatgtgctgcgattgcagaatgtttcacgttcgaaaggtctgtgctgccaattttggagatatttgcagtgtagttggccagcaagctactgaagaaatgttgctgcccagatttttccagctttgttctgataatgtatggggagtccgaaaggcttgtgctgaatgcttcatggcggtttcatgtgcaacatgtcaagaaatccgacggaccaaattatcagcactttttattaatttgatcagtgatccttcacgttgggttcgccaagcagcttttcagtctctgggacctttcatatctacttttgctaatccatctagctcaggccagtattttaaagaagaaagcaaaagttcagaagagatgtcagtagaaaacaaaaataggaccagagatcaagaagccccagaggatgtacaagtcaggccagaggatactccttcagatctcagtgttagtaattccagtgtcatactggaaaacacgatggaagaccatgctgctgaggcatccgggaagcctctaggtgaaattagtgttccactggacagctctttactttgtactttgtcctcagaatctcaccaggaagcagctagtaatgagaatgataaaaaacctggtaactacaaatctatgttacgaccagaggttggcaccacttcacaagattcagctctcttagatcaggaattgtataactccttccatttctggaggactcctcttcctgaaatagatctagacatagagcttgaacagaactctgggggaaaacccagcccagagggaccagaggaagaatctgagggccctgtgcccagttctccaaacatcaccatggccaccagaaaggaactggaagaaatgatagaaaatctagagccccacattgatgatccagatgttaaagcacaagtggaagtgctgtccgctgcactacgtgcttccagcctggatgcacatgaagagaccatcagtatagaaaagagaagtgatttgcaagatgaactggatataaatgagctaccaaattgtaaaataaatcaagaagattctgtgcctttaatcagcgatgctgttgagaatatggactccactcttcactatattcacagcgattcagacttgagcaacaatagcagttttagccctgatgaggaaaggagaactaaagtacaagatgttgtacctcaggcgttgttagatcagtatttatctatgactgacccttctcgtgcacagacggttgacactgaaattgctaagcactgtgcatatagcctccctggtgtggccttgacactcggaagacagaattggcactgcctgagagagacgtatgagactctggcctcagacatgcagtggaaagttcgacgaactctagcattctccatccacgagcttgcagttattcttggagatcaattgacagctgcagatctggttccaatttttaatggatttttaaaagacctcgatgaagtcaggataggtgttcttaaacacttgcatgattttctgaagcttcttcatattgacaaaagaagagaatatctttatcaacttcaggagtttttggtgacagataatagtagaaattggcggtttcgagctgaactggctgaacagctgattttacttctagagttatatagtcccagagatgtttatgactatttacgtcccattgctctgaatctgtgtgcagacaaagtttcttctgttcgttggatttcctacaagttggtcagcgagatggtgaagaagctgcacgcggcaacaccaccaacgttcggagtggacctcatcaatgagcttgtggagaactttggcagatgtcccaagtggtctggtcggcaagcctttgtctttgtctgccagactgtcattgaggatgactgccttcccatggaccagtttgctgtgcatctcatgccgcatctgctaaccttagcaaatgacagggttcctaacgtgcgagtgctgcttgcaaagacattaagacaaactctactagaaaaagactatttcttggcctctgccagctgccaccaggaggctgtggagcagaccatcatggctcttcagatggaccgtgacagcgatgtcaagtattttgcaagcatccaccctgccagtaccaaaatctccgaagatgccatgagcacagcgtcctcaacctactagaaggcttgaatctcggtgtctttcctgcttccatgagagccgaggttcagtgggcattcgccacgcatgtgacctgggatagctttcgggggaggagagaccttcctctcctgcggacttcattgcaggtgcaagttgcctacacccaataccagggatttcaagagtcaagagaaagtacagtaaacactattatcttatcttgactttaaggggaaataatttctcagaggattataattgtcaccgaagccttaaatccttctgtcttcctgactgaatgaaacttgaattggcagagcattttccttatggaagggatgagattcccagagacctgcattgctttctcctggttttatttaacaatcgacaaatgaaattcttacagcctgaaggcagacgtgtgcccagatgtgaaagagaccttcagtatcagccctaactcttctctcccaggaaggacttgctgggctctgtggccagctgtccagcccagccctgtgtgtgaatcgtttgtgacgtgtgcaaatgggaaaggaggggtttttacatctcctaaaggacctgatgccaacacaagtaggattgacttaaactcttaagcgcagcatattgctgtacacatttacagaatggttgctgagtgtctgtgtctgattttttcatgctggtcatgacctgaaggaaatttattagacgtataatgtatgtctggtgtttttaacttgatcatgatcagctctgaggtgcaacttcttcacatactgtacatacctgtgaccactcttgggagtgctgcagtctttaatcatgctgtttaaactgttgtggcacaagttctcttgtccaaataaaatttattaataagatctatagagagagatatatacacttttgattgttttctagatgtctaccaataaatgcaatttgtgacctgtattaatgatttaaagtggggaaactagattaaaatatttgtcttttaactagtt

SEQ ID NO: 171325 - DNA, 379 bp, Homo sapiens
  Payload ID: 13697
  Gene Symbol: PPP4R1
  Gene Name: protein phosphatase 4, regulatory subunit 1
  ENST ID: ENST00000581835
  CDS Start-End: 89-379
ctctcccctcggcgcagacctctcgctgcttcaggaggacctgcaggaggacgcagacggatccctggactttgtctcacaagatgaaatgttgacgcccctggggagattggacaagtatgctgcaagtgagaacatatttaacagacaaatggtggcccggagtttgctcgataccttgagggaagtctgcgatgatgaaagagattgtattgctgttttggaaagaattagcagattggccgatgattcagaaccaactgtgagagcggagctgatggaacaggtgcctcacatcgcactgttttgtcaagaaaaccggccttcaataccatatgctttttcaaaattcttactacctattgtggttagatacctt

SEQ ID NO: 171326 - DNA, 578 bp, Homo sapiens
  Payload ID: 13697
  Gene Symbol: PPP4R1
  Gene Name: protein phosphatase 4, regulatory subunit 1
  ENST ID: ENST00000581250
  CDS Start-End: 148-578
cctttcttctctcccctcggcgcagacctctcgctgcttcaggaggacctgcaggaggacgcagacggatttggtgtggatgactacagctcagagtctgatgtgattattataccttcagccctggactttgtctcacaagatgaaatgttgacgcccctggggagattggacaagtatgctgcaagtgagaacatatttaacagacaaatggtggcccggagtttgctcgataccttgagggaagtctgcgatgatgaaagagattgtattgctgttttggaaagaattagcagattggccgatgattcagaaccaactgtgagagcggagctgatggaacaggtgcctcacatcgcactgttttgtcaagaaaaccggccttcaataccatatgctttttcaaaattcttactacctattgtggttagataccttgcagatcagaataatcaggtgaggaaaacaagtcaggcagctttgctggctctgttggagcaggagctcattgaacgatttgatgtggagaccaaagtgtgccctgtcctcatagagctgacagccccagatagcaatga

SEQ ID NO: 171327 - DNA, 554 bp, Homo sapiens
  Payload ID: 13697
  Gene Symbol: PPP4R1
  Gene Name: protein phosphatase 4, regulatory subunit 1
  ENST ID: ENST00000583092
  CDS Start-End: 50-103
atgtagccccggctccccgggcggccgcggaggagggggcgaccacaagatggcggacctctcgctgcttcaggaggacctgcaggaggacgcagacggatgattggagaaatggccctgattatgttacctcgaggagggctttttatatttatgttcgacttcgtaaatagaagattcatttattcagcaagtatttatgactggagcaaaaacttctcactcctgaaggatgaaatgcagtctcagtttcttccttagcccccaagaagcacagtgtagaggggaaggcatacctgtgaaaaattcaaccatgagtttcaacactctgccagccctggactttgtctcacaagatgaaatgttgacgcccctggggagattggacaagtatgctgcaagtgagaacatatttaacagacaaatggtggcccggagtttgctcgataccttgagggaagtctgcgatgatgaaagagattgtattgctgttttggaaagaattagcagattggccgatgattcagaaccaactgtgagagcggagctgatgg

SEQ ID NO: 171328 - DNA, 580 bp, Homo sapiens
  Payload ID: 13697
  Gene Symbol: PPP4R1
  Gene Name: protein phosphatase 4, regulatory subunit 1
  ENST ID: ENST00000578875
  CDS Start-End: 50-355
atgtagccccggctccccgggcggccgcggaggagggggcgaccacaagatggcggacctctcgctgcttcaggaggacctgcaggaggacgcagacggatttggtgtggatgactacagctcagagtctgatgtgattattataccttcagccctggactttgtctcacaagatgaaatgttgacgcccctggggagattggacaagtatgctgcaagtgagaacatatttaacagaaccaactgtgagagcggagctgatggaacaggtgcctcacatcgcactgttttgtcaagaaaaccggccttcaataccatatgctttttcaaaattcttactacctattgtggttagataccttgcagatcagaataatcaggtgaggaaaacaagtcaggcagctttgctggctctgttggagcaggagctcattgaacgatttgatgtggagaccaaagtgtgccctgtcctcatagagctgacagccccagatagcaatgatgatgtgaaaacagaagctgtggctataatgtgcaaaatggctcccatggttgggaaggatattacagagcgtcttat

SEQ ID NO: 171329 - DNA, 535 bp, Homo sapiens
  Payload ID: 13697
  Gene Symbol: PPP4R1
  Gene Name: protein phosphatase 4, regulatory subunit 1
  ENST ID: ENST00000580745
  CDS Start-End: 129-535
agtaaaaacccggcgccccagccttcaccgtgctgcacgaggaagctggctaggcagacctctcgctgcttcaggaggacctgcaggaggacgcagacggatccctggactttgtctcacaagatgaaatgttgacgcccctggggagattggacaagtatgctgcaagtgagaacatatttaacagacaaatggtggcccggagtttgctcgataccttgagggaagtctgcgatgatgaaagagattgtattgctgttttggaaagaattagcagattggccgatgattcagaaccaactgtgagagcggagctgatggaacaggtgcctcacatcgcactgttttgtcaagaaaaccggccttcaataccatatgctttttcaaaattcttactacctattgtggttagataccttgcagatcagaataatcaggtgaggaaaacaagtcaggcagctttgctggctctgttggagcaggagctcattgaacgatttgatgtggagaccaaagtgtgccctgtcctcataga

SEQ ID NO: 171330 - DNA, 625 bp, Homo sapiens
  Payload ID: 13697
  Gene Symbol: PPP4R1
  Gene Name: protein phosphatase 4, regulatory subunit 1
  ENST ID: ENST00000584074
  CDS Start-End: 172-625
gcccggccgggttccggcactcgccgcagggtcccggccggcggcaggttgcgcgcccccgtccgcagcgctcggcgtgagggcggctcgggaggagggtacctctcgctgcttcaggaggacctgcaggaggacgcagacggatccctggactttgtctcacaagatgaaatgttgacgcccctggggagattggacaagtatgctgcaagtgagaacatatttaacagacaaatggtggcccggagtttgctcgataccttgagggaagtctgcgatgatgaaagagattgtattgctgttttggaaagaattagcagattggccgatgattcagaaccaactgtgagagcggagctgatggaacaggtgcctcacatcgcactgttttgtcaagaaaaccggccttcaataccatatgctttttcaaaattcttactacctattgtggttagataccttgcagatcagaataatcaggtgaggaaaacaagtcaggcagctttgctggctctgttggagcaggagctcattgaacgatttgatgtggagaccaaagtgtgccctgtcctcatagagctgacagccccagatagcaatgatgatgtgaaaacagaagctgtgg

SEQ ID NO: 171331 - DNA, 578 bp, Homo sapiens
  Payload ID: 13697
  Gene Symbol: PPP4R1
  Gene Name: protein phosphatase 4, regulatory subunit 1
  ENST ID: ENST00000582240
  CDS Start-End: 9-578
aggcaggcatgactttgtcagtcaaccatcccgcagccgggccctgggctttgttagcagccacttggcgagggccccgggcgggtggggaggcggcgcttcctccaagaggaggtgggaccccggccccgacgacctcggagccgcccccggccccggatcgccgacgacacctctcgctgcttcaggaggacctgcaggaggacgcagacggatccctggactttgtctcacaagatgaaatgttgacgcccctggggagattggacaagtatgctgcaagtgagaacatatttaacagacaaatggtggcccggagtttgctcgataccttgagggaagtctgcgatgatgaaagagattgtattgctgttttggaaagaattagcagattggccgatgattcagaaccaactgtgagagcggagctgatggaacaggtgcctcacatcgcactgttttgtcaagaaaaccggccttcaataccatatgctttttcaaaattcttactacctattgtggttagataccttgcagatcagaataatcaggtgaggaaaacaagtcaggcagctttg

SEQ ID NO: 171332 - DNA, 582 bp, Homo sapiens
  Payload ID: 13697
  Gene Symbol: PPP4R1
  Gene Name: protein phosphatase 4, regulatory subunit 1
  ENST ID: ENST00000580182
  CDS Start-End: 76-303
accggctccccggctcgcgccgctccatgtagccccggctccccgggcggccgcggaggagggggcgaccacaagatggcggacctctcgctgcttcaggaggacctgcaggaggacgcagacggatccctggactttgtctcacaagatgaaatgttgacgcccctggggagattggacaagtatgctgcaagtgagaacatatttaacagatatcggccaggtgcagtgactcatgcctgtaatcccagcactttgggaggccaagacaaatggtggcccggagtttgctcgataccttgagggaagtctgcgatgatgaaagagattgtattgctgttttggaaagaattagcagattggccgatgattcagaaccaactgtgagagcggagctgatggaacaggtgcctcacatcgcactgttttgtcaagaaaaccggccttcaataccatatgctttttcaaaattcttactacctattgtggttagataccttgcagatcagaataatcaggtgaggaaaacaagtcaggcagctttgctggctctgttggagcaggagctcattgaacgatttg

SEQ ID NO: 171333 - DNA, 4984 bp, Homo sapiens
  Payload ID: 13698
  Gene Symbol: PPP4R2
  Gene Name: protein phosphatase 4, regulatory subunit 2
  Uniprot ID: Q9NY27
  ENST ID: ENST00000356692
  CDS Start-End: 254-1507
agggagcgtgcgcgcggtgacgtaccgggcgccatgttggagggttggtggtagcggcttggggaggtgctcgctctgtcggtcttgctctctcgcacgcttcccccggctcccttcgtttcccccccccggtcgcctgcgtgccggagtgtgtgcgagggagggggagggcgtcgggggggtggggggaggcgttccggtccccaagagacccgcggagggaggcggaggctgtgagggactccgggaagccatggacgtcgagaggctccaggaggcgctgaaagattttgagaagagggggaaaaaggaagtttgtcctgtcctggatcagtttctttgtcatgtagccaagactggagaaacaatgattcagtggtcccaatttaaaggctattttattttcaaactggagaaagtgatggatgatttcagaacttcagctcctgagccaagaggtcctcccaaccctaatgtcgaatatattccctttgatgaaatgaaggaaagaatactgaaaattgtcactggatttaatggtatcccttttactattcagcgactatgtgaattgttaacagatccaaggagaaactatacaggaacagacaaatttctcagaggagtagaaaagaatgtgatggttgttagctgtgtttatccttcttcagagaaaaacaattccaatagtttaaatcgaatgaatggtgttatgtttcctggaaattcaccaagctatactgagaggtctaatataaatgggcctgggacacccaggccacttaatcgaccaaaggtttctttgtcagcccccatgacaacaaatgggttgcctgagagcacagacagcaaagaggcaaatttgcagcaaaatgaggagaaaaatcacagtgactcttcgacctctgaatcagaagtttcctcagtgagccctttgaaaaataaacatccagatgaagatgctgtggaagctgaggggcatgaggtaaaaagactcaggtttgacaaagaaggtgaagtcagagaaacagccagtcaaacgacttccagcgaaatttcttcagttatggtaggagaaacagaagcatcatcttcatctcaggataaagacaaagatagccgttgtacccggcagcactgtacagaagaggatgaagaagaggatgaagaggaagaagaagagtcttttatgacatcaagagaaatgatcccagaaagaaaaaatcaagaaaaagaatctgatgatgccttaactgtgaatgaagagacttctgaggaaaataatcaaatggaggaatctgatgtgtctcaagctgagaaagatttgctacattctgaaggtagtgaaaacgaaggccctgtaagtagtagttcttctgactgccgtgaaacagaagaattagtaggatccaattccagtaaaactggagagattctttcagaatcatccatggaaaatgatgacgaagccacagaagtcaccgatgaaccaatggaacaagactaactatttagaaacatttagatgcagtattttacatacagttctggttttaacactgtataaaacttttgtgtaataaaatggacctttagttttacaagagaagcaggttgtaaaataaagtactttatggataattcctgaaagagttgtacatgtaagaactgtgaatatcagctcctctgggtcctgcttaccttaccgctgacttttctttctttctttttttggtctgggcaaatcagtggtttgtgtatagatttttttttttttttaatttaggattgaagtttttaaactggaaagtaattacaattttgaaaagttttttgagattatcacatttagtttatacatatgcaagaagctttttgtcttgtctctttctgatagctctagcagttttcatattttggtcatagtttcaacattttaacatgtgaattatagggtttcatgctggtttccagattttattgtttggctacgtacaatggaactttaagtcatatatacatacatatatatatatatatatatataattctaaggggggaaatgttatatttttctgtttctataagagatgaatacagtggatactttttctattggtaatgattgagttcacctctttcagaagacattttctttctcttctgagtaattgaaataaaatctggcccttgtgaaaccctggaaatcttaagtctgttgaaataccaggttaaacacattccaagagatctgttcaaactcaaattcttttgtatacttctgaggtgcctgagaaaaagacttcattatttatgagaaaatatgctttatcttggaaattgtgttcaaatgttagcttactattttgtagaatgaatgtttatgaagctgatatgagaccatctcagaagaaccaagtaggttccttgaccttttgcttgcttttctgaacattgtgaatattacacatgtctttctaaattattctagggtatgcaaatgtcaatggtatgaaacaccactgtactggaagaattaatatattactttagtatgtacctgagctaaatgactgaagctttaggggtgcatagaaaccaccataatttgtatgacattttgaagtgaattaaatatttttgaacatgcttcttcgacagccagtgttatatttttcagatcaacacaaagcacaatgattactcgaaattcagtattttcaaatttacatatttaaagtcatgcaagctgtaacttccctgtcaaaattactggctgccaaatttatacctgtttcttcagctgtaccttttgatatttaaagtttttaaatttctgtaaagtagattttgtagaatgtaatgtgttcactgcctttgtgaagcggtatataattgtataatttctgtgtgtaaactgaatgcttgggctttcaatacagtattcatataaagcaataaatattaatgttatgaaatatttgactacatttttatcaaaatatgaaagaatccccccttttttagtttcagatacctgaactacacagatgagcttctaaaactgatgcaaacagtttctgacactgtataatatgcttttgggtgatttggggggcaaccacaagttttgcgttttgactacttaaatcatcatggctataaataccaaaacgatttggatccatttatgtttgtaggataatatactactgactgacttgactgtcaggttcacaacagctagatgatatatttatgactatgtctaatagttgaaataaaatctgaatattgatttactatacccaagaggggagaaaaattaaccattgtaaatttttaaaaaatttttcaaaaatgttaaaatgaggcaaatttaagtttacaaattttgaaattttcttttgaatatttatgaaattgtcagtaaacttacctaagatcctgtgaccttttgatattttttattttaattgtagtgccatggaccatttgtaaacaaattgatttacttttgttggttgtaagttgaagatttagcattatgactttgaggtctgtggttttatttgtaaacttgcaattgctatatttgcaagggcaaatgtatttctttattaaataaagtacaataatggtgaatgtaccaaaatgacatcacttaactctatgagagatctgcattttaatctatagtttaatagttttaatatttattagatattcatatgttgatcatagatcaaacttgttgctgtttatacagataattgtagaatgctcatggaatatctttagggtaggtggaatacttctgtagttaaattgggaaaccttgttcagctggttttagatattgatggccatttggaagtaaatttccgcaggtattcataggtgcacttaacacagactttgcttaatgaaaatgtcagttctaatagtaactgattcacttctgaacagaagtgattttaggcatatttcttaacatatatcaagcaaagtcctgttaaaagatctaaatgaagaatggagacctcagtgattaaagatattttgtttctgaccttgagcagattgcttacctgttctctagactataacccaacatgtaaaaaaaatttgaagatggtgatgaggaaagtgagatatatatatatatatgtattatgtttctagcacttttcccttttaaaaagtgaaaatatccttgtacatttttgaaaaatatattttcagttctgaaaaatgtagcagaagtagtgaaaatgtcatattttaaatgttgattattagataaatttaacctgcttagggtttattgtaactacacctttcagacgtgtgttttggagtagtggaattgccagccaggccctgtggcttggaaaggcatcccagaaatcctcggccagaaggtgtggcttgttaaagcattgagattcagagtattttgttttgccggtgtagataggcatgtatttatgcatttttgcatttgtaaaatcaacttttcaaataatgtaaatgtaatatactagtttacttaaaggtacttgggcagaatctaaagctgctacaatgtttgattatgaaaaaaatgtaacatggtaaggatgaaaatgcaacttacaaaaccaaaggaattaaaaattttcggtagtgtttcaaattgtcttctgaacaggaatttaacattggttttgatgaaggtgagggtcagttctcaagatttgtgctaatcataaaatgaatgaatgcaaaacaccttgtaatttcatatggaattataaaaattaggtttgctgggttttggcctaataagagtgctagtatgtattggttagactacatcttactatttcacattttaaaaatcagtacactcttcaggattttcttttatttcaacttggagcctagattactttgccaaatgtattattttcataatgcaataaaatataaattagaatat

SEQ ID NO: 171334 - DNA, 771 bp, Homo sapiens
  Payload ID: 13698
  Gene Symbol: PPP4R2
  Gene Name: protein phosphatase 4, regulatory subunit 2
  ENST ID: ENST00000482242
  CDS Start-End: 236-586
gacgtaccgggcgccatgttggagggttggtggtagcggcttggggaggtgctcgctctgtcggtcttgctctctcgcacgcttcccccggctcccttcgtttcccccccccggtcgcctgcgtgccggagtgtgtgcgagggagggggagggcgtcgggggggtggggggaggcgttccggtccccaagagacccgcggagggaggcggaggctgtgagggactccgggaagccatggacgtcgagaggctccaggaggcgctgaaagattttgagaagagggggaaaaaggaagtttgtcctgtcctggatcagtttctttgtcatgtagccaagactggagaaacaattatcccttttactattcagcgactatgtgaattgttaacagatccaaggagaaactatacaggaacagacaaatttctcagaggagtagaaaagaatgtgatggttgttagctgtgtttatccttcttcagagaaaaacaattccaatagtttaaatcgaatgaatggtgttatgtttcctggaaattcaccaagctatactgagagcccccatgacaacaaatgggttgcctgagagcacagacagcaaagaggcaaatttgcagcaaaatgaggagaaaaatcacagtgactcttcgacctctgaatcagaagtttcctcagtgagccctttgaaaaataaacatccagatgaagatgctgtggaagctgaggggcatgaggtaaaaagactcaggtttgacaaagaaggtgaagtca

SEQ ID NO: 171335 - DNA, 559 bp, Homo sapiens
  Payload ID: 13698
  Gene Symbol: PPP4R2
  Gene Name: protein phosphatase 4, regulatory subunit 2
  ENST ID: ENST00000495566
  CDS Start-End: 62-271
cgttccggtccccaagagacccgcggagggaggcggaggctgtgagggactccgggaagccatggacgtcgagaggctccaggaggcgctgaaagattttgagaagagggggaaaaaggaagtttgtcctgtcctggatcagtttctttgtcatgtagccaagactggagaaacaatgctggcctcgaaaccctggcctcaagtgatccacctgcctcaacttcccaaactgcggggattgcagattagagacggggtttcaccatgttagccaggacggtctcgatctcctgacctcgtgatctacctgctttggcctcccaaagtgctgggattacagacgtgaactactgcacccgccctgtttttttgagtagagacagggtttcaccatgttatccaggctggtctcgaactcctgacctcaagtatctgcctgcttcggcctcccaaagtgctgggaatacaggtgtgagccaccatgcctggcctctactatctgaaacatagttttaaatgacatattttaatctaaatataaataaaacatttaatttga

SEQ ID NO: 171336 - DNA, 877 bp, Homo sapiens
  Payload ID: 13698
  Gene Symbol: PPP4R2
  Gene Name: protein phosphatase 4, regulatory subunit 2
  ENST ID: ENST00000488810
  CDS Start-End: 200-877
cggcttggggaggtgctcgctctgtcggtcttgctctctcgcacgcttcccccggctcccttcgtttcccccccccggtcgcctgcgtgccggagtgtgtgcgagggagggggagggcgtcgggggggtggggggaggcgttccggtccccaagagacccgcggagggaggcggaggctgtgagggactccgggaagccatggacgtcgagaggctccaggaggcgctgaaagattttgagaagagggggaaaaaggaagtttgtcctgtcctggatcagtttctttgtcatgtagccaagactggagaaacaatgattcagtggtcccaatttaaaggctattttattttcaaactggagaaagtgatggatgatttcagaacttcagctcctgagccaagaggtcctcccaaccctaatgtcgaatatattccctttgatgaaatgaaggaaagaatactgaaaattgtcactggatttaatggtatcccttttactattcagcgactatgtgaattgttaacagatccaaggagaaactatacaggaacagacaaatttctcagaggagtagaaaagaatgtgatggttgttagctgtgtttatccttcttcagagtctaatataaatgggcctgggacacccaggccacttaatcgaccaaaggtttctttgtcagcccccatgacaacaaatgggttgcctgagagcacagacagcaaagaggcaaatttgcagcaaaatgaggagaaaaatcacagtgactcttcgacctctgaatcagaagtttcctcagtgagccctttgaaaaataaacatccagatgaagatgctgtggaagctgaggggcatgaggtaaaaagactcaggtttgac

SEQ ID NO: 171337 - DNA, 572 bp, Homo sapiens
  Payload ID: 13698
  Gene Symbol: PPP4R2
  Gene Name: protein phosphatase 4, regulatory subunit 2
  ENST ID: ENST00000460360
  CDS Start-End: 1-431
atgggcctgggacacccaggccacttaatcgaccaaaggtttctttgtcagcccccatgacaacaaatgggttgcctgagagcacagacagcaaagaggcaaatttgcagcaaaatgaggagaaaaatcacagtgactcttcgacctctgaatcagaagtttcctcagtgagccctttgaaaaataaacatccagatgaagatgctgtggaagctgaggggcatgaggtaaaaagactcaggtttgacaaagaaggtgaagtcagagaaacagccagtcaaacgacttccagcgaaatttcttcagttatggtaggagaaacagaagcatcatcttcatctcaggataaagacaaagatagccgttgtacccggcagcactgtacagaagaggatgaagaagaggatgaagaggaagaagaaggtatttagagaccatctgtaaaagggtggagtaaggagatcctcaaattcttgtacttcatttttttcgtgaaagaattttacgtaatggaactccttataatgctgatgttgggcttttctcccacctgtatgtagttgctgctgaat

SEQ ID NO: 171338 - DNA, 323 bp, Homo sapiens
  Payload ID: 13698
  Gene Symbol: PPP4R2
  Gene Name: protein phosphatase 4, regulatory subunit 2
  ENST ID: ENST00000476505
  CDS Start-End: 136-323
gcggacccgcagacccctccctcccagatatcctcttttctccaccaggctacccattttgagaagagggggaaaaaggaagtttgtcctgtcctggatcagtttctttgtcatgtagccaagactggagaaacaatgattcagtggtcccaatttaaaggctattttattttcaaactggagaaagtgatggatgatttcagaacttcagctcctgagccaagaggtcctcccaaccctaatgtcgaatatattccctttgatgaaatgaaggaaagaatactgaaaattgtcactggatttaatggtatcccttttactat

SEQ ID NO: 171339 - DNA, 534 bp, Homo sapiens
  Payload ID: 13699
  Gene Symbol: PPP4R3A
  Gene Name: protein phosphatase 4, regulatory subunit 3A
  ENST ID: ENST00000557018
  CDS Start-End: 84-534
acacaccgcccagcgctcgcacgacgggcccctttcctgggcgtctactggcggggcccccgccccggttcccgggcggcacgatgaccgacacccggcggcgggtgaaggtgtacacgctcaacgaggaccggcagtgggacgaccggggcaccgggcatgtgtcgtctggctacgtggagcggctgaagggcatgtccctgcttgtcagggctgagagcgacggttctctacttttagagtcgaaaataaatcctaacactgcataccagaaacaacaggacactctgattgtgtggtctgaagcagaaaattatgacttggcccttagctttcaagaaaaagctggatgtgatgaaatttgggagaaaatatgtcaggttcaaggaaaggacccttccgtggacatcactcaggaccttgtggatgaatctgaagaggagcgttttgatgatatgtcatcgccaggcttagaattgccatcttgtgaattaagtcgccttgaagaaattgcagaacttgtggcatcatctt

SEQ ID NO: 171340 - DNA, 2515 bp, Homo sapiens
  Payload ID: 13699
  Gene Symbol: PPP4R3A
  Gene Name: protein phosphatase 4, regulatory subunit 3A
  ENST ID: ENST00000554308
  CDS Start-End: 1-1630
cggcacgatgaccgacacccggcggcgggtgaaggtgtacacgctcaacgaggaccggcagtgggacgaccggggcaccgggcatgtgtcgtctggctacgtggagcggctgaagggcatgtccctgcttgtcagggctgagagcgacggttctctacttttagagtcgaaaataaatcctaacactgcataccagaaacaacaggacactctgattgtgtggtctgaagcagaaaattatgacttggcccttagctttcaagaaaaagctggatgtgatgaaatttgggagaaaatatgtcaggttcaaggaaaggacccttccgtggacatcactcaggaccttgtggatgaatctgaagaggagcgttttgatgatatgtcatcgccaggcttagaattgccatcttgtgaattaagtcgccttgaagaaattgcagaacttgtggcatcatctttaccttcacctcttcgtcgtgaaaaacttgcactggcactagaaaatgagggttatattaaaaagctcctggagctttttcatgtgtgtgaagatttggaaaatattgaaggactgcaccacttgtatgaaattatcaaaggcatctttctcttgaatcgaactgctctttttgaagttatgttctctgaagaatgtataatggacgtcattggatgtttagaatatgatcctgctttatcacaaccacgaaaacacagggaatttctaacaaaaacagccaagtttaaagaagtgattcccatatcagatcctgagctgaaacaaaaaattcatcagacatacagagttcagtatatacaagatatggttctaccaactccttcggtctttgaagaaaacatgttatcaacacttcactcttttatctttttcaataaggtagagattgttggcatgttgcaggaagatgaaaaatttctgacagatttgtttgcacaactaacagatgaagcaacagatgaggaaaaaagacaggaattggttaactttttaaaagaattttgtgcgttttcccaaacgctacagcctcaaaacagagatgcttttttcaagactttgtcaaacatgggcatattaccagctttagaagtcatccttggcatggatgatacacaggtgcgaagtgctgctactgatatattctcatacttggttgaatataatccatccatggtacgagagtttgtcatgcaggaggcacaacagaatgatgatgatattttgctcatcaacctcattatagaacatatgatttgtgatacagatcctgaacttggaggagcagtccagcttatgggcctgcttcgaactttagttgacccagagaacatgctagccactgccaataaaacagaaaagactgaatttctgggtttcttctacaagcactgtatgcatgttctcactgctcctttactagcaaatacaacagaagacaaacctagtaaagatgattttcagactgcccaactattggcacttgtattggaattgttaacattttgtgtggagcaccatacctaccacataaagaactacattattaataaggatatcctccggagagtgctagttcttatggcctcgaagcatgctttcttggcattataaaccgtgtcagcatggttgcctggctacctgctcatgaaggacttgattaatagcaaattggcaatttaacgagccacttccatgatctccaaagaaaccaaaatacaaacacaatatttaatcttgccaaccgaagacgatgtgactgcatgaagtgcccttcgttttaaaagaaagattattggattaaaagatgagttttacaaccgctacataatgaaaagttttttgtttgaaccagtagtgaaagcatttctcaacaatggatcccgctacaatctgatgaactctgccataatagagatgtttgaatttattagagtggaagatataaaatcattaactgctcatgtaattgaaaattactggaaagcactggaagatgtagattatgtacagacatttaaaggattaaaactgagatttgaacaacaaagagaaaggcaagataatcccaaacttgacagtatgcgttccattttgaggaatcacagatatcgaagagatgccagaacactagaagatgaagaagagatgtggtttaacacagatgaagatgacatggaagatggagaagctgtagtgtctccatctgacaaaactaaaaatgatgatgatattatggatccaataagtaaattcatggaaaggaagaaattaaaagaaagtgaggaaaaggaagtgcttctgaaaacaaacctttctggacggcagagcccaagtttcaagctttccctgtccagtggaacgaagactaacctcaccagccagtcatctacaacaaatctgcctggttctccgggatcacctggatccccaggatctccaggctctcctggatccgtacctaaaaatacatctcagacggcagctattactacaaag

SEQ ID NO: 171341 - DNA, 4108 bp, Homo sapiens
  Payload ID: 13699
  Gene Symbol: PPP4R3A
  Gene Name: protein phosphatase 4, regulatory subunit 3A
  Uniprot ID: Q6IN85
  ENST ID: ENST00000554684
  CDS Start-End: 498-2960
cgcctgtcggcttctgacgtttaaaacagggggagcggaagggagccactggccgcggtggcagggccaggtataaggaaggaaaatatggcggcggcggcggcggcctgaggaggcggcggcggcgcgggaagctgcttcgcggagatcatggcggaggcgggagcagggcagtgacgggagccccgagttcctagcgctgcggggcgggaggctacgaagcgctgcgcggccccctcggggctgccgggcgccgggctcgccaggcctggacaatagcgccggggagccggaggcgaggaaaggcggcggcccagagctcggtccctggagcgggccatgcaggcggcggcgcggccccgcggcgcccagcggcggcagtgaggccggggagccctccgctcgcgggcgccctcacgcctcgcccctcgcctctccagggcccctttcctgggcgtctactggcggggcccccgccccggttcccgggcggcacgatgaccgacacccggcggcgggtgaaggtgtacacgctcaacgaggaccggcagtgggacgaccggggcaccgggcatgtgtcgtctggctacgtggagcggctgaagggcatgtccctgcttgtcagggctgagagcgacggttctctacttttagagtcgaaaataaatcctaacactgcataccagaaacaacaggacactctgattgtgtggtctgaagcagaaaattatgacttggcccttagctttcaagaaaaagctggatgtgatgaaatttgggagaaaatatgtcaggttcaaggaaaggacccttccgtggacatcactcaggaccttgtggatgaatctgaagaggagcgttttgatgatatgtcatcgccaggcttagaattgccatcttgtgaattaagtcgccttgaagaaattgcagaacttgtggcatcatctttaccttcacctcttcgtcgtgaaaaacttgcactggcactagaaaatgagggttatattaaaaagctcctggagctttttcatgtgtgtgaagatttggaaaatattgaaggactgcaccacttgtatgaaattatcaaaggcatctttctcttgaatcgaactgctctttttgaagttatgttctctgaagaatgtataatggacgtcattggatgtttagaatatgatcctgctttatcacaaccacgaaaacacagggaatttctaacaaaaacagccaagtttaaagaagtgattcccatatcagatcctgagctgaaacaaaaaattcatcagacatacagagttcagtatatacaagatatggttctaccaactccttcggtctttgaagaaaacatgttatcaacacttcactcttttatctttttcaataaggtagagattgttggcatgttgcaggaagatgaaaaatttctgacagatttgtttgcacaactaacagatgaagcaacagatgaggaaaaaagacaggaattggttaactttttaaaagaattttgtgcgttttcccaaacgctacagcctcaaaacagagatgcttttttcaagactttgtcaaacatgggcatattaccagctttagaagtcatccttggcatggatgatacacaggtgcgaagtgctgctactgatatattctcatacttggttgaatataatccatccatggtacgagagtttgtcatgcaggaggcacaacagaatgatgatgatattttgctcatcaacctcattatagaacatatgatttgtgatacagatcctgaacttggaggagcagtccagcttatgggcctgcttcgaactttagttgacccagagaacatgctagccactgccaataaaacagaaaagactgaatttctgggtttcttctacaagcactgtatgcatgttctcactgctcctttactagcaaatacaacagaagacaaacctagtaaagatgattttcagactgcccaactattggcacttgtattggaattgttaacattttgtgtggagcaccatacctaccacataaagaactacattattaataaggatatcctccggagagtgctagttcttatggcctcgaagcatgctttcttggcattatgtgcccttcgttttaaaagaaagattattggattaaaagatgagttttacaaccgctacataatgaaaagttttttgtttgaaccagtagtgaaagcatttctcaacaatggatcccgctacaatctgatgaactctgccataatagagatgtttgaatttattagagtggaagatataaaatcattaactgctcatgtaattgaaaattactggaaagcactggaagatgtagattatgtacagacatttaaaggattaaaactgagatttgaacaacaaagagaaaggcaagataatcccaaacttgacagtatgcgttccattttgaggaatcacagatatcgaagagatgccagaacactagaagatgaagaagagatgtggtttaacacagatgaagatgacatggaagatggagaagctgtagtgtctccatctgacaaaactaaaaatgatgatgatattatggatccaataagtaaattcatggaaaggaagaaattaaaagaaagtgaggaaaaggaagtgcttctgaaaacaaacctttctggacggcagagcccaagtttcaagctttccctgtccagtggaacgaagactaacctcaccagccagtcatctacaacaaatctgcctggttctccgggatcacctggatccccaggatctccaggctctcctggatccgtacctaaaaatacatctcagacggcagctattactacaaagggaggcctcgtgggtctggtagattatcctgatgatgatgaagatgatgatgaggatgaagataaggaagatacgttaccattgtcaaagaaagcaaaatttgattcataataatggcaacggcctaggatcagtacctgttgaaaaaaactggttctccacccctcccccatacaaaatccacaacaaagcgcagtggtctcttgtgaatgactgacacagatcagcctcttacacttgacttctgctcatcaagtgccaattcaatggagcaggaggaggggatatcatatatttaggggaaagacttaagcctttgagctctccagcttggaccacacattgcccttttctcagggaaggaaatggaaacaaaaagccaacagggcaggggttttgtaagtggaactctggattgactggtcagttgctacaatcagaatatgctttcttggaccatgtttgagactcagaagaatgggcctttctgccataattcttcactagtcaagaatgccagcagtttctttgtataaagagacctgcctttaaaatcatacattctgaacattttagtcaagctacaacaggtttggaaaacctctgtgggggaggggcgagtataaagttttcctcttttttaactgttccctttgcccttcaaactgcagatatttttttttttaagtggggacttctccctacttgattaaagattgagtggaattctagatgtggtcatttgtgtcataatttttttgttttattttgtttttgattttttttttcctcccctgagtgtatgcttagttgttgagtatatatatttgggaccattaaaactttttttgatgtaatataacctaacgttgtgctggtacctgttttaccatgtgtaatttttgttctacatcacagttcttaatttgtttagagttttatgaaagatggtatagtttttattgacaaaagcaaagtaatcttacaactatgtgcatacaaaagcaatactattttgtgactaaatattttatattaaaatttacatcagcaactgtcttgagaattcagggaaatagaatggaatttaaaacttcaacagttttgttaaatctagaaacatgaaattagtattccaaagagattctgaaatttcttttcttggggaaatgacggtacattaaatcaaaattgaggatggatgatttaaaaacatttgacttttgaataataaaaagaaaagtgaagagtaagagaaa

SEQ ID NO: 171342 - DNA, 3369 bp, Homo sapiens
  Payload ID: 13699
  Gene Symbol: PPP4R3A
  Gene Name: protein phosphatase 4, regulatory subunit 3A
  Uniprot ID: Q6IN85
  ENST ID: ENST00000554943
  CDS Start-End: 117-2618
tgaggccggggagccctccgctcgcgggcgccctcacgcctcgcccctcgcctctccagggcccctttcctgggcgtctactggcggggcccccgccccggttcccgggcggcacgatgaccgacacccggcggcgggtgaaggtgtacacgctcaacgaggaccggcagtgggacgaccggggcaccgggcatgtgtcgtctggctacgtggagcggctgaagggcatgtccctgcttgtcagggctgagagcgacggttctctacttttagagtcgaaaataaatcctaacactgcataccagaaacaacaggacactctgattgtgtggtctgaagcagaaaattatgacttggcccttagctttcaagaaaaagctggatgtgatgaaatttgggagaaaatatgtcaggttcaaggaaaggacccttccgtggacatcactcaggaccttgtggatgaatctgaagaggagcgttttgatgatatgtcatcgccaggcttagaattgccatcttgtgaattaagtcgccttgaagaaattgcagaacttgtggcatcatctttaccttcacctcttcgtcgtgaaaaacttgcactggcactagaaaatgagggttatattaaaaagctcctggagctttttcatgtgtgtgaagatttggaaaatattgaaggactgcaccacttgtatgaaattatcaaaggcatctttctcttgaatcgaactgctctttttgaagttatgttctctgaagaatgtataatggacgtcattggatgtttagaatatgatcctgctttatcacaaccacgaaaacacagggaatttctaacaaaaacagccaagtttaaagaagtgattcccatatcagatcctgagctgaaacaaaaaattcatcagacatacagagttcagtatatacaagatatggttctaccaactccttcggtctttgaagaaaacatgttatcaacacttcactcttttatctttttcaataaggtagagattgttggcatgttgcaggaagatgaaaaatttctgacagatttgtttgcacaactaacagatgaagcaacagatgaggaaaaaagacaggaattggttaactttttaaaagaattttgtgcgttttcccaaacgctacagcctcaaaacagagatgcttttttcaagactttgtcaaacatgggcatattaccagctttagaagtcatccttggcatggatgatacacaggtgcgaagtgctgctactgatatattctcatacttggttgaatataatccatccatggtacgagagtttgtcatgcaggaggcacaacagaatgatgatgtaagtaagaagttaacagagcaaaaaataaccagcaaggatattttgctcatcaacctcattatagaacatatgatttgtgatacagatcctgaacttggaggagcagtccagcttatgggcctgcttcgaactttagttgacccagagaacatgctagccactgccaataaaacagaaaagactgaatttctgggtttcttctacaagcactgtatgcatgttctcactgctcctttactagcaaatacaacagaagacaaacctagtaaagatgattttcagactgcccaactattggcacttgtattggaattgttaacattttgtgtggagcaccatacctaccacataaagaactacattattaataaggatatcctccggagagtgctagttcttatggcctcgaagcatgctttcttggcattatgtgcccttcgttttaaaagaaagattattggattaaaagatgagttttacaaccgctacataatgaaaagttttttgtttgaaccagtagtgaaagcatttctcaacaatggatcccgctacaatctgatgaactctgccataatagagatgtttgaatttattagagtggaagatataaaatcattaactgctcatgtaattgaaaattactggaaagcactggaagatgtagattatgtacagacatttaaaggattaaaactgagatttgaacaacaaagagaaaggcaagataatcccaaacttgacagtatgcgttccattttgaggaatcacagatatcgaagagatgccagaacactagaagatgaagaagagatgtggtttaacacagatgaagatgacatggaagatggagaagctgtagtgtctccatctgacaaaactaaaaatgatgatgatattatggatccaataagtaaattcatggaaaggaagaaattaaaagaaagtgaggaaaaggaagtgcttctgaaaacaaacctttctggacggcagagcccaagtttcaagctttccctgtccagtggaacgaagactaacctcaccagccagtcatctacaacaaatctgcctggttctccgggatcacctggatccccaggatctccaggctctcctggatccgtacctaaaaatacatctcagacggcagctattactacaaagggaggcctcgtgggtctggtagattatcctgatgatgatgaagatgatgatgaggatgaagataaggaagatacgttaccattgtcaaagaaagcaaaatttgattcataataatggcaacggcctaggatcagtacctgttgaaaaaaactggttctccacccctcccccatacaaaatccacaacaaagcgcagtggtctcttgtgaatgactgacacagatcagcctcttacacttgacttctgctcatcaagtgccaattcaatggagcaggaggaggggatatcatatatttaggggaaagacttaagcctttgagctctccagcttggaccacacattgcccttttctcagggaaggaaatggaaacaaaaagccaacagggcaggggttttgtaagtggaactctggattgactggtcagttgctacaatcagaatatgctttcttggaccatgtttgagactcagaagaatgggcctttctgccataattcttcactagtcaagaatgccagcagtttctttgtataaagagacctgcctttaaaatcatacattctgaacattttagtcaagctacaacaggtttggaaaacctctgtgggggaggggcgagtataaagttttcctcttttttaactgttccctttgcccttcaaactgcagatatttttttttttaagtggggacttctccctacttgattaaagattgagtggaattctagatgtggtcatttgtgtcataatttttttgttttattttgtttttgattttttttttcctcccctgagtgtatgcttagttgttgagtatatatatttgggaccattaaaactttttttgatgtaatataa

SEQ ID NO: 171343 - DNA, 3236 bp, Homo sapiens
  Payload ID: 13699
  Gene Symbol: PPP4R3A
  Gene Name: protein phosphatase 4, regulatory subunit 3A
  Uniprot ID: Q6IN85
  ENST ID: ENST00000555462
  CDS Start-End: 832-2616
gcgtcccgcctcctccgctccctgcgctcccgccacctcggcaactccgcgcccgcctcccgcctccgtcggaagcctccgccgcagtaaggctcccggtctcgctgctgtctctttaaatggtggggctacgagccgcccctgcagctgctccctgggtggccccgcgcgccgcttttgaggggcgaaccaagatggcggcggttttggctgtgtgaggaagacggaagagacggcggcggagggaaaccgacttccactagtccgggtcgcttgggcggccgggggccctcagagtctcccgggcagtggtagcagttgcagcaggatcaggcgcctgtcggcttctgacgtttaaaacagggggagcggaagggagccactggccgcggtggcagggccaggtataaggaaggaaaatatggcggcggcggcggcggcctgaggaggcggcggcggcgcgggaagctgcttcgcggagatcatggcggaggcgggagcagggcagtgacgggagccccgagttcctagcgctgcggggcgggaggctacgaagcgctgcgcggccccctcggggctgccgggcgccgggctcgccaggcctggacaatagcgccggggagccggaggcgaggaaaggcggcggcccagagctcggtccctggagcgggccatgcaggcggcggcgcggccccgcggcgcccagcggcggcagtgaggccggggagccctccgctcgcgggcgccctcacgcctcgcccctcgcctctccagggcccctttcctgggcgtctactggcggggcccccgccccggttcccgggcggcacgatgaccgacacccggcggcgggtgaaggtgtacacgctcaacgaggaccggcagtgggacgaccggggcaccgggcatgtgtcgtctggctacgtggagcggctgaagggcatgtccctgcttgtcagggctgagagcgacggttctctacttttagagtcgaaaataaatcctaacactgcataccagaaacaacaggaagatgaaaaatttctgacagatttgtttgcacaactaacagatgaagcaacagatgaggaaaaaagacaggaattggttaactttttaaaagaattttgtgcgttttcccaaacgctacagcctcaaaacagagatgcttttttcaagactttgtcaaacatgggcatattaccagctttagaagtcatccttggcatggatgatacacaggtgcgaagtgctgctactgatatattctcatacttggttgaatataatccatccatggtacgagagtttgtcatgcaggaggcacaacagaatgatgatgtaagtaagaagttaacagagcaaaaaataaccagcaaggatattttgctcatcaacctcattatagaacatatgatttgtgatacagatcctgaacttggaggagcagtccagcttatgggcctgcttcgaactttagttgacccagagaacatgctagccactgccaataaaacagaaaagactgaatttctgggtttcttctacaagcactgtatgcatgttctcactgctcctttactagcaaatacaacagaagacaaacctagtaaagatgattttcagactgcccaactattggcacttgtattggaattgttaacattttgtgtggagcaccatacctaccacataaagaactacattattaataaggatatcctccggagagtgctagttcttatggcctcgaagcatgctttcttggcattatgtgcccttcgttttaaaagaaagattattggattaaaagatgagttttacaaccgctacataatgaaaagttttttgtttgaaccagtagtgaaagcatttctcaacaatggatcccgctacaatctgatgaactctgccataatagagatgtttgaatttattagagtggaagatataaaatcattaactgctcatgtaattgaaaattactggaaagcactggaagatgtagattatgtacagacatttaaaggattaaaactgagatttgaacaacaaagagaaaggcaagataatcccaaacttgacagtatgcgttccattttgaggaatcacagatatcgaagagatgccagaacactagaagatgaagaagagatgtggtttaacacagatgaagatgacatggaagatggagaagctgtagtgtctccatctgacaaaactaaaaatgatgatgatattatggatccaataagtaaattcatggaaaggaagaaattaaaagaaagtgaggaaaaggaagtgcttctgaaaacaaacctttctggacggcagagcccaagtttcaagctttccctgtccagtggaacgaagactaacctcaccagccagtcatctacaacaaatctgcctggttctccgggatcacctggatccccaggatctccaggctctcctggatccgtacctaaaaatacatctcagacggcagctattactacaaagggaggcctcgtgggtctggtagattatcctgatgatgatgaagatgatgatgaggatgaagataaggaagatacgttaccattgtcaaagaaagcaaaatttgattcataataatggcaacggcctaggatcagtacctgttgaaaaaaactggttctccacccctcccccatacaaaatccacaacaaagcgcagtggtctcttgtgaatgactgacacagatcagcctcttacacttgacttctgctcatcaagtgccaattcaatggagcaggaggaggggatatcatatatttaggggaaagacttaagcctttgagctctccagcttggaccacacattgcccttttctcagggaaggaaatggaaacaaaaagccaacagggcaggggttttgtaagtggaactctggattgactggtcagttgctacaatcagaatatgctttcttggaccatgtttgagactcagaagaatgggcctttctgccataattcttcactagtcaagaatgccagcagtttctttgtataaagagacctgcctttaaaatcatacattctgaacattttagtcaagctacaacaggtttggaaaacctctgtgggggaggggcgagtataaagttttcctcttttttaactgttccctttgcccttcaaactgcagatatttttttttttaagtggggacttctccctacttgattaaagattgagtggaattcta

SEQ ID NO: 171344 - DNA, 595 bp, Homo sapiens
  Payload ID: 13699
  Gene Symbol: PPP4R3A
  Gene Name: protein phosphatase 4, regulatory subunit 3A
  ENST ID: ENST00000555470
  CDS Start-End: 1-595
tctttttgaagttatgttctctgaagaatgtataatggacgtcattggatgtttagaatatgatcctgctttatcacaaccacgaaaacacagggaatttctaacaaaaacagccaagtttaaagaagtgattcccatatcagatcctgagctgaaacaaaaaattcatcagacatacagagttcagtatatacaagatatggttctaccaactccttcggtctttgaagaaaacatgttatcaacacttcactcttttatctttttcaataaggtagagattgttggcatgttgcaggaagatgaaaaatttctgacagatttgtttgcacaactaacagatgaagcaacagatgaggaaaaaagacaggaattgcctcaaaacagagatgcttttttcaagactttgtcaaacatgggcatattaccagctttagaagtcatccttggcatggatgatacacaggtgcgaagtgctgctactgatatattctcatacttggttgaatataatccatccatggtacgagagtttgtcatgcaggaggcacaacagaatgatgatgtaagtaagaagttaacagagcaaaaaata

SEQ ID NO: 171345 - DNA, 580 bp, Homo sapiens
  Payload ID: 13699
  Gene Symbol: PPP4R3A
  Gene Name: protein phosphatase 4, regulatory subunit 3A
  ENST ID: ENST00000554511
  CDS Start-End: 284-580
tgaggggcgaaccaagatggcggcggttttggctgtgtgaggaagacggaagagacggcggcggagggaaaccgacttccactagtccgggtcgcttgggcggccgggggccctcagagtctcccgggcagtggtagcagttgcagcaggatcaggcgcctgtcggcttctgacgtttaaaacagggggagcggaagggagccactggccgcggtggcagggccagggcccctttcctgggcgtctactggcggggcccccgccccggttcccgggcggcacgatgaccgacacccggcggcgggtgaaggtgtacacgctcaacgaggaccggcagtgggacgaccggggcaccgggcatgtgtcgtctggctacgtggagcggctgaagggcatgtccctgcttgtcagggctgagagcgacggttctctacttttagagtcgaaaataaatcctaacactgcataccagaaacaacaggacactctgattgtgtggtctgaagcagaaaattatgacttggcccttagctttcaagaaaaagctggatgtgatgaaatttgggagaaaatatgtcag

SEQ ID NO: 171346 - DNA, 571 bp, Homo sapiens
  Payload ID: 13699
  Gene Symbol: PPP4R3A
  Gene Name: protein phosphatase 4, regulatory subunit 3A
  ENST ID: ENST00000555029
  CDS Start-End: 1-571
atgaccgacacccggcggcgggtgaaggtgtacacgctcaacgaggaccggcagtgggacgaccggggcaccgggcatgtgtcgtctggctacgtggagcggctgaagggcatgtccctgcttgtcagggctgagagcgacggttctctacttttagagtcgaaaataaatcctaacactgcataccagaaacaacaggaagatgaaaaatttctgacagatttgtttgcacaactaacagatgaagcaacagatgaggaaaaaagacaggaattggttaactttttaaaagaattttgtgcgttttcccaaacgctacagcctcaaaacagagatgcttttttcaagactttgtcaaacatgggcatattaccagctttagaagtcatccttggcatggatgatacacaggtgcgaagtgctgctactgatatattctcatacttggttgaatataatccatccatggtacgagagtttgtcatgcaggaggcacaacagaatgatgatgtaagtaagaagttaacagagcaaaaaataaccagcaaggatattttgctcatcaacctca

SEQ ID NO: 171347 - DNA, 2953 bp, Homo sapiens
  Payload ID: 13699
  Gene Symbol: PPP4R3A
  Gene Name: protein phosphatase 4, regulatory subunit 3A
  ENST ID: ENST00000554390
  CDS Start-End: 834-2953
ctgcgtcccgcctcctccgctccctgcgctcccgccacctcggcaactccgcgcccgcctcccgcctccgtcggaagcctccgccgcagtaaggctcccggtctcgctgctgtctctttaaatggtggggctacgagccgcccctgcagctgctccctgggtggccccgcgcgccgcttttgaggggcgaaccaagatggcggcggttttggctgtgtgaggaagacggaagagacggcggcggagggaaaccgacttccactagtccgggtcgcttgggcggccgggggccctcagagtctcccgggcagtggtagcagttgcagcaggatcaggcgcctgtcggcttctgacgtttaaaacagggggagcggaagggagccactggccgcggtggcagggccaggtataaggaaggaaaatatggcggcggcggcggcggcctgaggaggcggcggcggcgcgggaagctgcttcgcggagatcatggcggaggcgggagcagggcagtgacgggagccccgagttcctagcgctgcggggcgggaggctacgaagcgctgcgcggccccctcggggctgccgggcgccgggctcgccaggcctggacaatagcgccggggagccggaggcgaggaaaggcggcggcccagagctcggtccctggagcgggccatgcaggcggcggcgcggccccgcggcgcccagcggcggcagtgaggccggggagccctccgctcgcgggcgccctcacgcctcgcccctcgcctctccagggcccctttcctgggcgtctactggcggggcccccgccccggttcccgggcggcacgatgaccgacacccggcggcgggtgaaggtgtacacgctcaacgaggaccggcagtgggacgaccggggcaccgggcatgtgtcgtctggctacgtggagcggctgaagggcatgtccctgcttgtcagggctgagagcgacggttctctacttttagagtcgaaaataaatcctaacactgcataccagaaacaacaggacactctgattgtgtggtctgaagcagaaaattatgacttggcccttagctttcaagaaaaagctggatgtgatgaaatttgggagaaaatatgtcaggttcaaggaaaggacccttccgtggacatcactcaggaccttgtggatgaatctgaagaggagcgttttgatgatatgtcatcgccaggcttagaattgccatcttgtgaattaagtcgccttgaagaaattgcagaacttgtggcatcatctttaccttcacctcttcgtcgtgaaaaacttgcactggcactagaaaatgagggttatattaaaaagctcctggagctttttcatgtgtgtgaagatttggaaaatattgaaggactgcaccacttgtatgaaattatcaaaggcatctttctcttgaatcgaactgctctttttgaagttatgttctctgaagaatgtataatggacgtcattggatgtttagaatatgatcctgctttatcacaaccacgaaaacacagggaatttctaacaaaaacagccaagtttaaagaagtgattcccatatcagatcctgagctgaaacaaaaaattcatcagacatacagagttcagtatatacaagatatggttctaccaactccttcggtctttgaagaaaacatgttatcaacacttcactcttttatctttttcaataaggtagagattgttggcatgttgcaggaagatgaaaaatttctgacagatttgtttgcacaactaacagatgaagcaacagatgaggaaaaaagacaggaattggttaactttttaaaagaattttgtgcgttttcccaaacgctacagcctcaaaacagagatgcttttttcaagactttgtcaaacatgggcatattaccagctttagaagtcatccttggcatggatgatacacaggtgcgaagtgctgctactgatatattctcatacttggttgaatataatccatccatggtacgagagtttgtcatgcaggaggcacaacagaatgatgatgatattttgctcatcaacctcattatagaacatatgatttgtgatacagatcctgaacttggaggagcagtccagcttatgggcctgcttcgaactttagttgacccagagaacatgctagccactgccaataaaacagaaaagactgaatttctgggtttcttctacaagcactgtatgcatgttctcactgctcctttactagcaaatacaacagaagacaaacctagtaaagatgattttcagactgcccaactattggcacttgtattggaattgttaacattttgtgtggagcaccatacctaccacataaagaactacattattaataaggatatcctccggagagtgctagttcttatggcctcgaagcatgctttcttggcattatgtgcccttcgttttaaaagaaagattattggattaaaagatgagttttacaaccgctacataatgaaaagttttttgtttgaaccagtagtgaaagcatttctcaacaatggatcccgctacaatctgatgaactctgccataatagagatgtttgaatttattagagtggaagatataaaatcattaactgctcatgtaattgaaaattactggaaagcactggaagatgtagattatgtacagacatttaaaggattaaaactgagatttgaacaacaaagagaaaggcaagataatcccaaacttgacagtatgcgttccattttgaggaatcacagatatcgaagagatgccagaacactagaagatgaagaagagatgtggtttaacacagatgaagatgacatggaagatggagaagctgtagtgtctccatctgacaaaactaaaaatgatgatgatattatggatccaataagtaaattcatggaaaggaa

SEQ ID NO: 171348 - DNA, 5243 bp, Homo sapiens
  Payload ID: 13700
  Gene Symbol: PPP4R3B
  Gene Name: protein phosphatase 4, regulatory subunit 3B
  Uniprot ID: Q5MIZ7
  ENST ID: ENST00000611717
  CDS Start-End: 330-2624
aggcagagagagtcgggttacaagatggcggatctgtagtagttaccgcggcggcgggagagcaagcgagccctggggggcaaagagacgggagagtgggtgtatgcgcgggtgaagtgagaggtaacggggcctccgggcggagaggcctcagtggctcttgtcaccccttctcgcggctgaacctttggagccatggtgaattcgggcctctccgaagccgccgccgccgccaccgccactactgcctttaccgtctcctaagagtgaggagcgcggacgaggtaagcgaggaggcggcggctagagcggtggagacagcagccaccatgtcggatacgcggcggcgagtgaaggtctataccctgaacgaagaccggcaatgggacgaccgaggcaccgggcacgtctcctccacttacgtggaggagctcaaggggatgtcgctgctggttcgggcagagtccgacggatcactactcttggaatcaaagataaatccaaatactgcatatcagaaacaacaggatacattaattgtttggtcagaagcagagaactatgatttggctctgagttttcaggagaaagctggctgtgatgagatctgggaaaaaatttgtcaggttcaaggtaaagacccatcagtggaagtcacacaggacctcattgatgaatctgaagaagaacgatttgaagaaatgcctgaaactagtcatctgattgacctgcccacatgtgaactcaataaacttgaagagattgctgacttagttacctcagtgctctcctcacctatccgtagggaaaagctggctctcgccttggaaaatgaaggctatattaaaaaactattgcagctgttccaagcttgcgagaacctagaaaacactgaaggcttacaccatttgtatgaaattattagaggaatcttattcctaaataaggcaactctttttgaggtaatgttttctgatgagtgtatcatggatgtcgtgggatgccttgaatatgaccctgctttggctcagccaaaaagacatagagaattcttgaccaaaactgcaaagttcaaggaagttataccaataacagactctgaactaaggcaaaaaatacatcagacttacagggtacagtacattcaggacatcattttgcccacaccatctgtttttgaagagaattttctttctactcttacgtcttttattttcttcaacaaagttgagatagtcagcatgttgcaggaagatgagaagtttttgtctgaagtttttgcacaattaacagatgaggctacagatgatgataaacggcgtgaattggttaattttttcaaggagttttgtgcattttctcagacattacaacctcaaaacagggatgcatttttcaaaacattggcaaaattgggaattcttcctgctcttgaaattgtaatgggcatggatgatttgcaagtcagatcagctgctacagatatattttcttatctagtagaatttagtccatctatggtccgagagtttgtaatgcaagaagctcagcagagtgatgacgatattcttcttattaatgtggtaattgaacaaatgatctgtgatactgatcctgagctaggaggcgctgttcagttaatgggacttcttcgtactctaattgatccagagaacatgctggctacaactaataaaaccgaaaaaagtgaatttctaaattttttctacaaccattgtatgcatgttctcacagcaccacttttgaccaatacttcagaagacaaatgtgaaaaggataatatagttggatcaaacaaaaacaacacaatttgtcccggtgcccttcgctttatgaggcggataattggacttaaagatgaattttataatcgttacatcaccaagggaaatctttttgagccagttataaatgcacttctggataatggaactcggtataatctgttgaattcagctgttattgagttgtttgaatttataagagtggaagatatcaagtctcttactgcccatatagttgaaaacttttataaagcacttgaatcgattgaatatgttcagacattcaaaggattgaagactaaatatgagcaagaaaaagacagacaaaatcagaaactgaacagtgtaccatctatattgcgtagtaacagatttcgcagagatgcaaaagccttggaagaggatgaagaaatgtggtttaatgaagatgaagaagaggaaggaaaagcagttgtggcaccagtggaaaaacctaagccagaagatgattttccagataattatgaaaagtttatggagactaaaaaagcaaaagaaagtgaagacaaggaaaaccttcccaaaaggacatctcctggtggcttcaaatttactttctcccactctgccagtgctgctaatggaacaaacagtaaatctgtagtggctcagataccaccagcaacttctaatggatcctcttccaaaaccacaaacttgcctacgtcagtaacagccaccaagggaagtttggttggcttagtggattatccagatgatgaagaggaagatgaagaagaagaatcgtcccccaggaaaagacctcgtcttggctcataaaatatttattaggggaccctcaacatgtggtcttacaatgctgcaactgttcagtgagctgaaaatctgaatcagaaagctttctcaattgaacttataaaatatacaaggagtagcaaaagacagtatatcagctaagagagtttagttctaataaaaatcaggcttcccaggaacttgattgcttgctagtaattaaggggtttgccttttaggctgtcaaaacaaacattagtaaccagaacctgggagacagcttctcagcaaggaaaagtcacaggtttggggacggtttaggggaggggaaaaggttgatataataatgcagggttgctcctcggggtgtcgatctagaaacaattttacagaacttcagttgtaaactcaataacattacttgtataatggtgctggccatgttgttgttttaatcagttgcctctttttaaaagaaatttttatggaaaacacattcaactatcattaaaaaaatgaagttaagctgttgggaccatttctttaagatttaacaaaagttcagccttttaggtagttgaagggaagtacaccccgtattcagcacatgttgagttttctacaccaggaattttcaatatgtatattgatgaaaacaagctcaattcaaactggacagttttaagataatgttaaaatcagcacttttagagacaacgaaggccaagaatcagtacagtagtattccaaaatgattttctctagaaatttgaaagtagatcgaacagaatgttgtcaaccgcctaccagtacaatcttttgtggaagatactttgaaatcactttctactttgttagtaaagttctgtctttccagagctgcaagttttaaagtgttacttatacagaccaaccaagaatagtgctgaattaagtggcatttagtatctagaagccattttgatccaagaagctacttaagtgtcaaagtcagcatgcagcacatgtagcttttctgtaaacaagggtgtgatatgaaagctgcttttttaagaagagtaaaagcacattccatatacgtaagtgaattttaaaaataaattgaggcaaacagttaagttttatttttagagcaacaagttaactgtaaatattttaatgttagtttgctcatctatgatctgagatcatgccgaagtgagaaaaatctccccaaaatacaatttaatgcattgggaaaaaaaaactttaacagtaattccagccacaatctttagatcacccttgtaatgtgttacgggtccatttttcctggaatcgtttaatctaaagcagtttcccctgttttggagattttgtagttaattttaattttggctattgtttggaaaagatgagctgtctgtgtagatatgaagtatagttttttccataaaacagatgtttattttgtattaaaaaataccactgtacttgttttacaccatttgtatacatgtggtgatattaatgctaaactgtaaaattcaggaattaaaatgtgaccctgtaattccataattgatgtttgtgtttggtttgttgtaaatataaattaactccattttgagatatgtcaattttacagtatcttttaaaagccaataaaattatccataaatatttattataaactgctagatcataccccaattttaatgaaataattctaaacaaatgcgggtcaatggcactttatcagtgactacttatagaaggtaagccttggggaaatcatagcatcacagtatggagcttttctcaccttttcaattaaaggtgtacatatagtaagaaagaaagaccttccacctcataaggcaggtgactcaggatattttaaactaagatcagtaaagttcccatccactttctttgaatcatcaaattttatcgagacccatctctcagcttttagtaaatttcttcttaaaataagcccacatgtaaaacactttcctagttactttttgtttgtttgtttgagtctcgctctgttgcccaggctggagtgtagttgcacgatttcggcttattgcaacatccgccacctgggttcaagcaattctctgcctcagcctgagtagctgggattacaggtgcccgtcaccatgccaggctaatttttgtattttcagtagagacggggtttcaccatcttggccaggctggtcttaaactcctgacctcacaatccacccgcctcagcctccctatctctgtatcttatgaagacttcctttttctttctgaagagctgccataagtcttaaacatttaaatcatcagaaccttttcttgtagcagaaatgtgaatgttttcttgaagtacaggttacggttttcatggtacaagtgcttacctacgacgataagagaacaaggcttaaaatatccctcaaaagaacaattgtgagaattccatgttagcggctgtctttaaacgactaccctcaggcagatctgggtttttatatctttatcttcattcagtgaagcaagccaaaagcccacatttgtatgccttaggtcttcttaaaatggtatctgtaaacatgtgtccaatataaaaactatttttaataaaaagttacatgaaacaga

SEQ ID NO: 171349 - DNA, 4385 bp, Homo sapiens
  Payload ID: 13700
  Gene Symbol: PPP4R3B
  Gene Name: protein phosphatase 4, regulatory subunit 3B
  Uniprot ID: Q5MIZ7
  ENST ID: ENST00000616407
  CDS Start-End: 304-2853
ggcggatctgtagtagttaccgcggcggcgggagagcaagcgagccctggggggcaaagagacgggagagtgggtgtatgcgcgggtgaagtgagaggtaacggggcctccgggcggagaggcctcagtggctcttgtcaccccttctcgcggctgaacctttggagccatggtgaattcgggcctctccgaagccgccgccgccgccaccgccactactgcctttaccgtctcctaagagtgaggagcgcggacgaggtaagcgaggaggcggcggctagagcggtggagacagcagccaccatgtcggatacgcggcggcgagtgaaggtctataccctgaacgaagaccggcaatgggacgaccgaggcaccgggcacgtctcctccacttacgtggaggagctcaaggggatgtcgctgctggttcgggcagagtccgacggatcactactcttggaatcaaagataaatccaaatactgcatatcagaaacaacaggatacattaattgtttggtcagaagcagagaactatgatttggctctgagttttcaggagaaagctggctgtgatgagatctgggaaaaaatttgtcaggttcaaggtaaagacccatcagtggaagtcacacaggacctcattgatgaatctgaagaagaacgatttgaagaaatgcctgaaactagtcatctgattgacctgcccacatgtgaactcaataaacttgaagagattgctgacttagttacctcagtgctctcctcacctatccgtagggaaaagctggctctcgccttggaaaatgaaggctatattaaaaaactattgcagctgttccaagcttgcgagaacctagaaaacactgaaggcttacaccatttgtatgaaattattagaggaatcttattcctaaataaggcaactctttttgaggtaatgttttctgatgagtgtatcatggatgtcgtgggatgccttgaatatgaccctgctttggctcagccaaaaagacatagagaattcttgaccaaaactgcaaagttcaaggaagttataccaataacagactctgaactaaggcaaaaaatacatcagacttacagggtacagtacattcaggacatcattttgcccacaccatctgtttttgaagagaattttctttctactcttacgtcttttattttcttcaacaaagttgagatagtcagcatgttgcaggaagatgagaagtttttgtctgaagtttttgcacaattaacagatgaggctacagatgatgataaacggcgtgaattggttaattttttcaaggagttttgtgcattttctcagacattacaacctcaaaacagggatgcatttttcaaaacattggcaaaattgggaattcttcctgctcttgaaattgtaatgggcatggatgatttgcaagtcagatcagctgctacagatatattttcttatctagtagaatttagtccatctatggtccgagagtttgtaatgcaagaagctcagcagagtgatgacgatattcttcttattaatgtggtaattgaacaaatgatctgtgatactgatcctgagctaggaggcgctgttcagttaatgggacttcttcgtactctaattgatccagagaacatgctggctacaactaataaaaccgaaaaaagtgaatttctaaattttttctacaaccattgtatgcatgttctcacagcaccacttttgaccaatacttcagaagacaaatgtgaaaaggatttttttttaaaacattacagatatagttggagtttcatatgtaccccttcacattcccattcccattctaccccctcttcctccatctctcaagataatatagttggatcaaacaaaaacaacacaatttgtcccgataattatcaaacagcacagctacttgccttaattttagagttactcacattttgtgtggaacatcacacatatcacataaaaaactatattatgaacaaggacttgctaagaagagtcttggtcttgatgaattcaaagcacacttttctggccttgtgtgcccttcgctttatgaggcggataattggacttaaagatgaattttataatcgttacatcaccaagggaaatctttttgagccagttataaatgcacttctggataatggaactcggtataatctgttgaattcagctgttattgagttgtttgaatttataagagtggaagatatcaagtctcttactgcccatatagttgaaaacttttataaagcacttgaatcgattgaatatgttcagacattcaaaggattgaagactaaatatgagcaagaaaaagacagacaaaatcagaaactgaacagtgtaccatctatattgcgtagtaacagatttcgcagagatgcaaaagccttggaagaggatgaagaaatgtggtttaatgaagatgaagaagaggaaggaaaagcagttgtggcaccagtggaaaaacctaagccagaagatgattttccagataattatgaaaagtttatggagactaaaaaagcaaaagaaagtgaagacaaggaaaaccttcccaaaaggacatctcctggtggcttcaaatttactttctcccactctgccagtgctgctaatggaacaaacagtaaatctgtagtggctcagataccaccagcaacttctaatggatcctcttccaaaaccacaaacttgcctacgtcagtaacagccaccaagggaagtttggttggcttagtggattatccagatgatgaagaggaagatgaagaagaagaatcgtcccccaggaaaagacctcgtcttggctcataaaatatttattaggggaccctcaacatgtggtcttacaatgctgcaactgttcagtgagctgaaaatctgaatcagaaagctttctcaattgaacttataaaatatacaaggagtagcaaaagacagtatatcagctaagagagtttagttctaataaaaatcaggcttcccaggaacttgattgcttgctagtaattaaggggtttgccttttaggctgtcaaaacaaacattagtaaccagaacctgggagacagcttctcagcaaggaaaagtcacaggtttggggacggtttaggggaggggaaaaggttgatataataatgcagggttgctcctcggggtgtcgatctagaaacaattttacagaacttcagttgtaaactcaataacattacttgtataatggtgctggccatgttgttgttttaatcagttgcctctttttaaaagaaatttttatggaaaacacattcaactatcattaaaaaaatgaagttaagctgttgggaccatttctttaagatttaacaaaagttcagccttttaggtagttgaagggaagtacaccccgtattcagcacatgttgagttttctacaccaggaattttcaatatgtatattgatgaaaacaagctcaattcaaactggacagttttaagataatgttaaaatcagcacttttagagacaacgaaggccaagaatcagtacagtagtattccaaaatgattttctctagaaatttgaaagtagatcgaacagaatgttgtcaaccgcctaccagtacaatcttttgtggaagatactttgaaatcactttctactttgttagtaaagttctgtctttccagagctgcaagttttaaagtgttacttatacagaccaaccaagaatagtgctgaattaagtggcatttagtatctagaagccattttgatccaagaagctacttaagtgtcaaagtcagcatgcagcacatgtagcttttctgtaaacaagggtgtgatatgaaagctgcttttttaagaagagtaaaagcacattccatatacgtaagtgaattttaaaaataaattgaggcaaacagttaagttttatttttagagcaacaagttaactgtaaatattttaatgttagtttgctcatctatgatctgagatcatgccgaagtgagaaaaatctccccaaaatacaatttaatgcattgggaaaaaaaaactttaacagtaattccagccacaatctttagatcacccttgtaatgtgttacgggtccatttttcctggaatcgtttaatctaaagcagtttcccctgttttggagattttgtagttaattttaattttggctattgtttggaaaagatgagctgtctgtgtagatatgaagtatagttttttccataaaacagatgtttattttgtattaaaaaataccactgtacttgttttacaccatttgtatacatgtggtgatattaatgctaaactgtaaaattcaggaattaaaatgtgaccctgtaattcc

SEQ ID NO: 171350 - DNA, 4310 bp, Homo sapiens
  Payload ID: 13700
  Gene Symbol: PPP4R3B
  Gene Name: protein phosphatase 4, regulatory subunit 3B
  Uniprot ID: Q5MIZ7
  ENST ID: ENST00000616288
  CDS Start-End: 324-2777
agagagtcgggttacaagatggcggatctgtagtagttaccgcggcggcgggagagcaagcgagccctggggggcaaagagacgggagagtgggtgtatgcgcgggtgaagtgagaggtaacggggcctccgggcggagaggcctcagtggctcttgtcaccccttctcgcggctgaacctttggagccatggtgaattcgggcctctccgaagccgccgccgccgccaccgccactactgcctttaccgtctcctaagagtgaggagcgcggacgaggtaagcgaggaggcggcggctagagcggtggagacagcagccaccatgtcggatacgcggcggcgagtgaaggtctataccctgaacgaagaccggcaatgggacgaccgaggcaccgggcacgtctcctccacttacgtggaggagctcaaggggatgtcgctgctggttcgggcagagtccgacggatcactactcttggaatcaaagataaatccaaatactgcatatcagaaacaacaggatacattaattgtttggtcagaagcagagaactatgatttggctctgagttttcaggagaaagctggctgtgatgagatctgggaaaaaatttgtcaggttcaaggtaaagacccatcagtggaagtcacacaggacctcattgatgaatctgaagaagaacgatttgaagaaatgcctgaaactagtcatctgattgacctgcccacatgtgaactcaataaacttgaagagattgctgacttagttacctcagtgctctcctcacctatccgtagggaaaagctggctctcgccttggaaaatgaaggctatattaaaaaactattgcagctgttccaagcttgcgagaacctagaaaacactgaaggcttacaccatttgtatgaaattattagaggaatcttattcctaaataaggcaactctttttgaggtaatgttttctgatgagtgtatcatggatgtcgtgggatgccttgaatatgaccctgctttggctcagccaaaaagacatagagaattcttgaccaaaactgcaaagttcaaggaagttataccaataacagactctgaactaaggcaaaaaatacatcagacttacagggtacagtacattcaggacatcattttgcccacaccatctgtttttgaagagaattttctttctactcttacgtcttttattttcttcaacaaagttgagatagtcagcatgttgcaggaagatgagaagtttttgtctgaagtttttgcacaattaacagatgaggctacagatgatgataaacggcgtgaattggttaattttttcaaggagttttgtgcattttctcagacattacaacctcaaaacagggatgcatttttcaaaacattggcaaaattgggaattcttcctgctcttgaaattgtaatgggcatggatgatttgcaagtcagatcagctgctacagatatattttcttatctagtagaatttagtccatctatggtccgagagtttgtaatgcaagaagctcagcagagtgatgacgatattcttcttattaatgtggtaattgaacaaatgatctgtgatactgatcctgagctaggaggcgctgttcagttaatgggacttcttcgtactctaattgatccagagaacatgctggctacaactaataaaaccgaaaaaagtgaatttctaaattttttctacaaccattgtatgcatgttctcacagcaccacttttgaccaatacttcagaagacaaatgtgaaaaggataatatagttggatcaaacaaaaacaacacaatttgtcccgataattatcaaacagcacagctacttgccttaattttagagttactcacattttgtgtggaacatcacacatatcacataaaaaactatattatgaacaaggacttgctaagaagagtcttggtcttgatgaattcaaagcacacttttctggccttgtgtgcccttcgctttatgaggcggataattggacttaaagatgaattttataatcgttacatcaccaagggaaatctttttgagccagttataaatgcacttctggataatggaactcggtataatctgttgaattcagctgttattgagttgtttgaatttataagagtggaagatatcaagtctcttactgcccatatagttgaaaacttttataaagcacttgaatcgattgaatatgttcagacattcaaaggattgaagactaaatatgagcaagaaaaagacagacaaaatcagaaactgaacagtgtaccatctatattgcgtagtaacagatttcgcagagatgcaaaagccttggaagaggatgaagaaatgtggtttaatgaagatgaagaagaggaaggaaaagcagttgtggcaccagtggaaaaacctaagccagaagatgattttccagataattatgaaaagtttatggagactaaaaaagcaaaagaaagtgaagacaaggaaaaccttcccaaaaggacatctcctggtggcttcaaatttactttctcccactctgccagtgctgctaatggaacaaacagtaaatctgtagtggctcagataccaccagcaacttctaatggatcctcttccaaaaccacaaacttgcctacgtcagtaacagccaccaagggaagtttggttggcttagtggattatccagatgatgaagaggaagatgaagaagaagaatcgtcccccaggaaaagacctcgtcttggctcataaaatatttattaggggaccctcaacatgtggtcttacaatgctgcaactgttcagtgagctgaaaatctgaatcagaaagctttctcaattgaacttataaaatatacaaggagtagcaaaagacagtatatcagctaagagagtttagttctaataaaaatcaggcttcccaggaacttgattgcttgctagtaattaaggggtttgccttttaggctgtcaaaacaaacattagtaaccagaacctgggagacagcttctcagcaaggaaaagtcacaggtttggggacggtttaggggaggggaaaaggttgatataataatgcagggttgctcctcggggtgtcgatctagaaacaattttacagaacttcagttgtaaactcaataacattacttgtataatggtgctggccatgttgttgttttaatcagttgcctctttttaaaagaaatttttatggaaaacacattcaactatcattaaaaaaatgaagttaagctgttgggaccatttctttaagatttaacaaaagttcagccttttaggtagttgaagggaagtacaccccgtattcagcacatgttgagttttctacaccaggaattttcaatatgtatattgatgaaaacaagctcaattcaaactggacagttttaagataatgttaaaatcagcacttttagagacaacgaaggccaagaatcagtacagtagtattccaaaatgattttctctagaaatttgaaagtagatcgaacagaatgttgtcaaccgcctaccagtacaatcttttgtggaagatactttgaaatcactttctactttgttagtaaagttctgtctttccagagctgcaagttttaaagtgttacttatacagaccaaccaagaatagtgctgaattaagtggcatttagtatctagaagccattttgatccaagaagctacttaagtgtcaaagtcagcatgcagcacatgtagcttttctgtaaacaagggtgtgatatgaaagctgcttttttaagaagagtaaaagcacattccatatacgtaagtgaattttaaaaataaattgaggcaaacagttaagttttatttttagagcaacaagttaactgtaaatattttaatgttagtttgctcatctatgatctgagatcatgccgaagtgagaaaaatctccccaaaatacaatttaatgcattgggaaaaaaaaactttaacagtaattccagccacaatctttagatcacccttgtaatgtgttacgggtccatttttcctggaatcgtttaatctaaagcagtttcccctgttttggagattttgtagttaattttaattttggctattgtttggaaaagatgagctgtctgtgtagatatgaagtatagttttttccataaaacagatgtttattttgtattaaaaaataccactgtacttgttttacaccatttgtatacatgtggtgatattaatgctaaactgtaaaattcaggaattaaaatgtgaccctgtaattcca

SEQ ID NO: 171351 - DNA, 3868 bp, Homo sapiens
  Payload ID: 13701
  Gene Symbol: PPP4R4
  Gene Name: protein phosphatase 4, regulatory subunit 4
  Uniprot ID: Q6NUP7
  ENST ID: ENST00000304338
  CDS Start-End: 155-2776
gggccgtgctcttgctcccgccgcctggcagcctcacgctcggctccagcggccaagagccggagaaagtcctgctggtgggcggccgcggggctgagggcgtccggcatcccggggccgctccggcccgggcggcgagagtgcccggcggtccatgcatccgccgccgcccgccgccgcgatggatttcagtcagaacagcctgttcggttacatggaggacctgcaggagctcaccatcatcgagaggccggtccgccggagcctcaagacaccggaagaaatagaaagattgacagtcgatgaagacctcagtgatattgaaagggctgtttatctgctcagtgctggtcaagatgtccaaggaacaagtgtgattgcaaatctcccatttttgatgcgacagaatcccactgagacgcttcggagagtgttgccaaaagtcagagaagccctgcatgttgcaggagtggaaatgcagttaacggctgcgatgtcatttctgaccattctgcaggacgaatcagtgtcaattcatgcatatacccactcattcctccaagtcattctcctgcatctggagcacagggacacaggtgtcagcaatgcatggctggaaactcttctgtctgttatagaagtattgccaaaagaaaccctacggcatgagattttgaatccacttgtttccaaggcacaactttcccaaacagtccagtctcgtttagttagttgtaaaattttaggaaaattgaccaacaaatttgatgcccacaccattaagcgagaaatacttcctctggtaaaatcactctgtcaagatgtagaatatgaagttcgatcttgtatgtgtcggcaattagaaaatatagcccagggcattgggacagaacttacaaaaagtgtggtgctccctgaattaatagaactttctagggatgaaggcagcagtgtacgacttgcagcttttgaaactttggttaatctgcttgatatatttgatacagatgacagaagtcaaactatacttcccttagtgaaatcattttgtgaaaaatctttcaaagcagatgaatcaattcttatttctttatctttccatttaggaaaactatgtcatggactatatggaattttcactccagatcagcacttgagatttttggaattttataagaaactttgtacattgggtttgcaacaagaaaatggacacaatgaaaaccagattccaccccaaatcctagagcaggagaagaaatatatttcagtacggaagaactgtgcttataactttccggccatgattgtttttgttgatcctaaaaacttccacatggaactctattctacattcttctgcctttgccatgaccctgaagtaccagtcagatacactattgctatttgcttttatgaagtatctaagcttctgaattctggagtatatttaatacataaagaactaataacattattacaagatgaatcactggaggtactagatgctcttatagatcatcttccagaaatcttggaacttatgtctactggtggagaaagcagtgttcaagaaaataagttatcttctctgcctgacttgattccagcactcacagctgctgaacagcgagctgcagcctctttaaaatggagaactcatgagaagctacttcagaaatatgcctgcctgccacatgtcatatcaagcgatcagatttattaccgtttcttacaaagaatgttcacaatcatgatgacaaataatgttttacctgtccaaaaggcggcttcacgaactctatgcatttttctgcgttataatcgtaaacaagaacagagacatgaggtcattcaaaaattaattgaacaattgggccaaggaaaaagttactggaatagacttcgatttttggatacctgtgaatttattatagagatattttcaaaatcatttttctgtaaatatttctttctacctgctattgaactgacacatgatccagtagcaaatgtgagaatgaaactttgctacctgttgcccaaagtgaaatctactctgaagattcctgctgataagcatctacttcagcagttagaaatgtgtgtgaggaaactcctgtgtcaagaaaaagataaagatgttctggctattgtaaaaagaactgtattagagttggacagaatggaaatgtctatggatgcttttcagaaaaagttttatgagaaagatttgttggatcaagagaaagaaagagaagaactacttcttttggaaatggaacaattagagaaagaaaagcaacagaatgatggaaggcccatgagtgataaaatgtttgaaaagaaacgtagagacactaagacaccaacgcaaagtctgcccaagaacatccccatttctgttcctggaccctcttctgtcaccccatcgacaagtaaagaaatcaagaaatccaaactgattcgaagccagtcttttaataatcaagcttttcatgcaaaatatggcaacttagagaaatgtgctagtaaaagttctacaacaggatatacaacttctgtctcagggttaggaaagacttctgtgctttcactagctgatgattcattccggactcgtaatgccagtagcgttccatcttccttttctcctaatactcccttaccgagtacttcccgtgggacaggtaactcagttgaccccaagagcagtggaagtaaagatacacaaccacggaaggctaccttaaaatccagaaaatccaatccttaaatcaactgcttgatgaaggaggcaaaacaaaggcagcaggagataatgtgattggtacacaaaagctaaagcagtggctggggctttgtttttaaattttgggtttttttttttgttgttgttaatgagcagaaagagagacataatgacagctgatgttaaacttttcatatttcaaattagattccctaggaggtataatatatatttcttgagtaataatgtggttacggaattccaatgttatagtgaagtgtaatgaaaaacatctctaggaatgtgctttaaccactgctgcaaaagagacaagtctgcatttatttgtgcaggaaaccagccatttaattgttctagagttttagcatttaaaaatcgtatgaaagtctacatcagctgaattgtcctagcttgataagcacttggagggggacttggaaggtgagaaagatactgcattttctcatgagtctccaagcccacttgaaaagtcacactgaaaggatgcaaatagccgtctgcgattttggcggccctccggattgtggtgacaatatgttgtacccggacattcccaaatttaaatttggcagtgaaaattccacaaagatttctggtaactttgagctataaataccttaaaaataatagattgatgattttctttatttcctagagaatttattttataaatactttgtttacattttagattgtacttgtctttatttaaaatgatgaatctagtctgaatcagctgttattccaagctatcatgcttaagctatgtcaacagcatttatttgtactaatgctaatatttccatcaaaatttgcctgtggaatatatacagttcttaattttaaactgtcagttcttgagatataccgtgtgaagctattgtcagcttctctatttcaaaatgcaatcagcatataactatattgatattagaagatatttgttttttaaaatatattgatgtatgataaagatgatctaatttgtgaatgcatatgtatgtgtggttactttttataatgtgaaataatgaataatgaatttactcaaaataaaacataggttaatgagat

SEQ ID NO: 171352 - DNA, 876 bp, Homo sapiens
  Payload ID: 13701
  Gene Symbol: PPP4R4
  Gene Name: protein phosphatase 4, regulatory subunit 4
  Uniprot ID: Q6NUP7
  ENST ID: ENST00000328839
  CDS Start-End: 129-491
ggcagcctcacgctcggctccagcggccaagagccggagaaagtcctgctggtgggcggccgcggggctgagggcgtccggcatcccggggccgctccggcccgggcggcgagagtgcccggcggtccatgcatccgccgccgcccgccgccgcgatggatttcagtcagaacagcctgttcggttacatggaggacctgcaggagctcaccatcatcgagaggccggtccgccggagcctcaagacaccggaagaaatagaaagattgacagtcgatgaagacctcagtgatattgaaagggctgtttatctgctcagtgctggtcaagatgtccaaggaacaagtgtgattgcaaatctcccatttttgatgcgacagaatcccactgagacgcttcggagagtgttgccaaaagtcagagtccatgaggatgcacacttatttatccagagagtatggatctcacatatgtttgtccagagggtgtgactctgtggaggagaacacttactgtggacagtcccagatgttgaagtcagcacaacaagagaaaaacccaaatcctgataagacttgaggatttttcgaaaattaaatgcaaaatagttggggcaaatgttgctgcgggagtcaagactaagtaatacagtaagaagatatgaagttggagagcttctcatgttcttcctttgtataaagtttgcatacgtacaaaacccaggactttaatgactttaagagggggcagaattgcatctcttggaagttaacagactcatgtgaactggaatgtacgttgtggccctcacaattgattttaatatttatttgcaaagtcctttctgtttctaaataaaagctgtgccttctgaaa

SEQ ID NO: 171353 - DNA, 564 bp, Homo sapiens
  Payload ID: 13701
  Gene Symbol: PPP4R4
  Gene Name: protein phosphatase 4, regulatory subunit 4
  ENST ID: ENST00000553661
  CDS Start-End: 394-564
agcgccagcaaacctagtttacggaccggacccctttcccctggccattgcttaattagctgccttagcgcctctcactcccacctgccgcaatatctcaaatctctggtttttttccagccccggagtttatttccttccctcccccactccagatcttgtccttttcatgcctactcggctgcagtcttcatccatctcccttttagcatttcttggggtggaaaatgctggagaaatagccttgaagtattagagataaaaagtacaccggaagaaatagaaagattgacagtcgatgaagacctcagtgatattgaaagggctgtttatctgctcagtgctggtcaagatgtccaaggaacaagtgtgattgcaaatctcccatttttgatgcgacagaatcccactgagacgcttcggagagtgttgccaaaagtcagagaagccctgcatgttgcaggagtggaaatgcagttaacggctgcgatgtcatttctgaccattctgcaggacgaatcagtgtcaattcatgcatatacccactcattcctccaagtcatt

SEQ ID NO: 171354 - DNA, 589 bp, Homo sapiens
  Payload ID: 13701
  Gene Symbol: PPP4R4
  Gene Name: protein phosphatase 4, regulatory subunit 4
  ENST ID: ENST00000556470
  CDS Start-End: 251-589
gaagccacgatgtgattttcaagctgcagtccaggagctagaaggataaaaacagaaaaatacagccccctccccaaactccccaaaccacccaattagagacctccgtgattgatgtcgcctgacaccggaagaaatagaaagattgacagtcgatgaagacctcagtgatattgaaagggctgtttatctgctcagtgctggtcaagatgtccaaggaacaagtgtgattgcaaatctcccatttttgatgcgacagaatcccactgagacgcttcggagagtgttgccaaaagtcagagaagccctgcatgttgcaggagtggaaatgcagttaacggctgcgatgtcatttctgaccattctgcaggacgaatcagtgtcaattcatgcatatacccactcattcctccaagtcattctcctgcatctggagcacagggacacaggtgtcagcaatgcatggctggaaactcttctgtctgttatagaagtattgccaaaagaaaccctacggcatgagattttgaatccacttgtttccaaggcacaactttcccaaacagtccagtctcgtttagttagttgt

SEQ ID NO: 171355 - DNA, 564 bp, Homo sapiens
  Payload ID: 13701
  Gene Symbol: PPP4R4
  Gene Name: protein phosphatase 4, regulatory subunit 4
  ENST ID: ENST00000556884
  CDS Start-End: 377-564
agtgccattctgcaactgctgcagccagctgtctgtctgtaattatgaccttacggaagtccggcccagcagaaggaggacttactgctcattaacatcaagggtggccatcactattaagctccctgggtgccactgcatttatgcccattacctctaataatcaccggaattttgcaaggttcacgttggctatgttggggacaactttagaagaggaaaggcagaagcagaggcacccttgatccagacaccggaagaaatagaaagattgacagtcgatgaagacctcagtgatattgaaagggctgtttatctgctcagtgctggtcaagatgtccaaggaacaagtgtgattgcaaatctcccatttttgatgcgacagaatcccactgagacgcttcggagagtgttgccaaaagtcagatgtcttccaaggtccatgaggatgcacacttatttatccagagagtatggatctcacatatgtttgtccagagggtgtgactctgtggaggagaacacttactggaagccctgcatgttgcaggagtggaaatgcag

SEQ ID NO: 171356 - DNA, 3868 bp, Homo sapiens; identical to SEQ ID NO: 171351
  Payload ID: 13701
  Gene Symbol: PPP4R4
  Gene Name: protein phosphatase 4, regulatory subunit 4
  Uniprot ID: Q6NUP7
  ENST ID: ENST00000619905
  CDS Start-End: 155-2776

SEQ ID NO: 171357 - DNA, 876 bp, Homo sapiens; identical to SEQ ID NO: 171352
  Payload ID: 13701
  Gene Symbol: PPP4R4
  Gene Name: protein phosphatase 4, regulatory subunit 4
  Uniprot ID: Q6NUP7
  ENST ID: ENST00000614957
  CDS Start-End: 129-491

SEQ ID NO: 171358 - DNA, 589 bp, Homo sapiens; identical to SEQ ID NO: 171354
  Payload ID: 13701
  Gene Symbol: PPP4R4
  Gene Name: protein phosphatase 4, regulatory subunit 4
  ENST ID: ENST00000630154
  CDS Start-End: 251-589

SEQ ID NO: 171359 - DNA, 564 bp, Homo sapiens; identical to SEQ ID NO: 171355
  Payload ID: 13701
  Gene Symbol: PPP4R4
  Gene Name: protein phosphatase 4, regulatory subunit 4
  ENST ID: ENST00000630860
  CDS Start-End: 377-564

SEQ ID NO: 171360 - DNA, 564 bp, Homo sapiens; identical to SEQ ID NO: 171353
  Payload ID: 13701
  Gene Symbol: PPP4R4
  Gene Name: protein phosphatase 4, regulatory subunit 4
  ENST ID: ENST00000628432
  CDS Start-End: 394-564

SEQ ID NO: 171361 - DNA, 2109 bp, Homo sapiens
  Payload ID: 13702
  Gene Symbol: PPP5C
  Gene Name: protein phosphatase 5, catalytic subunit
  Uniprot ID: P53041
  ENST ID: ENST00000012443
  CDS Start-End: 104-1603
acgacacttgtgcggcagcggcggcggccacccggcgctccttcgcgacggttcggccgggtgccgctggcggccgttgccagggtaggggtcgctttgcggcatggcgatggcggagggcgagaggactgagtgtgctgagcccccccgggacgaacccccggctgatggagctctgaagcgggcagaggagctcaagactcaggccaatgactacttcaaagccaaggactacgagaacgccatcaagttctacagccaggccatcgagctgaaccccagcaatgccatctactatggcaaccgcagcctggcctacctgcgcactgagtgctatggctacgcgctgggagacgccacgcgggccattgagctggacaagaagtacatcaagggttattaccgccgggctgccagcaacatggcactgggcaagttccgggccgcgctgcgagactacgagacggtggtcaaggtgaagccccatgacaaggatgccaaaatgaaataccaggagtgcaacaagatcgtgaagcagaaggcctttgagcgggccatcgcgggcgacgagcacaagcgctccgtggtggactcgctggacatcgagagcatgaccattgaggatgagtacagcggacccaagcttgaagacggcaaagtgacaatcagtttcatgaaggagctcatgcagtggtacaaggaccagaagaaactgcaccggaaatgtgcctaccagattctggtacaggtcaaagaggtcctctccaagctgagcacgctcgtggaaaccacactcaaagagacagagaagattacagtatgtggggacacccatggccagttctatgacctcctcaacatattcgagctcaacggtttaccctcggagaccaacccctatatatttaatggtgactttgtggaccgaggctccttctctgtagaagtgatcctcacccttttcggcttcaagctcctgtacccagatcactttcacctccttcgaggcaaccacgagacagacaacatgaaccagatctacggtttcgagggtgaggtgaaggccaagtacacagcccagatgtacgagctctttagcgaggtgttcgagtggctcccgttggcccagtgcatcaacggcaaagtgctgatcatgcacggaggcctgttcagtgaagacggtgtcaccctggatgacatccggaaaattgagcggaatcgacaacccccagattcagggcccatgtgtgacctgctctggtcagatccacagccacagaacgggcgctcgatcagcaagcggggcgtgagctgtcagtttgggcctgacgtcaccaaggccttcttggaagagaacaacctggactatatcatccgcagccacgaagtcaaggccgagggctacgaggtggctcacggaggccgctgtgtcaccgtcttctctgcccccaactactgcgaccagatggggaacaaagcctcctacatccacctccagggctctgacctacggcctcagttccaccagttcacagcagtgcctcatcccaacgtcaagcccatggcctatgccaacacgctgctgcagctaggaatgatgtgaggtgacgggcggggcggcctgcatcccagggcccctccaatcccaccggacccaggccctgggctaggggcagagcaggccccgccccagggcaatgttggacccccttttactttgtaaagtttgtatttattcccctttaggtttgcagagggggtaggggcagagtcaggggctggccagagggtctgctccctggacagagaggaaggaggtggagcagctggggctgggggcacagcctgggcattctgtggggaggccgtcctcggggtggggtggggccgagtggctgccctgcccccctcatttgcatggctcctcccccactcaagcaatagggccccgccataggaagacccccagagagagggtcagcaggggggccccgcctgcgcctcccctcctatagccccatggtggggctaggctggggctcacccccctccccagctattttatgtctgtaattaaatatgttaaaataaagtcattatcggaagtca

SEQ ID NO: 171362 - DNA, 1929 bp, Homo sapiens
  Payload ID: 13702
  Gene Symbol: PPP5C
  Gene Name: protein phosphatase 5, catalytic subunit
  ENST ID: ENST00000391919
  CDS Start-End: 308-1423
ggagggcgagaggactgagtgtgctgagcccccccgggacgaacccccggctgatggagctctgaagcgggcagaggagctcaagactcaggccaatgactacttcaaagccaaggactacgagaacgccatcaagttctacagccaggccatcgagctgaaccccagcaatgccatctactatggcaaccgcagcctggcctacctgcgcactgagtgctatggctacgcgctgggagacgccacgcgggccattgagctggacaagaagtacatcaagggttattaccgccgggctgccagcaacatggcactgggcaagttccgggccgcgctgcgagactacgagacggtggtcaaggtgaagccccatgacaaggatgccaaaatgaaataccaggagtgcaacaagatcgtgaagcagaaggcctttgagcgggccatcgcgggcgacgagcacaagcgctccgtggtggactcgctggacatcgagagcatgaccattgaggatgagtacagcggacccaagcttgaagacggcaaagtgacaatcagtttcatgaaggagctcatgcagtggtacaaggaccagaagaaactgcaccggaaatgtgcctaccagacagagaagattacagtatgtggggacacccatggccagttctatgacctcctcaacatattcgagctcaacggtttaccctcggagaccaacccctatatatttaatggtgactttgtggaccgaggctccttctctgtagaagtgatcctcacccttttcggcttcaagctcctgtacccagatcactttcacctccttcgaggcaaccacgagacagacaacatgaaccagatctacggtttcgagggtgaggtgaaggccaagtacacagcccagatgtacgagctctttagcgaggtgttcgagtggctcccgttggcccagtgcatcaacggcaaagtgctgatcatgcacggaggcctgttcagtgaagacggtgtcaccctggatgacatccggaaaattgagcggaatcgacaacccccagattcagggcccatgtgtgacctgctctggtcagatccacagccacagaacgggcgctcgatcagcaagcggggcgtgagctgtcagtttgggcctgacgtcaccaaggccttcttggaagagaacaacctggactatatcatccgcagccacgaagtcaaggccgagggctacgaggtggctcacggaggccgctgtgtcaccgtcttctctgcccccaactactgcgaccagatggggaacaaagcctcctacatccacctccagggctctgacctacggcctcagttccaccagttcacagcagtgcctcatcccaacgtcaagcccatggcctatgccaacacgctgctgcagctaggaatgatgtgaggtgacgggcggggcggcctgcatcccagggcccctccaatcccaccggacccaggccctgggctaggggcagagcaggccccgccccagggcaatgttggacccccttttactttgtaaagtttgtatttattcccctttaggtttgcagagggggtaggggcagagtcaggggctggccagagggtctgctccctggacagagaggaaggaggtggagcagctggggctgggggcacagcctgggcattctgtggggaggccgtcctcggggtggggtggggccgagtggctgccctgcccccctcatttgcatggctcctcccccactcaagcaatagggccccgccataggaagacccccagagagagggtcagcaggggggccccgcctgcgcctcccctcctatagccccatggtggggctaggctggggctcacccccctccccagctattttatgtctgtaattaaatatgttaaaataaagtcattatcggaagtca

SEQ ID NO: 171363 - DNA, 1886 bp, Homo sapiens
  Payload ID: 13702
  Gene Symbol: PPP5C
  Gene Name: protein phosphatase 5, catalytic subunit
  ENST ID: ENST00000478046
  CDS Start-End: 1-1457
cgatggcggagggcgagaggactgagtgtgctgagcccccccgggacgaacccccggctgatggagctctgaagcgggcagaggagctcaagactcaggccaatgactacttcaaagccaaggactacgagaacgccatcaagttctacagccaggccatcgagctgaaccccagcaatgccatctactatggcaaccgcagcctggcctacctgcgcactgagtgctatggctacgcgctgggagacgccacgcgggccattgagctggacaagaagtacatcaagggttattaccgccgggctgccagcaacatggcactgggcaagttccgggccgcgctgcgagactacgagacggtggtcaaggtgaagccccatgacaaggatgccaaaatgaaataccaggagtgcaacaagatcgtgaagcagaaggcctttgagcgggccatcgcgggcgacgagcacaagcgctccgtggtggactcgctggacatcgagagcatgaccattgaggatgagtacagcggacccaagcttgaagacggcaaagtgacaatcagtttcatgaaggagctcatgcagtggtacaaggaccagaagaaactgcaccggaaatgtgcctaccagattctggtacaggtcaaagaggtcctctccaagctgagcacgctcgtggaaaccacactcaaagagacagagaagattacagtatgtggggacacccatggccagttctatgacctcctcaacatattcgagctcaacggtttaccctcggagaccaacccctatatatttaatggtgactttgtggaccgaggctccttctctgtagaagtgatcctcacccttttcggcttcaagctcctgtacccagatcactttcacctccttcgaggcaaccacgagacagacaacatgaaccagatctacggtttcgagggtgaggtgaaggccaagtacacagcccagatgtacgagctctttagcgaggtgttcgagtggctcccgttggcccagtgcatcaacggcaaagtgctgatcatgcacggaggcctgttcagtgaagacggtgtcaccctggatgacatccggaaaattgagcggaatcgacaacccccagattcagggcccatgtgtgacctgctctggtcagatccacagccacagaacgggcgctcgatcagcaagcggggcgtgagctgtcagtttgggcctgacgtcaccaaggccttcttggaagagaacaacctggactatatcatccgcagccacgaagtcaaggccgagggctacgaggtggctcacggaggccgctgtgtcaccgtcttctctgcccccaactactgcgaccagatggggaacaaagcctcctacatccacctccagggctctgacctacggcctcagttccaccagttcacagcagtgggtaggcccagcagtggttcttgacatcacacgatgaggcgcgcatctcccgtcatccagggagaccagaggacccttgtctcactcccagttggctcttagtcacagccccgctttgtctttgacatggacgtttgtgatgatcacgttcctcccgctccccgtgtctgaagagtgctccctgactggctgccgtctcctccctgtcgggtctggctgggttctccagagggagtgctgcggaggggacacagcagaggccccatgctcgtgatgtatgttgcagatcattttcccccattctgtccttttttgttaaattgtggtaaaaagcacataacataaactgtaccaccttaaccatttgaaagtatatatcccagactgtcttttatctttagacttcacttgtggtttgttgccacagtacaagtttatttttatgaagccaaa

SEQ ID NO: 171364 - DNA, 4118 bp, Homo sapiens
  Payload ID: 13703
  Gene Symbol: PPP6C
  Gene Name: protein phosphatase 6, catalytic subunit
  Uniprot ID: O00743
  ENST ID: ENST00000373547
  CDS Start-End: 101-1018
ggacgtgacgcagggaaagttccggcttcggcctccgccgctgccgccgccgctgctacagccgccgccgccgctgttgccgcggcttgttattcttaaaatggcgccgctagacctggacaagtatgtggaaatagcgcggctgtgcaagtacctgccagagaacgacctgaagcggctatgtgactacgtttgtgacctcctcttagaagagtcaaatgttcagccagtatcaacaccagtaacagtgtgtggagatatccatggacagttttatgacctttgtgaactgttcagaactggaggtcaggttcctgacacaaactacatatttatgggtgattttgtagacagaggttactatagtttggagaccttcacttaccttcttgcattaaaggctaaatggcctgatcgtattacacttttgcgaggaaatcatgagagtagacagataacacaggtctatggattttatgatgagtgccaaaccaaatatggaaatgctaatgcctggagatactgtaccaaagtttttgacatgctcacagtagcagctttaatagatgagcagattttgtgtgtccatggtggtttatctcctgatatcaaaacactggatcaaattcgaaccatcgaacggaatcaggaaattcctcataaaggagcattttgtgatctggtttggtcagatcctgaagatgtggatacctgggctatcagtccccgaggagcaggttggctttttggagcaaaggtcacaaatgagtttgttcatatcaacaacttaaaactcatctgcagagcacatcaactagtgcacgaaggctataaatttatgtttgatgagaagctggtgacagtatggtctgctcctaattactgctatcgttgtggaaatattgcttcgatcatggtcttcaaagatgtaaatacaagagaaccaaagttattccgggcagttccagattcagaacgtgttattcctcccagaacgacaacgccatatttcctttgaggccttcgcccatcctgctgacccatttttctgccctcttcttaccccaattttcttgtattaccctctacaatatactttttattgagcactttgctgctgaaatgctgcctcttgcctttttttttttaaattttaaattatctaaatttattgtttgttgtggtgtctatagcaaagtttttctatcaattttcccccatcccatccccaccctggactcatttgagaagacttgagaaatgtcttaatactcacactgctgcatgtagctcttgcttatttactggtctgggaaacaggatgtgtttcctttttttaaaagccaattgacagattacacctaaatactcctccttttgtatcattcagccttttgttttagtttggtaagttttaagaaatttcagcagcaaagttgttattcagtgggcacgatggactccaaatgcctcaagttatgtatacctgtcccagatgtaaacttcattgtcctttgttggatgatattttaaatggatataaaataaattggtctaaagggctgccctccttgttgtgtttttaaattttagttaaaaactgctacagcttatgactttgtactttaagataattgtattgatcttttttcagattccttgtattttttaataaagtaatcttaaataaaactcagataggttaagtgttagaaattttaaacagcttacattgttagcgtaaagttatcttttcttttttcctaatcagagttcttgaccctttggttattgagtttaaaacttcaattgaaattcaatagtatttatttttgaaaaaaatcactaaactgtgcctaaagaacataactgccatattaatgttttggtttatatcctctatagtaatagaaaaacatttaatacttgtaatgctgatgtgttaatttgataccagttgagtagaatgtgatcaatccagtttacaatctatcatgagtattattaactaaaatctatgtgcttttcaataggaatcattcttctcttgctgtaacacttgaccttaacttttagaaagtgttcatttttaaactgcaactggaaaggttgaaaagttaggactcttgtatttgtgaactgtaatctgaagcagattatttaaagtgtagaaaaagaaacaagttcttcttttttgcaaaggtctgtgataccatatttcagctttgtgtaagtaatttgaatatccaaagggttgtgatgatcagttctgaatatgcaactgtccacttaataaggacaagtattccagtatctcttatgactgtagtcataaatgatgttggaatgtacattttgtgaaatagttggtatccctttactatgattaatttttgttattccaggaaatacttgtgaagccagccaattaataaagcactttagcatctgttcaggtagttttgaaaacccacttttccccttcaggataagaacttccaggttacctaaaaatgcaataaaaatctttatagtctaagcttcttggcatataatttttcatcagggttttcttttattaattgagcacaatactgttttgatttaatttttttccctcaaaccacccagctccttacatagtttttaattatatagctatatgaaagaggtggctaagacatttgctgcacacacttgaactaatgttgggtcagtagcttcgtgttactgccctgatcccagtgtaattcaggtggaaaggtatttttatctcacagggatatgtagctatgtattttactaattgtgaaacactggaaattaatgatgcagacaacttggtgtggtctttgaacagctctctgcagtatttttttttttcctgttaccataaattgtatttaagtgcttgctttccacttaagttgtactaatagaaccggtaactcccagccctccctgtttgacactccttagcttagattgatgtagttgtttttgttatccctataatgtgacttttatttttaagtcattgtgtactgcatttgtttgtcactagttgggcacgtgccaataatattctctccattccttatctgccatctctgttttgcctgatttctcttcaactgaataatggctttttgcatggaaaaaatagtttttactattagacgtgtaaagggaagagagagctaatgtattggactttgtgagcctacaaggaatattttggatccctccaataaataagggctatgtactatatgtactatatagagttatcatgtggtggaagatacttgcaagtcatagatttatgggcaggaggatttgttactccctatatctaggctgaatgtaaaatcccttatgttgtatcaatgggggtaaaaactatttttatttgcctatgatatacttggtttctaataaagtgccctaggctctagtgagaactgtctactttgaattgccatttactccctttcctcctttggccgatatgctcttggctagctttttataagttaatgtgtttccccaaaaagtttcactactttatattcatttgagtgtgatcctaaaacacctggatcaacagtacatctcatatgcaatctgcatcagctcctattctgtctggatgtctagaactgttggaagattttgacgtcttaagccctaggttttgctttgggaaataaggtttgaaatattgttcattgcattaagatttgtgtgtgtgtgctttgtaagcccagaaccaggttttggaaaatgcctgtactgtgaaagcaaattaggactctttctgagcctctttcattgtcagaaatagaatcactttccatcagcttccaggaaattgtgtatctggagtcgaagagatttgacatcaagaatccagatttttaaatgtaattgttttttaaatgctaatgtttgtaaagcaccttcagttcttcggatgaaaggtgctatattccctcagtgtaaattaataaaaagattacaggaagtttgtcaaaaaattcaatgcatagtctgtagtatgtcctgacaagaagttagcattttatataagaaattaaaaaatgcttattcctcca

SEQ ID NO: 171365 - DNA, 4349 bp, Homo sapiens
  Payload ID: 13703
  Gene Symbol: PPP6C
  Gene Name: protein phosphatase 6, catalytic subunit
  Uniprot ID: O00743
  ENST ID: ENST00000451402
  CDS Start-End: 222-1250
gaagcgggctctcttggggcctgcagtcggggttcagccagagggggcgccgggcgtaccgacgtagcggggagaaacgggtcgcgctttaacggcgctgcgcaggcgccactcacgggccggacgtgacgcagggaaagttccggcttcggcctccgccgctgccgccgccgctgctacagccgccgccgccgctgttgccgcggcttgttattcttaaaatggcgccgctagacctggacaagtatgtggaaatagcgcggctgtgcaagtacctgccagagaacgacctgaaggtgagccctatttgcgggctcgccccttccggctgtggggcgcccgccggccggcccttcctttctccaggacccccgccggtatttcattttcttcgttttctaaaggagcggctatgtgactacgtttgtgacctcctcttagaagagtcaaatgttcagccagtatcaacaccagtaacagtgtgtggagatatccatggacagttttatgacctttgtgaactgttcagaactggaggtcaggttcctgacacaaactacatatttatgggtgattttgtagacagaggttactatagtttggagaccttcacttaccttcttgcattaaaggctaaatggcctgatcgtattacacttttgcgaggaaatcatgagagtagacagataacacaggtctatggattttatgatgagtgccaaaccaaatatggaaatgctaatgcctggagatactgtaccaaagtttttgacatgctcacagtagcagctttaatagatgagcagattttgtgtgtccatggtggtttatctcctgatatcaaaacactggatcaaattcgaaccatcgaacggaatcaggaaattcctcataaaggagcattttgtgatctggtttggtcagatcctgaagatgtggatacctgggctatcagtccccgaggagcaggttggctttttggagcaaaggtcacaaatgagtttgttcatatcaacaacttaaaactcatctgcagagcacatcaactagtgcacgaaggctataaatttatgtttgatgagaagctggtgacagtatggtctgctcctaattactgctatcgttgtggaaatattgcttcgatcatggtcttcaaagatgtaaatacaagagaaccaaagttattccgggcagttccagattcagaacgtgttattcctcccagaacgacaacgccatatttcctttgaggccttcgcccatcctgctgacccatttttctgccctcttcttaccccaattttcttgtattaccctctacaatatactttttattgagcactttgctgctgaaatgctgcctcttgcctttttttttttaaattttaaattatctaaatttattgtttgttgtggtgtctatagcaaagtttttctatcaattttcccccatcccatccccaccctggactcatttgagaagacttgagaaatgtcttaatactcacactgctgcatgtagctcttgcttatttactggtctgggaaacaggatgtgtttcctttttttaaaagccaattgacagattacacctaaatactcctccttttgtatcattcagccttttgttttagtttggtaagttttaagaaatttcagcagcaaagttgttattcagtgggcacgatggactccaaatgcctcaagttatgtatacctgtcccagatgtaaacttcattgtcctttgttggatgatattttaaatggatataaaataaattggtctaaagggctgccctccttgttgtgtttttaaattttagttaaaaactgctacagcttatgactttgtactttaagataattgtattgatcttttttcagattccttgtattttttaataaagtaatcttaaataaaactcagataggttaagtgttagaaattttaaacagcttacattgttagcgtaaagttatcttttcttttttcctaatcagagttcttgaccctttggttattgagtttaaaacttcaattgaaattcaatagtatttatttttgaaaaaaatcactaaactgtgcctaaagaacataactgccatattaatgttttggtttatatcctctatagtaatagaaaaacatttaatacttgtaatgctgatgtgttaatttgataccagttgagtagaatgtgatcaatccagtttacaatctatcatgagtattattaactaaaatctatgtgcttttcaataggaatcattcttctcttgctgtaacacttgaccttaacttttagaaagtgttcatttttaaactgcaactggaaaggttgaaaagttaggactcttgtatttgtgaactgtaatctgaagcagattatttaaagtgtagaaaaagaaacaagttcttcttttttgcaaaggtctgtgataccatatttcagctttgtgtaagtaatttgaatatccaaagggttgtgatgatcagttctgaatatgcaactgtccacttaataaggacaagtattccagtatctcttatgactgtagtcataaatgatgttggaatgtacattttgtgaaatagttggtatccctttactatgattaatttttgttattccaggaaatacttgtgaagccagccaattaataaagcactttagcatctgttcaggtagttttgaaaacccacttttccccttcaggataagaacttccaggttacctaaaaatgcaataaaaatctttatagtctaagcttcttggcatataatttttcatcagggttttcttttattaattgagcacaatactgttttgatttaatttttttccctcaaaccacccagctccttacatagtttttaattatatagctatatgaaagaggtggctaagacatttgctgcacacacttgaactaatgttgggtcagtagcttcgtgttactgccctgatcccagtgtaattcaggtggaaaggtatttttatctcacagggatatgtagctatgtattttactaattgtgaaacactggaaattaatgatgcagacaacttggtgtggtctttgaacagctctctgcagtatttttttttttcctgttaccataaattgtatttaagtgcttgctttccacttaagttgtactaatagaaccggtaactcccagccctccctgtttgacactccttagcttagattgatgtagttgtttttgttatccctataatgtgacttttatttttaagtcattgtgtactgcatttgtttgtcactagttgggcacgtgccaataatattctctccattccttatctgccatctctgttttgcctgatttctcttcaactgaataatggctttttgcatggaaaaaatagtttttactattagacgtgtaaagggaagagagagctaatgtattggactttgtgagcctacaaggaatattttggatccctccaataaataagggctatgtactatatgtactatatagagttatcatgtggtggaagatacttgcaagtcatagatttatgggcaggaggatttgttactccctatatctaggctgaatgtaaaatcccttatgttgtatcaatgggggtaaaaactatttttatttgcctatgatatacttggtttctaataaagtgccctaggctctagtgagaactgtctactttgaattgccatttactccctttcctcctttggccgatatgctcttggctagctttttataagttaatgtgtttccccaaaaagtttcactactttatattcatttgagtgtgatcctaaaacacctggatcaacagtacatctcatatgcaatctgcatcagctcctattctgtctggatgtctagaactgttggaagattttgacgtcttaagccctaggttttgctttgggaaataaggtttgaaatattgttcattgcattaagatttgtgtgtgtgtgctttgtaagcccagaaccaggttttggaaaatgcctgtactgtgaaagcaaattaggactctttctgagcctctttcattgtcagaaatagaatcactttccatcagcttccaggaaattgtgtatctggagtcgaagagatttgacatcaagaatccagatttttaaatgtaattgttttttaaatgctaatgtttgtaaagcaccttcagttcttcggatgaaaggtgctatattccctcagtgtaaattaataaaaagattacaggaagtttgtcaaaaaattcaatgcatagtctgtagtatgtcctgacaagaagttagcattttatataagaaattaaaaaatgcttattcctcc

SEQ ID NO: 171366 - DNA, 4172 bp, Homo sapiens
  Payload ID: 13703
  Gene Symbol: PPP6C
  Gene Name: protein phosphatase 6, catalytic subunit
  Uniprot ID: O00743
  ENST ID: ENST00000415905
  CDS Start-End: 222-1073
gaagcgggctctcttggggcctgcagtcggggttcagccagagggggcgccgggcgtaccgacgtagcggggagaaacgggtcgcgctttaacggcgctgcgcaggcgccactcacgggccggacgtgacgcagggaaagttccggcttcggcctccgccgctgccgccgccgctgctacagccgccgccgccgctgttgccgcggcttgttattcttaaaatggcgccgctagacctggacaagtatgtggaaatagcgcggctgtgcaagtacctgccagagaacgacctgaagcggctatgtgactacgtttgtgacctcctcttagaagagtcaaatgttcagccagtatcaacaccagtaacagtgtgtggagatatccatggacagggtgattttgtagacagaggttactatagtttggagaccttcacttaccttcttgcattaaaggctaaatggcctgatcgtattacacttttgcgaggaaatcatgagagtagacagataacacaggtctatggattttatgatgagtgccaaaccaaatatggaaatgctaatgcctggagatactgtaccaaagtttttgacatgctcacagtagcagctttaatagatgagcagattttgtgtgtccatggtggtttatctcctgatatcaaaacactggatcaaattcgaaccatcgaacggaatcaggaaattcctcataaaggagcattttgtgatctggtttggtcagatcctgaagatgtggatacctgggctatcagtccccgaggagcaggttggctttttggagcaaaggtcacaaatgagtttgttcatatcaacaacttaaaactcatctgcagagcacatcaactagtgcacgaaggctataaatttatgtttgatgagaagctggtgacagtatggtctgctcctaattactgctatcgttgtggaaatattgcttcgatcatggtcttcaaagatgtaaatacaagagaaccaaagttattccgggcagttccagattcagaacgtgttattcctcccagaacgacaacgccatatttcctttgaggccttcgcccatcctgctgacccatttttctgccctcttcttaccccaattttcttgtattaccctctacaatatactttttattgagcactttgctgctgaaatgctgcctcttgcctttttttttttaaattttaaattatctaaatttattgtttgttgtggtgtctatagcaaagtttttctatcaattttcccccatcccatccccaccctggactcatttgagaagacttgagaaatgtcttaatactcacactgctgcatgtagctcttgcttatttactggtctgggaaacaggatgtgtttcctttttttaaaagccaattgacagattacacctaaatactcctccttttgtatcattcagccttttgttttagtttggtaagttttaagaaatttcagcagcaaagttgttattcagtgggcacgatggactccaaatgcctcaagttatgtatacctgtcccagatgtaaacttcattgtcctttgttggatgatattttaaatggatataaaataaattggtctaaagggctgccctccttgttgtgtttttaaattttagttaaaaactgctacagcttatgactttgtactttaagataattgtattgatcttttttcagattccttgtattttttaataaagtaatcttaaataaaactcagataggttaagtgttagaaattttaaacagcttacattgttagcgtaaagttatcttttcttttttcctaatcagagttcttgaccctttggttattgagtttaaaacttcaattgaaattcaatagtatttatttttgaaaaaaatcactaaactgtgcctaaagaacataactgccatattaatgttttggtttatatcctctatagtaatagaaaaacatttaatacttgtaatgctgatgtgttaatttgataccagttgagtagaatgtgatcaatccagtttacaatctatcatgagtattattaactaaaatctatgtgcttttcaataggaatcattcttctcttgctgtaacacttgaccttaacttttagaaagtgttcatttttaaactgcaactggaaaggttgaaaagttaggactcttgtatttgtgaactgtaatctgaagcagattatttaaagtgtagaaaaagaaacaagttcttcttttttgcaaaggtctgtgataccatatttcagctttgtgtaagtaatttgaatatccaaagggttgtgatgatcagttctgaatatgcaactgtccacttaataaggacaagtattccagtatctcttatgactgtagtcataaatgatgttggaatgtacattttgtgaaatagttggtatccctttactatgattaatttttgttattccaggaaatacttgtgaagccagccaattaataaagcactttagcatctgttcaggtagttttgaaaacccacttttccccttcaggataagaacttccaggttacctaaaaatgcaataaaaatctttatagtctaagcttcttggcatataatttttcatcagggttttcttttattaattgagcacaatactgttttgatttaatttttttccctcaaaccacccagctccttacatagtttttaattatatagctatatgaaagaggtggctaagacatttgctgcacacacttgaactaatgttgggtcagtagcttcgtgttactgccctgatcccagtgtaattcaggtggaaaggtatttttatctcacagggatatgtagctatgtattttactaattgtgaaacactggaaattaatgatgcagacaacttggtgtggtctttgaacagctctctgcagtatttttttttttcctgttaccataaattgtatttaagtgcttgctttccacttaagttgtactaatagaaccggtaactcccagccctccctgtttgacactccttagcttagattgatgtagttgtttttgttatccctataatgtgacttttatttttaagtcattgtgtactgcatttgtttgtcactagttgggcacgtgccaataatattctctccattccttatctgccatctctgttttgcctgatttctcttcaactgaataatggctttttgcatggaaaaaatagtttttactattagacgtgtaaagggaagagagagctaatgtattggactttgtgagcctacaaggaatattttggatccctccaataaataagggctatgtactatatgtactatatagagttatcatgtggtggaagatacttgcaagtcatagatttatgggcaggaggatttgttactccctatatctaggctgaatgtaaaatcccttatgttgtatcaatgggggtaaaaactatttttatttgcctatgatatacttggtttctaataaagtgccctaggctctagtgagaactgtctactttgaattgccatttactccctttcctcctttggccgatatgctcttggctagctttttataagttaatgtgtttccccaaaaagtttcactactttatattcatttgagtgtgatcctaaaacacctggatcaacagtacatctcatatgcaatctgcatcagctcctattctgtctggatgtctagaactgttggaagattttgacgtcttaagccctaggttttgctttgggaaataaggtttgaaatattgttcattgcattaagatttgtgtgtgtgtgctttgtaagcccagaaccaggttttggaaaatgcctgtactgtgaaagcaaattaggactctttctgagcctctttcattgtcagaaatagaatcactttccatcagcttccaggaaattgtgtatctggagtcgaagagatttgacatcaagaatccagatttttaaatgtaattgttttttaaatgctaatgtttgtaaagcaccttcagttcttcggatgaaaggtgctatattccctcagtgtaaattaataaaaagattacaggaagtttgtcaaaaaattcaatgcatagtctgtagtatgtcctgacaagaagttagcattttatataagaaattaaaaaatgcttattcctcc

SEQ ID NO: 171367 - DNA, 569 bp, Homo sapiens
  Payload ID: 13703
  Gene Symbol: PPP6C
  Gene Name: protein phosphatase 6, catalytic subunit
  ENST ID: ENST00000456642
  CDS Start-End: 195-569
cgccgctgccgccgccgctgctacagccgccgccgccgctgttgccgcggcttgttattcttaaaatggcgccgctagacctggacaagtatgtggaaatagcgcggctgtgcaagtacctgccagagaacgacctgaagttttgggctatgatgcattaggcttctgcgagtatttatatacagattttgaacatgtttttattgccaagactacagttgctgggtcaaatgcggctatgtgactacgtttgtgacctcctcttagaagagtcaaatgttcagccagtatcaacaccagtaacagtgtgtggagatatccatggacagttttatgacctttgtgaactgttcagaactggaggtcaggttcctgacacaaactacatatttatgggtgattttgtagacagaggttactatagtttggagaccttcacttaccttcttgcattaaaggctaaatggcctgatcgtattacacttttgcgaggaaatcatgagagtagacagataacacaggtctatggattttatgatgagtgccaaaccaaatatggaaatgctaat

SEQ ID NO: 171368 - DNA, 3961 bp, Homo sapiens
  Payload ID: 13704
  Gene Symbol: PPP6R1
  Gene Name: protein phosphatase 6, regulatory subunit 1
  Uniprot ID: Q9UPN7
  ENST ID: ENST00000412770
  CDS Start-End: 568-3213
gagccgggcgtcggaggccctgaggccggccgcagagcccggagattgagcggctttggggaaggggtggttaaggaagtaggcctcggcttccgtcggtcgctgctcggctctgcggcccgtttggaccgcggaggaggtcgccttcccctcccgtggggcgctcggttggactgtggaaaccggggcaacttcccccgtcttcccggctgaggcgcctgcgtgggcctcgcgacccggctcgccaacccgcctcggcccgcacgcccacctcgcctgcggaccccggaggtgcctacgcggactagtgacgccccccgcccgtcggcaactccacccggcgctgaccccctcaactctgcaggacccggcgcgcgaggaccccacgacccgcgggcgcctgcgcggaccccgcgagccccggcgcctgcgcgagtccccgacgccgcccccgcccccactcaccgggccccgcagcaggggccggagccgccggcggcggggcgggggggggcgccccgatgagccccgagtgcgaggagccgccgccccccctcgcagggcgccatgttttggaagtttgacctgcacacaagctcgcacctggacacgctgctggagcgggaggacctgagcctgcccgagctgctggacgaggaagacgtgctgcaggagtgcaaggtcgtcaaccgcaagctgctggacttcctgctgcagccaccccacctgcaagcaatggtggcctgggtcacccaggagccgccagatagcggtgaggagcggctgcgctacaagtaccccagtgtggcctgcgagattctgacctcagatgtgccccagatcaatgatgccctgggtgctgatgagtcccttctgaaccggctctacggcttcctgcagagcaccggcagcctcaacccactgctggccagcttcttcagcaaggtcatgggcatcctcatcaaccgcaagacagaccagctcgtgtcctttcttcggaagaaggatgacttcgtggacctgctgctgcagcacattggcacctcggccatcatggacctcctgctgcgcctgctcacctgtgtggagcggcctcagctgaggcaggatgttgtcaattggctcaacgaggagaagatcgtccagcggctgattgagcagatccacccgtcgaaggatgagaatcaacattccaacgcatcccagtccctgtgtgacatcatccgcctgagccgggagcagatgatccaagtccaggacagcccagagcctgaccaactgctggccaccctggagaagcaggagacgattgagcagctcttaagcaacatgttcgagggggagcagagccagtctgtcatcgtcagtgggatccaggtgctgctgaccctgctggagcccaggaggccgaggtccgagtccgtgaccgtgaacagcttcttcagcagtgtggatgggcagctggagctcctggcccagggggccctggaaagcactgtgtccagtgtgggcgccttgcacgccctacgcccgcggctcagctgcttccaccagctcctgctggagcctcccaagctggagccgctacagatgacatggggcatgctggctccgcctctgggcaacacgcggctgcacgtggtcaagctcctggccagtgccctgagcgccaatgatgcagccctgacgcacgagctcctggcactggacgtgcccaacaccatgctggacctcttcttccattatgtcttcaacaacttcttgcatgcccaagtagagggatgcgtgagcaccatgctgagcttggggccacctcctgacagcagccctgagacgcccatccaaaaccctgttgtgaaacatctgctgcagcagtgccgcctggtggagcggatcctgacgtcctgggaggagaacgaccgtgtacagtgtgcgggaggccctcggaaaggctacatgggtcacctgacaagagtggccggtgccctggtgcagaacacggagaaggggcccaatgcagagcagctgcggcagctgctgaaggagctgcccagcgagcagcaggagcagtgggaagccttcgtatcggggcccctggcggagaccaacaagaagaacatggtggacctggtgaacacccaccacctacactcctccagtgacgatgaggacgaccggctcaaggagttcaacttccctgaggaggctgtgctgcagcaggccttcatggacttccagatgcagcgcatgacctctgccttcattgaccacttcggcttcaatgatgaggagtttggggagcaggaggagagtgtgaacgcaccttttgacaagacagccaacatcaccttctccctcaatgctgacgatgagaaccccaacgccaacctacttgagatatgctacaaggaccgcatccagcagtttgatgatgatgaggaagaggaggacgaggaagaggcccagggctcaggggagtctgatggagaagatggcgcctggcagggcagccagctggccaggggggcccgtctgggccagccacctggtgtccggagtggaggcagcacagacagtgaggacgaagaagaggaggacgaggaggaggaggaagacgaggagggcattggctgtgcagcccgtggaggggccacccctctgtcctaccccagccctggccctcagcctccaggccccagctggacagccacctttgacccagtgcctacagatgccccgaccagcccccgagtctccggggaggaagagctgcacactgggcctccagccccacaggggcccctcagtgtgccccagggcctccccactcagagcctggccagccctcctgcccgtgacgccctgcagctcaggtctcaggaccccacacccccctcagcacctcaggaagccacagaaggcagcaaagtcacggagccctcagccccttgccaggccttggttagcatcggggaccttcaggccaccttccacgggatccgttctgcccccagctcctcggacagtgcaaccagagacccctctacctctgtcccagcctccggggcccaccagcccccccagaccacagaaggggagaagagcccagagcccttggggcttccccaaagccagagtgcccaggccctcacgcctcctccgatacccaatggctctgccccggaagggcctgcatccccaggctcccaatagctgcctggtgcggcagcggcggccaaatcttccgtcctcccgtggatctcccggggtgggggcagggcgggtcccacgatggcccccattgccctcatcaccctgacacccccacattctctcctctggacccccaggaggctggtgccagggagacaggcccaacccacccccatttgcactgagaagagaagttttggagcgttgcctcctagaataaagatacagagagtcaaatagagagaatggagagagagaaacatatattatatattatatagagagagggaggagagcgagagagagtgaggacaccgaactgggctggcggctccaaagcacagccttccctgttccgtcccagcgggagctggtgttaggggtcccaaggttgccacccacgtgcccagctgtcccacgctgcagcgcagacggccacgcccacacccggccttttagctcaggtccaccatgggggacggcccagcgtgggtgggggtgccagagggtcccgagtgggggccgtgcctttgcccagaccctgcactttcaaccaggccagtccggctctggggagcaggggcctccccggcaacagccccaggggccttgagggtctgaggtcccagccctgttgccaagtgaccttgtccccagctccctcctcccaggctggtgtgagtgtgcgtgcgtttgtgccgagcttctatttcatattgcaaatataaataaaggaaggcagtttacg

SEQ ID NO: 171369 - DNA, 574 bp, Homo sapiens
  Payload ID: 13704
  Gene Symbol: PPP6R1
  Gene Name: protein phosphatase 6, regulatory subunit 1
  ENST ID: ENST00000592242
  CDS Start-End: 102-574
agactcgaagagctccgggaaggaggagggagcagcccagccccggctgagggcagtcaggtgtgacgcccacgcgggaggtagcaagagatgagggcgccatgttttggaagtttgacctgcacacaagctcgcacctggacacgctgctggagcgggaggacctgagcctgcccgagctgctggacgaggaagacgtgctgcaggagtgcaaggtcgtcaaccgcaagctgctggacttcctgctgcagccaccccacctgcaagcaatggtggcctgggtcacccaggagccgccagatagcggtgaggagcggctgcgctacaagtaccccagtgtggcctgcgagattctgacctcagatgtgccccagatcaatgatgccctgggtgctgatgagtcccttctgaaccggctctacggcttcctgcagagcaccggcagcctcaacccactgctggccagcttcttcagcaaggtcatgggcatcctcatcaaccgcaagacagaccagctcgtgtcctttcttcggaagaaggatgacttcgtggacctgctgctgcagcacattgg

SEQ ID NO: 171370 - DNA, 2953 bp, Homo sapiens
  Payload ID: 13704
  Gene Symbol: PPP6R1
  Gene Name: protein phosphatase 6, regulatory subunit 1
  Uniprot ID: Q9UPN7
  ENST ID: ENST00000587283
  CDS Start-End: 270-2915
ggaggctggagatgggggaagaggggcaggctcgagggcaactgcaggagcctggtgctcactgggagccttaagcctgagtgatggaggcagtgagcctgcgggcagtcccggggcggggccgggctcagcatgaggcagagggctgggacttggggagaggctgtgcccaaggtgggcactcagcccctgtggtcagtgcctcgtccagtggggactccctggggcgtctgacgcggcgctggttgtgtctatgcctgcagggcgccatgttttggaagtttgacctgcacacaagctcgcacctggacacgctgctggagcgggaggacctgagcctgcccgagctgctggacgaggaagacgtgctgcaggagtgcaaggtcgtcaaccgcaagctgctggacttcctgctgcagccaccccacctgcaagcaatggtggcctgggtcacccaggagccgccagatagcggtgaggagcggctgcgctacaagtaccccagtgtggcctgcgagattctgacctcagatgtgccccagatcaatgatgccctgggtgctgatgagtcccttctgaaccggctctacggcttcctgcagagcaccggcagcctcaacccactgctggccagcttcttcagcaaggtcatgggcatcctcatcaaccgcaagacagaccagctcgtgtcctttcttcggaagaaggatgacttcgtggacctgctgctgcagcacattggcacctcggccatcatggacctcctgctgcgcctgctcacctgtgtggagcggcctcagctgaggcaggatgttgtcaattggctcaacgaggagaagatcgtccagcggctgattgagcagatccacccgtcgaaggatgagaatcaacattccaacgcatcccagtccctgtgtgacatcatccgcctgagccgggagcagatgatccaagtccaggacagcccagagcctgaccaactgctggccaccctggagaagcaggagacgattgagcagctcttaagcaacatgttcgagggggagcagagccagtctgtcatcgtcagtgggatccaggtgctgctgaccctgctggagcccaggaggccgaggtccgagtccgtgaccgtgaacagcttcttcagcagtgtggatgggcagctggagctcctggcccagggggccctggaaagcactgtgtccagtgtgggcgccttgcacgccctacgcccgcggctcagctgcttccaccagctcctgctggagcctcccaagctggagccgctacagatgacatggggcatgctggctccgcctctgggcaacacgcggctgcacgtggtcaagctcctggccagtgccctgagcgccaatgatgcagccctgacgcacgagctcctggcactggacgtgcccaacaccatgctggacctcttcttccattatgtcttcaacaacttcttgcatgcccaagtagagggatgcgtgagcaccatgctgagcttggggccacctcctgacagcagccctgagacgcccatccaaaaccctgttgtgaaacatctgctgcagcagtgccgcctggtggagcggatcctgacgtcctgggaggagaacgaccgtgtacagtgtgcgggaggccctcggaaaggctacatgggtcacctgacaagagtggccggtgccctggtgcagaacacggagaaggggcccaatgcagagcagctgcggcagctgctgaaggagctgcccagcgagcagcaggagcagtgggaagccttcgtatcggggcccctggcggagaccaacaagaagaacatggtggacctggtgaacacccaccacctacactcctccagtgacgatgaggacgaccggctcaaggagttcaacttccctgaggaggctgtgctgcagcaggccttcatggacttccagatgcagcgcatgacctctgccttcattgaccacttcggcttcaatgatgaggagtttggggagcaggaggagagtgtgaacgcaccttttgacaagacagccaacatcaccttctccctcaatgctgacgatgagaaccccaacgccaacctacttgagatatgctacaaggaccgcatccagcagtttgatgatgatgaggaagaggaggacgaggaagaggcccagggctcaggggagtctgatggagaagatggcgcctggcagggcagccagctggccaggggggcccgtctgggccagccacctggtgtccggagtggaggcagcacagacagtgaggacgaagaagaggaggacgaggaggaggaggaagacgaggagggcattggctgtgcagcccgtggaggggccacccctctgtcctaccccagccctggccctcagcctccaggccccagctggacagccacctttgacccagtgcctacagatgccccgaccagcccccgagtctccggggaggaagagctgcacactgggcctccagccccacaggggcccctcagtgtgccccagggcctccccactcagagcctggccagccctcctgcccgtgacgccctgcagctcaggtctcaggaccccacacccccctcagcacctcaggaagccacagaaggcagcaaagtcacggagccctcagccccttgccaggccttggttagcatcggggaccttcaggccaccttccacgggatccgttctgcccccagctcctcggacagtgcaaccagagacccctctacctctgtcccagcctccggggcccaccagcccccccagaccacagaaggggagaagagcccagagcccttggggcttccccaaagccagagtgcccaggccctcacgcctcctccgatacccaatggctctgccccggaagggcctgcatccccaggctcccaatagctgcctggtgcggcagcggcggccaaatcttccgtcct

SEQ ID NO: 171371 - DNA, 3415 bp, Homo sapiens
  Payload ID: 13705
  Gene Symbol: PPP6R2
  Gene Name: protein phosphatase 6, regulatory subunit 2
  Uniprot ID: O75170
  ENST ID: ENST00000216061
  CDS Start-End: 371-3271
atatactccaagaaaaaaaccacaaatgtttttctgttttgcctgaatacatgatttaaacaagagatttccacagaagggcgctttcatggaactatatgatcatatgggcaacattctgttgcagtctaccttctgtctgacggatatgccatcctgaaaaaggaaagaagctgaacttcaagttcctttcatttagccttgggcttccaccttctctgtggctagaaacaggaccgtccagaagtcacctgtaactgccctatcttgcaagttctgattttggcaaaaaaaaaaaaaaaaagccttgacaaggttggattcacttctttccctggattgtgtgtcatccaactctgcggccgtcacgatgttctggaagtttgacttgaacaccacgtcccatgttgacaagctgctggacaaggagcatgtgacgctgcaggagttaatggatgaagatgacatcttgcaggagtgtaaggctcagaaccagaagctgctggacttcctgtgcaggcagcagtgcatggaggagctggtgagcctcatcacacaggatccgcccctggacatggaggagaaggtccgcttcaaatatccaaacacagcctgtgagcttctgacttgtgatgtgccgcagatcagcgaccgcctcggtggggacgagagcctgctgagcctcctgtacgacttcttggaccatgagccgcctctcaatcctctgctcgccagttttttcagcaagaccattggcaatctcattgcaagaaaaaccgaacaggtgattacgtttttgaagaagaaggacaagttcatcagcctggtgttgaagcacatcggcacctcagcgcttatggacctgctgctgcgcctggtcagctgtgtggagccagccgggctccggcaggacgtcctgcactggctgaatgaagagaaggtcatccagaggcttgtggagttgatccacccgagccaggatgaagataggcagtcaaatgcttctcagactctctgtgacatagttaggctgggcagagaccagggcagtcagctgcaagaggctctggagccagacccgctcctcacagcgctggagtcgcaggactgtgtggagcagcttctgaagaacatgtttgatggagaccggacggagagctgcctcgtcagtgggactcaggtgttactcaccttgctggaaaccaggcgggttgggacagagggcttggtggactccttttctcagggactggaaaggtcatacgctgtcagcagcagcgtactacacggcatcgagcctcggctgaaggacttccaccagctcctgctcaacccgcccaagaagaaagcgatcctgaccaccattggtgtgctggaggagcccctggggaatgcccgtctgcatggcgcccgcctcatggcagcactgctgcacacaaacacacccagcatcaaccaggagctctgccggctcaacacgatggacttactgctggacttgttctttaagtacacctggaataactttttgcacttccaagtggaactatgcatagccgctattctctcccacgctgcccgtgaggagaggacagaagccagcggatccgagagcagggtggagcctccgcatgagaacgggaaccggagcctggagactccccagccggccgccagcctccctgacaacacaatggtgacccacctgttccagaagtgctgcctggtgcagaggatcctggaggcctgggaagccaacgaccacacgcaggcagcgggtggcatgagacgtgggaacatgggccacctcacacggatcgccaacgcggtggtgcagaacctggagcggggccctgtgcagacgcacatcagcgaggtcatccgagggctccctgcggactgccgtggccgctgggagagcttcgtggaggagacgctgacggagacgaaccgcaggaacactgtggacctggtgagcactcaccaccttcactcctcaagtgaggacgaggacattgagggtgctttccctaacgagctgtcccttcagcaggccttctctgactaccagatccagcagatgacagccaacttcgtggatcagtttggcttcaatgatgaggagtttgccgaccaggacgacaacatcaatgccccgtttgacaggatcgcagagatcaacttcaacatcgacgctgacgaggacagtcccagcgcagctctgtttgaggcctgctgcagtgaccgcatccagccctttgatgatgatgaggacgaggacatctgggaggacagtgacactcgctgtgctgcccgggtgatggccagacccaggtttggagccccccatgcttcagagagttgctcaaagaatggcccagagcgtggaggccaggatgggaaggcgagcttggaagcacacagagatgcacctggggcaggtgccccaccggcccccgggaagaaggaagcgccccctgtggagggtgactcagaaggcgccatgtggacggcagtgtttgatgagccagcgaactcaacgcccacagccccaggagtggtgagggacgtgggttccagtgtgtgggcagctggcacctcagctccagaggagaaaggctgggccaagttcactgacttccaacctttctgctgctccgagtcagggcccaggtgcagctctccggtggacacagaatgcagccatgctgagggcagccggagccaaggccctgagaaagcctcacaggcctcctactttgcagtcagcccggcttctccatgtgcctggaacgtgtgtgtcaccaggaaggcccccctgctggcctctgacagtagctcctctgggggctcccacagcgaggatggcgaccagaaggcagcgagtgccatggatgcggtgagcaggggtcccggccgggaggcccccccgctgcccacagtggccaggacagaggaggctgtcggcagggtcgggtgtgctgacagccggctgttaagccctgcctgccccgcgccaaaggaagtgactgctgccccagccgtggctgtgccccccgaggctactgtggccatcaccacagcactgagcaaggctggccccgccatacccaccccagcagtctcttctgcactggccgtggcggtccccctagggcccatcatggcagtcacagcagccccagccatggtggccaccctggggacagtgacaaaggacgggaagacagatgccccgccagaaggagctgccttaaatggcccagtgtgatgctgctgccgcccggccacggcccaccctggtcaggctgcctccttaatcgagaaaactacctggtgatgcaatcttttttttttttaatttaatttaattttaaaataaatgctgcattggtaaagctggcagttgaaacca

SEQ ID NO: 171372 - DNA, 4035 bp, Homo sapiens
  Payload ID: 13705
  Gene Symbol: PPP6R2
  Gene Name: protein phosphatase 6, regulatory subunit 2
  Uniprot ID: O75170
  ENST ID: ENST00000359139
  CDS Start-End: 395-3178
ggagcgcgtgcccgtgcgccgccgccgccattttggagcgatcggagtgccgcccgcggccccgagtcggtctcgagccgccggccggccgtgccggtgtccgtaggcgctgcgccctcggccgggcccatgtgtgtgcggcccgcccgaggccgcccgggctttgcctccaccagcgccctggcctccgctcgggcctccacacgggcctccgaagagctgccgcgacgcccggcccgcagggcaggtaaagagattataaatcttccactgaatgaaaaaaattttcttaaagctgcatatactccaagaaaaaaaccacaaatgtttttctgttttgcctgaatacatgatttaaacaagagatttccacagaagctctgcggccgtcacgatgttctggaagtttgacttgaacaccacgtcccatgttgacaagctgctggacaaggagcatgtgacgctgcaggagttaatggatgaagatgacatcttgcaggagtgtaaggctcagaaccagaagctgctggacttcctgtgcaggcagcagtgcatggaggagctggtgagcctcatcacacaggatccgcccctggacatggaggagaaggtccgcttcaaatatccaaacacagcctgtgagcttctgacttgtgatgtgccgcagatcagcgaccgcctcggtggggacgagagcctgctgagcctcctgtacgacttcttggaccatgagccgcctctcaatcctctgctcgccagttttttcagcaagaccattggcaatctcattgcaagaaaaaccgaacaggtgattacgtttttgaagaagaaggacaagttcatcagcctggtgttgaagcacatcggcacctcagcgcttatggacctgctgctgcgcctggtcagctgtgtggagccagccgggctccggcaggacgtcctgcactggctgaatgaagagaaggtcatccagaggcttgtggagttgatccacccgagccaggatgaagataggcagtcaaatgcttctcagactctctgtgacatagttaggctgggcagagaccagggcagtcagctgcaagaggctctggagccagacccgctcctcacagcgctggagtcgcaggactgtgtggagcagcttctgaagaacatgtttgatggagaccggacggagagctgcctcgtcagtgggactcaggtgttactcaccttgctggaaaccaggcgggttgggacagagggcttggtggactccttttctcagggactggaaaggtcatacgctgtcagcagcagcgtactacacggcatcgagcctcggctgaaggacttccaccagctcctgctcaacccgcccaagaagaaagcgatcctgaccaccattggtgtgctggaggagcccctggggaatgcccgtctgcatggcgcccgcctcatggcagcactgctgcacacaaacacacccagcatcaaccaggagctctgccggctcaacacgatggacttactgctggacttgttctttaagtacacctggaataactttttgcacttccaagtggaactatgcatagccgctattctctcccacgctgcccgtgaggagaggacagaagccagcggatccgagagcagggtggagcctccgcatgagaacgggaaccggagcctggagactccccagccggccgccagcctccctgacaacacaatggtgacccacctgttccagaagtgctgcctggtgcagaggatcctggaggcctgggaagccaacgaccacacgcaggcagcgggtggcatgagacgtgggaacatgggccacctcacacggatcgccaacgcggtggtgcagaacctggagcggggccctgtgcagacgcacatcagcgaggtcatccgagggctccctgcggactgccgtggccgctgggagagcttcgtggaggagacgctgacggagacgaaccgcaggaacactgtggacctggccttctctgactaccagatccagcagatgacagccaacttcgtggatcagtttggcttcaatgatgaggagtttgccgaccaggacgacaacatcaatgccccgtttgacaggatcgcagagatcaacttcaacatcgacgctgacgaggacagtcccagcgcagctctgtttgaggcctgctgcagtgaccgcatccagccctttgatgatgatgaggacgaggacatctgggaggacagtgacactcgctgtgctgcccgggtgatggccagacccaggtttggagccccccatgcttcagagagttgctcaaagaatggcccagagcgtggaggccaggatgggaaggcgagcttggaagcacacagagatgcacctggggcaggtgccccaccggcccccgggaagaaggaagcgccccctgtggagggtgactcagaagcaggcgccatgtggacggcagtgtttgatgagccagcgaactcaacgcccacagccccaggagtggtgagggacgtgggttccagtgtgtgggcagctggcacctcagctccagaggagaaaggctgggccaagttcactgacttccaacctttctgctgctccgagtcagggcccaggtgcagctctccggtggacacagaatgcagccatgctgagggcagccggagccaaggccctgagaaagccttcagcccggcttctccatgtgcctggaacgtgtgtgtcaccaggaaggcccccctgctggcctctgacagtagctcctctgggggctcccacagcgaggatggcgaccagaaggcagcgagtgccatggatgcggtgagcaggggtcccggccgggaggcccccccgctgcccacagtggccaggacagaggaggctgtcggcagggtcgggtgtgctgacagccggctgttaagccctgcctgccccgcgccaaaggaagtgactgctgccccagccgtggctgtgccccccgaggctactgtggccatcaccacagcactgagcaaggctggccccgccatacccaccccagcagtctcttctgcactggccgtggcggtccccctagggcccatcatggcagtcacagcagccccagccatggtggccaccctggggacagtgacaaaggacggacagatgccccgccagaaggagctgccttaaatggcccagtgtgatgctgctgccgcccggccacggcccaccctggtcaggctgcctccttaatcgagaaaactacctggtgatgcaatcttttttttttttaatttaatttaattttaaaataaatgctgcattggtaaagctggcagttgaaaccagttggacggcccagcttgcgtctcttctgcctgagtgggcctctcaggtcactcgtgccctgctggaggacagaggggcacctcagccgcccccaagcccagagcacagcaataaggtcggcctgcaggagccggggtgggggtgggggtggggggggcaggaccctgagatgccaccaggacctgatgggccaggaagggcgtggacatggaggctgtttttacagttttttttttgttgttgttttgtttttaaagaatacagaaggagccaagcttttttgcactttgtatccagctgcaagctcagggcagagtcaagggcctgggttggaaaaacctgactcacaggaatgcataattgacccttgcagctacccaatagcccttggagctggcactgaaccaggctgcaagatttgactgccttaaaaacacaaggccctctaggcctggcagggatgtccctgtgcccagcacagggtgcctggcagggggagaccacaggtatgcaggtggggggacatggtgtggcactaggggctcgaagactggtttctagcactaccggtcacggccatgtcgtcctagaagggtccagaagattattttacgttgagtccatttttaatgttctgatcacctgacagggcaccccaaacccccaactcccaataaaagccgtgacgttcggacaaa

SEQ ID NO: 171373 - DNA, 3304 bp, Homo sapiens
  Payload ID: 13705
  Gene Symbol: PPP6R2
  Gene Name: protein phosphatase 6, regulatory subunit 2
  Uniprot ID: O75170
  ENST ID: ENST00000395741
  CDS Start-End: 376-3177
cgccgccgccattttggagcgatcggagtgccgcccgcggccccgagtcggtctcgagccgccggccggccgtgccggtgtccgtaggcgctgcgccctcggccgggcccatgtgtgtgcggcccgcccgaggccgcccgggctttgcctccaccagcgccctggcctccgctcgggcctccacacgggcctccgaagagctgccgcgacgcccggcccgcagggcaggtaaagagattataaatcttccactgaatgaaaaaaattttcttaaagctgcatatactccaagaaaaaaaccacaaatgtttttctgttttgcctgaatacatgatttaaacaagagatttccacagaagctctgcggccgtcacgatgttctggaagtttgacttgaacaccacgtcccatgttgacaagctgctggacaaggagcatgtgacgctgcaggagttaatggatgaagatgacatcttgcaggagtgtaaggctcagaaccagaagctgctggacttcctgtgcaggcagcagtgcatggaggagctggtgagcctcatcacacaggatccgcccctggacatggaggagaaggtccgcttcaaatatccaaacacagcctgtgagcttctgacttgtgatgtgccgcagatcagcgaccgcctcggtggggacgagagcctgctgagcctcctgtacgacttcttggaccatgagccgcctctcaatcctctgctcgccagttttttcagcaagaccattggcaatctcattgcaagaaaaaccgaacaggtgattacgtttttgaagaagaaggacaagttcatcagcctggtgttgaagcacatcggcacctcagcgcttatggacctgctgctgcgcctggtcagctgtgtggagccagccgggctccggcaggacgtcctgcactggctgaatgaagagaaggtcatccagaggcttgtggagttgatccacccgagccaggatgaagataggcagtcaaatgcttctcagactctctgtgacatagttaggctgggcagagaccagggcagtcagctgcaagaggctctggagccagacccgctcctcacagcgctggagtccaggcaggactgtgtggagcagcttctgaagaacatgtttgatggagaccggacggagagctgcctcgtcagtgggactcaggtgttactcaccttgctggaaaccaggcgggttgggacagagggcttggtggactccttttctcagggactggaaaggtcatacgctgtcagcagcagcgtactacacggcatcgagcctcggctgaaggacttccaccagctcctgctcaacccgcccaagaagaaagcgatcctgaccaccattggtgtgctggaggagcccctggggaatgcccgtctgcatggcgcccgcctcatggcagcactgctgcacacaaacacacccagcatcaaccaggagctctgccggctcaacacgatggacttactgctggacttgttctttaagtacacctggaataactttttgcacttccaagtggaactatgcatagccgctattctctcccacgctgcccgtgaggagaggacagaagccagcggatccgagagcagggtggagcctccgcatgagaacgggaaccggagcctggagactccccagccggccgccagcctccctgacaacacaatggtgacccacctgttccagaagtgctgcctggtgcagaggatcctggaggcctgggaagccaacgaccacacgcaggcagcgggtggcatgagacgtgggaacatgggccacctcacacggatcgccaacgcggtggtgcagaacctggagcggggccctgtgcagacgcacatcagcgaggtcatccgagggctccctgcggactgccgtggccgctgggagagcttcgtggaggagacgctgacggagacgaaccgcaggaacactgtggacctggccttctctgactaccagatccagcagatgacagccaacttcgtggatcagtttggcttcaatgatgaggagtttgccgaccaggacgacaacatcaatgccccgtttgacaggatcgcagagatcaacttcaacatcgacgctgacgaggacagtcccagcgcagctctgtttgaggcctgctgcagtgaccgcatccagccctttgatgatgatgaggacgaggacatctgggaggacagtgacactcgctgtgctgcccgggtgatggccagacccaggtttggagccccccatgcttcagagagttgctcaaagaatggcccagagcgtggaggccaggatgggaaggcgagcttggaagcacacagagatgcacctggggcaggtgccccaccggcccccgggaagaaggaagcgccccctgtggagggtgactcagaaggcgccatgtggacggcagtgtttgatgagccagcgaactcaacgcccacagccccaggagtggtgagggacgtgggttccagtgtgtgggcagctggcacctcagctccagaggagaaaggctgggccaagttcactgacttccaacctttctgctgctccgagtcagggcccaggtgcagctctccggtggacacagaatgcagccatgctgagggcagccggagccaaggccctgagaaagccttcagcccggcttctccatgtgcctggaacgtgtgtgtcaccaggaaggcccccctgctggcctctgacagtagctcctctgggggctcccacagcgaggatggcgaccagaaggcagcgagtgccatggatgcggtgagcaggggtcccggccgggaggcccccccgctgcccacagtggccaggacagaggaggctgtcggcagggtcgggtgtgctgacagccggctgttaagccctgcctgccccgcgccaaaggaagtgactgctgccccagccgtggctgtgccccccgaggctactgtggccatcaccacagcactgagcaaggctggccccgccatacccaccccagcagtctcttctgcactggccgtggcggtccccctagggcccatcatggcagtcacagcagccccagccatggtggccaccctggggacagtgacaaaggacgggaagacagatgccccgccagaaggagctgccttaaatggcccagtgtgatgctgctgccgcccggccacggcccaccctggtcaggctgcctccttaatcgagaaaactacctggtgatgcaatcttttttttttttaatttaatttaattttaaaataaatgctgcattggtaaa

SEQ ID NO: 171374 - DNA, 3293 bp, Homo sapiens
  Payload ID: 13705
  Gene Symbol: PPP6R2
  Gene Name: protein phosphatase 6, regulatory subunit 2
  Uniprot ID: O75170
  ENST ID: ENST00000395744
  CDS Start-End: 368-3166
ccattttggagcgatcggagtgccgcccgcggccccgagtcggtctcgagccgccggccggccgtgccggtgtccgtaggcgctgcgccctcggccgggcccatgtgtgtgcggcccgcccgaggccgcccgggctttgcctccaccagcgccctggcctccgctcgggcctccacacgggcctccgaagagctgccgcgacgcccggcccgcagggcaggtaaagagattataaatcttccactgaatgaaaaaaattttcttaaagctgcatatactccaagaaaaaaaccacaaatgtttttctgttttgcctgaatacatgatttaaacaagagatttccacagaagctctgcggccgtcacgatgttctggaagtttgacttgaacaccacgtcccatgttgacaagctgctggacaaggagcatgtgacgctgcaggagttaatggatgaagatgacatcttgcaggagtgtaaggctcagaaccagaagctgctggacttcctgtgcaggcagcagtgcatggaggagctggtgagcctcatcacacaggatccgcccctggacatggaggagaaggtccgcttcaaatatccaaacacagcctgtgagcttctgacttgtgatgtgccgcagatcagcgaccgcctcggtggggacgagagcctgctgagcctcctgtacgacttcttggaccatgagccgcctctcaatcctctgctcgccagttttttcagcaagaccattggcaatctcattgcaagaaaaaccgaacaggtgattacgtttttgaagaagaaggacaagttcatcagcctggtgttgaagcacatcggcacctcagcgcttatggacctgctgctgcgcctggtcagctgtgtggagccagccgggctccggcaggacgtcctgcactggctgaatgaagagaaggtcatccagaggcttgtggagttgatccacccgagccaggatgaagataggcagtcaaatgcttctcagactctctgtgacatagttaggctgggcagagaccagggcagtcagctgcaagaggctctggagccagacccgctcctcacagcgctggagtcgcaggactgtgtggagcagcttctgaagaacatgtttgatggagaccggacggagagctgcctcgtcagtgggactcaggtgttactcaccttgctggaaaccaggcgggttgggacagagggcttggtggactccttttctcagggactggaaaggtcatacgctgtcagcagcagcgtactacacggcatcgagcctcggctgaaggacttccaccagctcctgctcaacccgcccaagaagaaagcgatcctgaccaccattggtgtgctggaggagcccctggggaatgcccgtctgcatggcgcccgcctcatggcagcactgctgcacacaaacacacccagcatcaaccaggagctctgccggctcaacacgatggacttactgctggacttgttctttaagtacacctggaataactttttgcacttccaagtggaactatgcatagccgctattctctcccacgctgcccgtgaggagaggacagaagccagcggatccgagagcagggtggagcctccgcatgagaacgggaaccggagcctggagactccccagccggccgccagcctccctgacaacacaatggtgacccacctgttccagaagtgctgcctggtgcagaggatcctggaggcctgggaagccaacgaccacacgcaggcagcgggtggcatgagacgtgggaacatgggccacctcacacggatcgccaacgcggtggtgcagaacctggagcggggccctgtgcagacgcacatcagcgaggtcatccgagggctccctgcggactgccgtggccgctgggagagcttcgtggaggagacgctgacggagacgaaccgcaggaacactgtggacctggccttctctgactaccagatccagcagatgacagccaacttcgtggatcagtttggcttcaatgatgaggagtttgccgaccaggacgacaacatcaatgccccgtttgacaggatcgcagagatcaacttcaacatcgacgctgacgaggacagtcccagcgcagctctgtttgaggcctgctgcagtgaccgcatccagccctttgatgatgatgaggacgaggacatctgggaggacagtgacactcgctgtgctgcccgggtgatggccagacccaggtttggagccccccatgcttcagagagttgctcaaagaatggcccagagcgtggaggccaggatgggaaggcgagcttggaagcacacagagatgcacctggggcaggtgccccaccggcccccgggaagaaggaagcgccccctgtggagggtgactcagaaggcgccatgtggacggcagtgtttgatgagccagcgaactcaacgcccacagccccaggagtggtgagggacgtgggttccagtgtgtgggcagctggcacctcagctccagaggagaaaggctgggccaagttcactgacttccaacctttctgctgctccgagtcagggcccaggtgcagctctccggtggacacagaatgcagccatgctgagggcagccggagccaaggccctgagaaagccttcagcccggcttctccatgtgcctggaacgtgtgtgtcaccaggaaggcccccctgctggcctctgacagtagctcctctgggggctcccacagcgaggatggcgaccagaaggcagcgagtgccatggatgcggtgagcaggggtcccggccgggaggcccccccgctgcccacagtggccaggacagaggaggctgtcggcagggtcgggtgtgctgacagccggctgttaagccctgcctgccccgcgccaaaggaagtgactgctgccccagccgtggctgtgccccccgaggctactgtggccatcaccacagcactgagcaaggctggccccgccatacccaccccagcagtctcttctgcactggccgtggcggtccccctagggcccatcatggcagtcacagcagccccagccatggtggccaccctggggacagtgacaaaggacgggaagacagatgccccgccagaaggagctgccttaaatggcccagtgtgatgctgctgccgcccggccacggcccaccctggtcaggctgcctccttaatcgagaaaactacctggtgatgcaatcttttttttttttaatttaatttaattttaaaataaatgctgcattggtaaa

SEQ ID NO: 171375 - DNA, 2199 bp, Homo sapiens
  Payload ID: 13705
  Gene Symbol: PPP6R2
  Gene Name: protein phosphatase 6, regulatory subunit 2
  ENST ID: ENST00000401672
  CDS Start-End: 1-2056
gctggaaaccaggcgggttgggacagagggcttggtggactccttttctcagggactggaaaggtcatacgctgtcagcagcagcgtactacacggcatcgagcctcggctgaaggacttccaccagctcctgctcaacccgcccaagaagaaagcgatcctgaccaccattggtgtgctggaggagcccctggggaatgcccgtctgcatggcgcccgcctcatggcagcactgctgcacacaaacacacccagcatcaaccaggagctctgccggctcaacacgatggacttactgctggacttgttctttaagtacacctggaataactttttgcacttccaagtggaactatgcatagccgctattctctcccacgctgcccgtgaggagaggacagaagccagcggatccgagagcagggtggagcctccgcatgagaacgggaaccggagcctggagactccccagccggccgccagcctccctgacaacacaatggtgacccacctgttccagaagtgctgcctggtgcagaggatcctggaggcctgggaagccaacgaccacacgcaggcagcgggtggcatgagacgtgggaacatgggccacctcacacggatcgccaacgcggtggtgcagaacctggagcggggccctgtgcagacgcacatcagcgaggtcatccgagggctccctgcggactgccgtggccgctgggagagcttcgtggaggagacgctgacggagacgaaccgcaggaacactgtggacctggtgagcactcaccaccttcactcctcaagtgaggacgaggacattgagggtgctttccctaacgagctgtcccttcagcaggccttctctgactaccagatccagcagatgacagccaacttcgtggatcagtttggcttcaatgatgaggagtttgccgaccaggacgacaacatcaatgccccgtttgacaggatcgcagagatcaacttcaacatcgacgctgacgaggacagtcccagcgcagctctgtttgaggcctgctgcagtgaccgcatccagccctttgatgatgatgaggacgaggacatctgggaggacagtgacactcgctgtgctgcccgggtgatggccagacccaggtttggagccccccatgcttcagagagttgctcaaagaatggcccagagcgtggaggccaggatgggaaggcgagcttggaagcacacagagatgcacctggggcaggtgccccaccggcccccgggaagaaggaagcgccccctgtggagggtgactcagaaggcgccatgtggacggcagtgtttgatgagccagcgaactcaacgcccacagccccaggagtggtgagggacgtgggttccagtgtgtgggcagctggcacctcagctccagaggagaaaggctgggccaagttcactgacttccaacctttctgctgctccgagtcagggcccaggtgcagctctccggtggacacagaatgcagccatgctgagggcagccggagccaaggccctgagaaagccttcagcccggcttctccatgtgcctggaacgtgtgtgtcaccaggaaggcccccctgctggcctctgacagtagctcctctgggggctcccacagcgaggatggcgaccagaaggcagcgagtgccatggatgcggtgagcaggggtcccggccgggaggcccccccgctgcccacagtggccaggacagaggaggctgtcggcagggtcgggtgtgctgacagccggctgttaagccctgcctgccccgcgccaaaggaagtgactgctgccccagccgtggctgtgccccccgaggctactgtggccatcaccacagcactgagcaaggctggccccgccatacccaccccagcagtctcttctgcactggccgtggcggtccccctagggcccatcatggcagtcacagcagccccagccatggtggccaccctggggacagtgacaaaggacgggaagacagatgccccgccagaaggagctgccttaaatggcccagtgtgatgctgctgccgcccggccacggcccaccctggtcaggctgcctccttaatcgagaaaactacctggtgatgcaatcttttttttttttaatttaatttaattttaaaataaatgctgcattggtaaagctggcagttgaaacc

SEQ ID NO: 171376 - DNA, 1811 bp, Homo sapiens
  Payload ID: 13705
  Gene Symbol: PPP6R2
  Gene Name: protein phosphatase 6, regulatory subunit 2
  ENST ID: ENST00000427222
  CDS Start-End: 1-1687
cttactgctggacttgttctttaagtacacctggaataactttttgcacttccaagtggaactatgcatagccgctattctctcccacgctgcccgtgaggagaggacagaagccagcggatccgagagcagggtggagcctccgcatgagaacgggaaccggagcctggagactccccagccggccgccagcctccctgacaacacaatggtgacccacctgttccagaagtgctgcctggtgcagaggatcctggaggcctgggaagccaacgaccacacgcaggcagcgggtggcatgagacgtgggaacatgggccacctcacacggatcgccaacgcggtggtgcagaacctggagcggggccctgtgcagacgcacatcagcgaggtcatccgagggctccctgcggactgccgtggccgctgggagagcttcgtggaggagacgctgacggagacgaaccgcaggaacactgtggacctggccttctctgactaccagatccagcagatgacagccaacttcgtggatcagtttggcttcaatgatgaggagtttgccgaccaggacgacaacatcaatgccccgtttgacaggatcgcagagatcaacttcaacatcgacgctgacgaggacagtcccagcgcagctctgtttgaggcctgctgcagtgaccgcatccagccctttgatgatgatgaggacgaggacatctgggaggacagtgacactcgctgtgctgcccgggtgatggccagacccaggtttggagccccccatgcttcagagagttgctcaaagaatggcccagagcgtggaggccaggatgggaaggcgagcttggaagcacacagagatgcacctggggcaggtgccccaccggcccccgggaagaaggaagcgccccctgtggagggtgactcagaagcaggcgccatgtggacggcagtgtttgatgagccagcgaactcaacgcccacagccccaggagtggtgagggacgtgggttccagtgtgtgggcagctggcacctcagctccagaggagaaaggctgggccaagttcactgacttccaacctttctgctgctccgagtcagggcccaggtgcagctctccggtggacacagaatgcagccatgctgagggcagccggagccaaggccctgagaaagccttcagcccggcttctccatgtgcctggaacgtgtgtgtcaccaggaaggcccccctgctggcctctgacagtagctcctctgggggctcccacagcgaggatggcgaccagaaggcagcgagtgccatggatgcggtgagcaggggtcccggccgggaggcccccccgctgcccacagtggccaggacagaggaggctgtcggcagggtcgggtgtgctgacagccggctgttaagccctgcctgccccgcgccaaaggaagtgactgctgccccagccgtggctgtgccccccgaggctactgtggccatcaccacagcactgagcaaggctggccccgccatacccaccccagcagtctcttctgcactggccgtggcggtccccctagggcccatcatggcagtcacagcagccccagccatggtggccaccctggggacagtgacaaaggacgggaagacagatgccccgccagaaggagctgccttaaatggcccagtgtgatgctgctgccgcccggccacggcccaccctggtcaggctgcctccttaatcgagaaaactacctggtgatgcaatcttttttttttttaatttaatttaattttaaaataaatgctgcattggt

SEQ ID NO: 171377 - DNA, 4104 bp, Homo sapiens
  Payload ID: 13705
  Gene Symbol: PPP6R2
  Gene Name: protein phosphatase 6, regulatory subunit 2
  Uniprot ID: O75170
  ENST ID: ENST00000612753
  CDS Start-End: 382-3261
gtgcgccgccgccgccattttggagcgatcggagtgccgcccgcggccccgagtcggtctcgagccgccggccggccgtgccggtgtccgtaggcgctgcgccctcggccgggcccatgtgtgtgcggcccgcccgaggccgcccgggctttgcctccaccagcgccctggcctccgctcgggcctccacacgggcctccgaagagctgccgcgacgcccggcccgcagggcaggtaaagagattataaatcttccactgaatgaaaaaaattttcttaaagctgcatatactccaagaaaaaaaccacaaatgtttttctgttttgcctgaatacatgatttaaacaagagatttccacagaagctctgcggccgtcacgatgttctggaagtttgacttgaacaccacgtcccatgttgacaagctgctggacaaggagcatgtgacgctgcaggagttaatggatgaagatgacatcttgcaggagtgtaaggctcagaaccagaagctgctggacttcctgtgcaggcagcagtgcatggaggagctggtgagcctcatcacacaggatccgcccctggacatggaggagaaggtccgcttcaaatatccaaacacagcctgtgagcttctgacttgtgatgtgccgcagatcagcgaccgcctcggtggggacgagagcctgctgagcctcctgtacgacttcttggaccatgagccgcctctcaatcctctgctcgccagttttttcagcaagaccattggcaatctcattgcaagaaaaaccgaacaggtgattacgtttttgaagaagaaggacaagttcatcagcctggtgttgaagcacatcggcacctcagcgcttatggacctgctgctgcgcctggtcagctgtgtggagccagccgggctccggcaggacgtcctgcactggctgaatgaagagaaggtcatccagaggcttgtggagttgatccacccgagccaggatgaagataggcagtcaaatgcttctcagactctctgtgacatagttaggctgggcagagaccagggcagtcagctgcaagaggctctggagccagacccgctcctcacagcgctggagtcgcaggactgtgtggagcagcttctgaagaacatgtttgatggagaccggacggagagctgcctcgtcagtgggactcaggtgttactcaccttgctggaaaccaggcgggttgggacagagggcttggtggactccttttctcagggactggaaaggtcatacgctgtcagcagcagcgtactacacggcatcgagcctcggctgaaggacttccaccagctcctgctcaacccgcccaagaagaaagcgatcctgaccaccattggtgtgctggaggagcccctggggaatgcccgtctgcatggcgcccgcctcatggcagcactgctgcacacaaacacacccagcatcaaccaggagctctgccggctcaacacgatggacttactgctggacttgttctttaagtacacctggaataactttttgcacttccaagtggaactatgcatagccgctattctctcccacgctgcccgtgaggagaggacagaagccagcggatccgagagcagggtggagcctccgcatgagaacgggaaccggagcctggagactccccagccggccgccagcctccctgacaacacaatggtgacccacctgttccagaagtgctgcctggtgcagaggatcctggaggcctgggaagccaacgaccacacgcaggcagcgggtggcatgagacgtgggaacatgggccacctcacacggatcgccaacgcggtggtgcagaacctggagcggggccctgtgcagacgcacatcagcgaggtcatccgagggctccctgcggactgccgtggccgctgggagagcttcgtggaggagacgctgacggagacgaaccgcaggaacactgtggacctggtgagcactcaccaccttcactcctcaagtgaggacgaggacattgagggtgctttccctaacgagctgtcccttcagcaggccttctctgactaccagatccagcagatgacagccaacttcgtggatcagtttggcttcaatgatgaggagtttgccgaccaggacgacaacatcaatgccccgtttgacaggatcgcagagatcaacttcaacatcgacgctgacgaggacagtcccagcgcagctctgtttgaggcctgctgcagtgaccgcatccagccctttgatgatgatgaggacgaggacatctgggaggacagtgacactcgctgtgctgcccgggtgatggccagacccaggtttggagccccccatgcttcagagagttgctcaaagaatggcccagagcgtggaggccaggatgggaaggcgagcttggaagcacacagagatgcacctggggcaggtgccccaccggcccccgggaagaaggaagcgccccctgtggagggtgactcagaaggcgccatgtggacggcagtgtttgatgagccagcgaactcaacgcccacagccccaggagtggtgagggacgtgggttccagtgtgtgggcagctggcacctcagctccagaggagaaaggctgggccaagttcactgacttccaacctttctgctgctccgagtcagggcccaggtgcagctctccggtggacacagaatgcagccatgctgagggcagccggagccaaggccctgagaaagccttcagcccggcttctccatgtgcctggaacgtgtgtgtcaccaggaaggcccccctgctggcctctgacagtagctcctctgggggctcccacagcgaggatggcgaccagaaggcagcgagtgccatggatgcggtgagcaggggtcccggccgggaggcccccccgctgcccacagtggccaggacagaggaggctgtcggcagggtcgggtgtgctgacagccggctgttaagccctgcctgccccgcgccaaaggaagtgactgctgccccagccgtggctgtgccccccgaggctactgtggccatcaccacagcactgagcaaggctggccccgccatacccaccccagcagtctcttctgcactggccgtggcggtccccctagggcccatcatggcagtcacagcagccccagccatggtggccaccctggggacagtgacaaaggacgggaagacagatgccccgccagaaggagctgccttaaatggcccagtgtgatgctgctgccgcccggccacggcccaccctggtcaggctgcctccttaatcgagaaaactacctggtgatgcaatcttttttttttttaatttaatttaattttaaaataaatgctgcattggtaaagctggcagttgaaaccagttggacggcccagcttgcgtctcttctgcctgagtgggcctctcaggtcactcgtgccctgctggaggacagaggggcacctcagccgcccccaagcccagagcacagcaataaggtcggcctgcaggagccggggtgggggtgggggtggggggggcaggaccctgagatgccaccaggacctgatgggccaggaagggcgtggacatggaggctgtttttacagttttttttttgttgttgttttgtttttaaagaatacagaaggagccaagcttttttgcactttgtatccagctgcaagctcagggcagagtcaagggcctgggttggaaaaacctgactcacaggaatgcataattgacccttgcagctacccaatagcccttggagctggcactgaaccaggctgcaagatttgactgccttaaaaacacaaggccctctaggcctggcagggatgtccctgtgcccagcacagggtgcctggcagggggagaccacaggtatgcaggtggggggacatggtgtggcactaggggctcgaagactggtttctagcactaccggtcacggccatgtcgtcctagaagggtccagaagattattttacgttgagtccatttttaatgttctgatcacctgacagggcaccccaaacccccaactcccaataaaagccgtgacgttcggacaaa

SEQ ID NO: 171378 - DNA, 4794 bp, Homo sapiens
  Payload ID: 13706
  Gene Symbol: PPP6R3
  Gene Name: protein phosphatase 6, regulatory subunit 3
  Uniprot ID: Q5H9R7
  ENST ID: ENST00000265636
  CDS Start-End: 278-2659
cgtgggcacctccagataagaaaacaagctcagagagatgtggtgacttgctcaaatagtgacagaacttcctcggccatatggaggggtcatataatacccttgtgtcttcagtttgaggagagcttgtttcatatccatatcccactgtattcctgctaatctgctaatgcagtaaattggaggaaaactgttaccaggataacctgtaatgggcaaggagccacaaagaagaaaacatttcttttaatttttaaacttggtttgaaagaccagcatgttttggaaatttgatcttcactcatcatcccacatagacacacttctagaaagagaagatgtaacactgaaggagttaatggatgaggaagatgttttacaggaatgtaaagctcagaaccgcaaacttatagagtttctgttaaaagcagaatgtctcgaagatttagtctcattcattatagaagaaccacctcaagacatggatgaaaagatcagatacaagtatccaaatatatcttgtgagttgctcacttctgatgtctcccagatgaatgatagactgggagaagatgaatccttgctaatgaaattatatagcttcctcctaaacgattcccctttgaatccactacttgccagtttcttcagcaaggtgctaagtattcttatcagcagaaaaccagaacagattgtggatttcttaaagaagaagcatgattttgtagaccttattataaagcacataggaacttctgctatcatggatttgttgctcaggctcctgacgtgtatcgaacctccacagcccaggcaagatgtgctgaattggttaaatgaggagaaaattatccagaggcttgtggaaatagttcatccatcgcaagaagaagatcgacattcaaatgcatcacaatcactttgtgaaattgttcgcctgagcagagaccagatgttacaaattcagaacagtacagagcccgaccccctgcttgccactctagaaaagcaagaaattatagagcagcttctatcaaatattttccacaaggagaaaaatgagtcagccatagtcagtgcaatccagatattgctgactttacttgagacacgacgaccaacatttgaaggccatatagagatctgcccaccaggcatgagccattcagcttgttcagtaaacaagagtgttctagaagccatcagaggaagacttggatcttttcatgaactcctgctggagccacccaagaacatgttcttcaagtatacatggaataactttttgcatacacaagtggaaatttgtattgcactgattcttgcaagtccttttgaaaacacagaaaatgccacaattaccgatcaagactccactggtgataatttgttattaaaacatcttttccaaaaatgtcaattaatagaacgaatacttgaagcctgggaaatgaatgagaagaaacaggctgagggaggaagacggcatggttacatgggacacctaacgaggatagctaactgtatcgtgcacagcactgacaagggccccaacagtgcattagtgcagcagcttatcaaagatcttcccgacgaagtcagggaacgatgggagacgttctgcacaagctccttaggagaaactaacaagaggaacacggtagatctagccttttctgattatcagatgcaacaaatgacgtccaattttattgaccagtttggcttcaacgatgagaagtttgcagatcaagatgacattggcaatgtttcttttgatcgagtatcagacatcaactttactctcaatacaaatgaaagtggaaatattgccttgtttgaagcatgttgtaaggaaagaatacaacagtttgatgatggtggctctgatgaggaagatatatgggaggaaaagcacatcgcattcacaccagaatcccaaagacgatccagctcggggagtacagacagtgaggaaagtacagactctgaagaagaagatggagcaaagcaagacttgtttgaacccagcagtgccaacacggaggataaaatggaggtggacctgagtgaaccacccaactggtcagctaactttgatgtcccaatggaaacaacccacggtgctccattggattctgtgggatctgatgtctggagcacagaggagccgatgccaactaaagagacgggctgggcttctttttcagagttcacgtcttccctgagcacaaaagattctttaaggagtaattctccagtggaaatggaaaccagcactgaacccatggaccctctgactcccagtgcggctgccctggcagtgcagccagaagcggcaggcagtgtggccatggaagccagctctgacggagaggaggatgcagaaagtacagacaaggtaactgagacagtgatgaatggcggcatgaaggaaacgctcagcctcactgtagatgccaagacagagactgcggtcttcaaaagtgaggaagggaaactgtctacctctcaagatgctgcttgtaaagacgcagaggagtgtcccgagactgcagaggcgaagtgcgcggcgcccaggcctcccagcagcagtcccgagcagaggactggccaaccaagcgcaccaggtgacacttcagtgaatggccctgtatgacgggtgacgtctgctgctgctgactgaggactgcagaccgccaccactcaggggctctggaggggtcagctggagcccaccaagctgtcactgctgcactcactctgcaagggatcaggaccagcaacctttatattctagattctaagacattgtacagagaaattcagaagtgtaaaaatattgcacattgacaaataccaagaatttttgcgtatgtttatattgtattgttctaaataatgggtagcctgtgaaataagatcttgccacccatgtaataatagtagtaatactatagttaaaatggctgtaagaatagttttataaaagtgaatacacagatctattgtatttgaaacataactttgacaattattagtgtgaccaaagtattaggcggttttcatacatttttcaccttgtacaaaattatgaattcatttttcctccaggccgacaaggagttgtagaatgaaaatgccctctaagtgttattttggttgttctaacttacaaaagtgattttgaataagaaatatttggtgttctttttataaccagtttttgattggtaattgttttctgtattgtttaaaacggatcaaaaatgtaagtctattggtagagattaagtaaagtatttattgctacatcatagttgataaattgatgttatcgtaaagccatatgttctgttcaagtcttgtttgcttgaaatgattattcctacaagtgaaacactagactatttggagtgtatatggcttgtgttttgggattttttttttttttttttggcttttgtttttgtttgtttttttgtttcatttggtagttcatctgccttttaacccattcaccaaaatttaccttgttaacaagcatcaccaatgaacatttcagagcaatctgcatatttaacagacctaaaataaatcctattaggcaagtcagttgaaaatgctcgtgctgctaatggaattagagtgcgttcattttacaggctagtattttaaaagtagaaatcaaaatctggcaccgaagcatgctaattgtttactgtaccttgtgaggttttcactcataaatttaaaccagtgtatttttttagaactggtttgtgtatatatatagtgattatggatactaattcaatgtaatttataattttctatgtcaatacaaaaatacatcacagccttctcaaacagctcaagcaatatattgtatattgccatatcgtctggtgaaagggttaaattacttcacctcttgcacttttagatgcaaatcagtttttcatttctgtaatagaaaattattcacgtatttttacatcatttgtttttcctgaccagtatttaaaaccaaaaggatattctgaaaaatggccaacaatttttttagaagtagcatcccaagcagcgtgcctaaacattacattgcatatggaaataaaagaatcaaacgtctaatgccttattatttctgatttcctttttcattttaagtggtgtggagattccagcactcccaggacagtggagtcagcagtaagccctgggacaggtggcaagggtgggtcccttgacctttgcacgcctcctcaggaaccccctttcccgggtgagcccctctctgaagagactgtccttgggcctcctctggaagcagcacccccagaggacagggctcctcctgcttgcctcagggctgcctgacttgaatggcgttggacctcggggattactggtagataatatgctctggtctcgcctggtggtgagttttgccagccatggccagggtttggctccactggtggcacacgtggcctccgtggtatggacctggtggcttctccatcccactgtggcctctgtggtatggacctggtggcttctccatcctacccaaggtaacagtgtcttgcttcatcccactgactgctgggagagagcctctgggacttttctttggggcatcattttgttttgtctttcgtagcagggaaaggatatgacaatggggaggacagttcttttggaggttggaggggccaagccaaggacaggagcaagtgtgccctcattttgtttctacttttaatttctgtgtgttggccatactga

SEQ ID NO: 171379 - DNA, 4783 bp, Homo sapiens
  Payload ID: 13706
  Gene Symbol: PPP6R3
  Gene Name: protein phosphatase 6, regulatory subunit 3
  ENST ID: ENST00000265637
  CDS Start-End: 83-2566
gggcgcttcgctgatggtgtcggtgagcgcgtttcccgcctgagcgcaactagcggcgggtcgtgggcacctccagaccagcatgttttggaaatttgatcttcactcatcatcccacatagacacacttctagaaagagaagatgtaacactgaaggagttaatggatgaggaagatgttttacaggaatgtaaagctcagaaccgcaaacttatagagtttctgttaaaagcagaatgtctcgaagatttagtctcattcattatagaagaaccacctcaagacatggatgaaaagatcagatacaagtatccaaatatatcttgtgagttgctcacttctgatgtctcccagatgaatgatagactgggagaagatgaatccttgctaatgaaattatatagcttcctcctaaacgattcccctttgaatccactacttgccagtttcttcagcaaggtgctaagtattcttatcagcagaaaaccagaacagattgtggatttcttaaagaagaagcatgattttgtagaccttattataaagcacataggaacttctgctatcatggatttgttgctcaggctcctgacgtgtatcgaacctccacagcccaggcaagatgtgctgaattggttaaatgaggagaaaattatccagaggcttgtggaaatagttcatccatcgcaagaagaagatcgacattcaaatgcatcacaatcactttgtgaaattgttcgcctgagcagagaccagatgttacaaattcagaacagtacagagcccgaccccctgcttgccactctagaaaagcaagaaattatagagcagcttctatcaaatattttccacaaggagaaaaatgagtcagccatagtcagtgcaatccagatattgctgactttacttgagacacgacgaccaacatttgaaggccatatagagatctgcccaccaggcatgagccattcagcttgttcagtaaacaagagtgttctagaagccatcagaggaagacttggatcttttcatgaactcctgctggagccacccaagaaaagtgtgatgaagaccacatggggtgtgctggatcctcctgtggggaatacccggttgaatgtcattaggttgatatccagcctgcttcaaaccaataccagcagtataaatggggaccttatggagctgaatagcattggagtcatattgaacatgttcttcaagtatacatggaataactttttgcatacacaagtggaaatttgtattgcactgattcttgcaagtccttttgaaaacacagaaaatgccacaattaccgatcaagactccactggtgataatttgttattaaaacatcttttccaaaaatgtcaattaatagaacgaatacttgaagcctgggaaatgaatgagaagaaacaggctgagggaggaagacggcatggttacatgggacacctaacgaggatagctaactgtatcgtgcacagcactgacaagggccccaacagtgcattagtgcagcagcttatcaaagatcttcccgacgaagtcagggaacgatgggagacgttctgcacaagctccttaggagaaactaacaagaggaacacggtagatctatttggcttcaacgatgagaagtttgcagatcaagatgacattggcaatgtttcttttgatcgagtatcagacatcaactttactctcaatacaaatgaaagtggaaatattgccttgtttgaagcatgttgtaaggaaagaatacaacagtttgatgatggtggctctgatgaggaagatatatgggaggaaaagcacatcgcattcacaccagaatcccaaagacgatccagctcggggagtacagacagtgaggaaagtacagactctgaagaagaagatggagcaaagcaagacttgtttgaacccagcagtgccaacacggaggataaaatggaggtggacctgagtgaaccacccaactggtcagctaactttgatgtcccaatggaaacaacccacggtgctccattggattctgtgggatctgatgtctggagcacagaggagccgatgccaactaaagagacgggctgggcttctttttcagagttcacgtcttccctgagcacaaaagattctttaaggagtaattctccagtggaaatggaaaccagcactgaacccatggaccctctgactcccagtgcggctgccctggcagtgcagccagaagcggcaggcagtgtggccatggaagccagctctgacggagaggaggatgcagaaagtacagacaaggtaactgagacagtgatgaatggcggcatgaaggaaacgctcagcctcactgtagatgccaagacagagactgcggtcttcaaaagtgaggaagggaaactgtctacctctcaagatgctgcttgtaaagacgcagaggagtgtcccgagactgcagaggcgaagtgcgcggcgcccaggcctcccagcagcagtcccgagcagaggactggccaaccaagcgcaccaggtgacacttcagtgaatggccctgtatgacgggtgacgtctgctgctgctgactgaggactgcagaccgccaccactcaggggctctggaggggtcagctggagcccaccaagctgtcactgctgcactcactctgcaagggatcaggaccagcaacctttatattctagattctaagacattgtacagagaaattcagaagtgtaaaaatattgcacattgacaaataccaagaatttttgcgtatgtttatattgtattgttctaaataatgggtagcctgtgaaataagatcttgccacccatgtaataatagtagtaatactatagttaaaatggctgtaagaatagttttataaaagtgaatacacagatctattgtatttgaaacataactttgacaattattagtgtgaccaaagtattaggcggttttcatacatttttcaccttgtacaaaattatgaattcatttttcctccaggccgacaaggagttgtagaatgaaaatgccctctaagtgttattttggttgttctaacttacaaaagtgattttgaataagaaatatttggtgttctttttataaccagtttttgattggtaattgttttctgtattgtttaaaacggatcaaaaatgtaagtctattggtagagattaagtaaagtatttattgctacatcatagttgataaattgatgttatcgtaaagccatatgttctgttcaagtcttgtttgcttgaaatgattattcctacaagtgaaacactagactatttggagtgtatatggcttgtgttttgggattttttttttttttttttggcttttgtttttgtttgtttttttgtttcatttggtagttcatctgccttttaacccattcaccaaaatttaccttgttaacaagcatcaccaatgaacatttcagagcaatctgcatatttaacagacctaaaataaatcctattaggcaagtcagttgaaaatgctcgtgctgctaatggaattagagtgcgttcattttacaggctagtattttaaaagtagaaatcaaaatctggcaccgaagcatgctaattgtttactgtaccttgtgaggttttcactcataaatttaaaccagtgtatttttttagaactggtttgtgtatatatatagtgattatggatactaattcaatgtaatttataattttctatgtcaatacaaaaatacatcacagccttctcaaacagctcaagcaatatattgtatattgccatatcgtctggtgaaagggttaaattacttcacctcttgcacttttagatgcaaatcagtttttcatttctgtaatagaaaattattcacgtatttttacatcatttgtttttcctgaccagtatttaaaaccaaaaggatattctgaaaaatggccaacaatttttttagaagtagcatcccaagcagcgtgcctaaacattacattgcatatggaaataaaagaatcaaacgtctaatgccttattatttctgatttcctttttcattttaagtggtgtggagattccagcactcccaggacagtggagtcagcagtaagccctgggacaggtggcaagggtgggtcccttgacctttgcacgcctcctcaggaaccccctttcccgggtgagcccctctctgaagagactgtccttgggcctcctctggaagcagcacccccagaggacagggctcctcctgcttgcctcagggctgcctgacttgaatggcgttggacctcggggattactggtagataatatgctctggtctcgcctggtggtgagttttgccagccatggccagggtttggctccactggtggcacacgtggcctccgtggtatggacctggtggcttctccatcccactgtggcctctgtggtatggacctggtggcttctccatcctacccaaggtaacagtgtcttgcttcatcccactgactgctgggagagagcctctgggacttttctttggggcatcattttgttttgtctttcgtagcagggaaaggatatgacaatggggaggacagttcttttggaggttggaggggccaagccaaggacaggagcaagtgtgccctcattttgtttctacttttaatttctgtgtgttggccatactgaattatgagactaacagatgtctacaatacaatacctgtattcaaaataacaaaaataaagcctgattctttgtttctagaaa

SEQ ID NO: 171380 - DNA, 5093 bp, Homo sapiens
  Payload ID: 13706
  Gene Symbol: PPP6R3
  Gene Name: protein phosphatase 6, regulatory subunit 3
  Uniprot ID: Q5H9R7
  ENST ID: ENST00000393800
  CDS Start-End: 255-2876
gcttgatacgtccgccattttgggcgcttcgctgatggtgtcggtgagcgcgtttcccgcctgagcgcaactagcggcgggtcgtgggcacctccaggagagcttgtttcatatccatatcccactgtattcctgctaatctgctaatgcagtaaattggaggaaaactgttaccaggataacctgtaatgggcaaggagccacaaagaagaaaacatttcttttaatttttaaacttggtttgaaagaccagcatgttttggaaatttgatcttcactcatcatcccacatagacacacttctagaaagagaagatgtaacactgaaggagttaatggatgaggaagatgttttacaggaatgtaaagctcagaaccgcaaacttatagagtttctgttaaaagcagaatgtctcgaagatttagtctcattcattatagaagaaccacctcaagacatggatgaaaagatcagatacaagtatccaaatatatcttgtgagttgctcacttctgatgtctcccagatgaatgatagactgggagaagatgaatccttgctaatgaaattatatagcttcctcctaaacgattcccctttgaatccactacttgccagtttcttcagcaaggtgctaagtattcttatcagcagaaaaccagaacagattgtggatttcttaaagaagaagcatgattttgtagaccttattataaagcacataggaacttctgctatcatggatttgttgctcaggctcctgacgtgtatcgaacctccacagcccaggcaagatgtgctgaattggttaaatgaggagaaaattatccagaggcttgtggaaatagttcatccatcgcaagaagaagatcgacattcaaatgcatcacaatcactttgtgaaattgttcgcctgagcagagaccagatgttacaaattcagaacagtacagagcccgaccccctgcttgccactctagaaaagcaagaaattatagagcagcttctatcaaatattttccacaaggagaaaaatgagtcagccatagtcagtgcaatccagatattgctgactttacttgagacacgacgaccaacatttgaaggccatatagagatctgcccaccaggcatgagccattcagcttgttcagtaaacaagagtgttctagaagccatcagaggaagacttggatcttttcatgaactcctgctggagccacccaagaaaagtgtgatgaagaccacatggggtgtgctggatcctcctgtggggaatacccggttgaatgtcattaggttgatatccagcctgcttcaaaccaataccagcagtataaatggggaccttatggagctgaatagcattggagtcatattgaacatgttcttcaagtatacatggaataactttttgcatacacaagtggaaatttgtattgcactgattcttgcaagtccttttgaaaacacagaaaatgccacaattaccgatcaagactccactggtgataatttgttattaaaacatcttttccaaaaatgtcaattaatagaacgaatacttgaagcctgggaaatgaatgagaagaaacaggctgagggaggaagacggcatggttacatgggacacctaacgaggatagctaactgtatcgtgcacagcactgacaagggccccaacagtgcattagtgcagcagcttatcaaagatcttcccgacgaagtcagggaacgatgggagacgttctgcacaagctccttaggagaaactaacaagaggaacacggtagatctagttacaacctgccatattcattcatccagtgatgatgaaattgactttaaagaaacgggtttctcacaggattcttctttgcagcaagccttttctgattatcagatgcaacaaatgacgtccaattttattgaccagtttggcttcaacgatgagaagtttgcagatcaagatgacattggcaatgtttcttttgatcgagtatcagacatcaactttactctcaatacaaatgaaagtggaaatattgccttgtttgaagcatgttgtaaggaaagaatacaacagtttgatgatggtggctctgatgaggaagatatatgggaggaaaagcacatcgcattcacaccagaatcccaaagacgatccagctcggggagtacagacagtgaggaaagtacagactctgaagaagaagatggagcaaagcaagacttgtttgaacccagcagtgccaacacggaggataaaatggaggtggacctgagtgaaccacccaactggtcagctaactttgatgtcccaatggaaacaacccacggtgctccattggattctgtgggatctgatgtctggagcacagaggagccgatgccaactaaagagacgggctgggcttctttttcagagttcacgtcttccctgagcacaaaagattctttaaggagtaattctccagtggaaatggaaaccagcactgaacccatggaccctctgactcccagtgcggctgccctggcagtgcagccagaagcggcaggcagtgtggccatggaagccagctctgacggagaggaggatgcagaaagtacagacaaggtaactgagacagtgatgaatggcggcatgaaggaaacgctcagcctcactgtagatgccaagacagagactgcggtcttcaaaagtgaggaagggaaactgtctacctctcaagatgctgcttgtaaagacgcagaggagtgtcccgagactgcagaggcgaagtgcgcggcgcccaggcctcccagcagcagtcccgagcagaggactggccaaccaagcgcaccaggtgacacttcagtgaatggccctgtatgacgggtgacgtctgctgctgctgactgaggactgcagaccgccaccactcaggggctctggaggggtcagctggagcccaccaagctgtcactgctgcactcactctgcaagggatcaggaccagcaacctttatattctagattctaagacattgtacagagaaattcagaagtgtaaaaatattgcacattgacaaataccaagaatttttgcgtatgtttatattgtattgttctaaataatgggtagcctgtgaaataagatcttgccacccatgtaataatagtagtaatactatagttaaaatggctgtaagaatagttttataaaagtgaatacacagatctattgtatttgaaacataactttgacaattattagtgtgaccaaagtattaggcggttttcatacatttttcaccttgtacaaaattatgaattcatttttcctccaggccgacaaggagttgtagaatgaaaatgccctctaagtgttattttggttgttctaacttacaaaagtgattttgaataagaaatatttggtgttctttttataaccagtttttgattggtaattgttttctgtattgtttaaaacggatcaaaaatgtaagtctattggtagagattaagtaaagtatttattgctacatcatagttgataaattgatgttatcgtaaagccatatgttctgttcaagtcttgtttgcttgaaatgattattcctacaagtgaaacactagactatttggagtgtatatggcttgtgttttgggattttttttttttttttttggcttttgtttttgtttgtttttttgtttcatttggtagttcatctgccttttaacccattcaccaaaatttaccttgttaacaagcatcaccaatgaacatttcagagcaatctgcatatttaacagacctaaaataaatcctattaggcaagtcagttgaaaatgctcgtgctgctaatggaattagagtgcgttcattttacaggctagtattttaaaagtagaaatcaaaatctggcaccgaagcatgctaattgtttactgtaccttgtgaggttttcactcataaatttaaaccagtgtatttttttagaactggtttgtgtatatatatagtgattatggatactaattcaatgtaatttataattttctatgtcaatacaaaaatacatcacagccttctcaaacagctcaagcaatatattgtatattgccatatcgtctggtgaaagggttaaattacttcacctcttgcacttttagatgcaaatcagtttttcatttctgtaatagaaaattattcacgtatttttacatcatttgtttttcctgaccagtatttaaaaccaaaaggatattctgaaaaatggccaacaatttttttagaagtagcatcccaagcagcgtgcctaaacattacattgcatatggaaataaaagaatcaaacgtctaatgccttattatttctgatttcctttttcattttaagtggtgtggagattccagcactcccaggacagtggagtcagcagtaagccctgggacaggtggcaagggtgggtcccttgacctttgcacgcctcctcaggaaccccctttcccgggtgagcccctctctgaagagactgtccttgggcctcctctggaagcagcacccccagaggacagggctcctcctgcttgcctcagggctgcctgacttgaatggcgttggacctcggggattactggtagataatatgctctggtctcgcctggtggtgagttttgccagccatggccagggtttggctccactggtggcacacgtggcctccgtggtatggacctggtggcttctccatcccactgtggcctctgtggtatggacctggtggcttctccatcctacccaaggtaacagtgtcttgcttcatcccactgactgctgggagagagcctctgggacttttctttggggcatcattttgttttgtctttcgtagcagggaaaggatatgacaatggggaggacagttcttttggaggttggaggggccaagccaaggacaggagcaagtgtgccctcattttgtttctacttttaatttctgtgtgttggccatactgaattatgagactaacagatgtctacaatacaatacctgtattcaaaataacaaaaataaagcctgattctttgtttctagaaa

SEQ ID NO: 171381 - DNA, 5069 bp, Homo sapiens
  Payload ID: 13706
  Gene Symbol: PPP6R3
  Gene Name: protein phosphatase 6, regulatory subunit 3
  Uniprot ID: Q5H9R7
  ENST ID: ENST00000393801
  CDS Start-End: 216-2855
gtcggtgagcgcgtttcccgcctgagcgcaactagcggcgggtcgtgggcacctccaggagagcttgtttcatatccatatcccactgtattcctgctaatctgctaatgcagtaaattggaggaaaactgttaccaggataacctgtaatgggcaaggagccacaaagaagaaaacatttcttttaatttttaaacttggtttgaaagaccagcatgttttggaaatttgatcttcactcatcatcccacatagacacacttctagaaagagaagatgtaacactgaaggagttaatggatgaggaagatgttttacaggaatgtaaagctcagaaccgcaaacttatagagtttctgttaaaagcagaatgtctcgaagatttagtctcattcattatagaagaaccacctcaagacatggatgaaaagatcagatacaagtatccaaatatatcttgtgagttgctcacttctgatgtctcccagatgaatgatagactgggagaagatgaatccttgctaatgaaattatatagcttcctcctaaacgattcccctttgaatccactacttgccagtttcttcagcaaggtgctaagtattcttatcagcagaaaaccagaacagattgtggatttcttaaagaagaagcatgattttgtagaccttattataaagcacataggaacttctgctatcatggatttgttgctcaggctcctgacgtgtatcgaacctccacagcccaggcaagatgtgctgaattggttaaatgaggagaaaattatccagaggcttgtggaaatagttcatccatcgcaagaagaagatcgacattcaaatgcatcacaatcactttgtgaaattgttcgcctgagcagagaccagatgttacaaattcagaacagtacagagcccgaccccctgcttgccactctagaaaagcaagaaattatagagcagcttctatcaaatattttccacaaggagaaaaatgagtcagccatagtcagtgcaatccagatattgctgactttacttgagacacgacgaccaacatttgaaggccatatagagatctgcccaccaggcatgagccattcagcttgttcagtaaacaagagtgttctagaagccatcagaggaagacttggatcttttcatgaactcctgctggagccacccaagaaaagtgtgatgaagaccacatggggtgtgctggatcctcctgtggggaatacccggttgaatgtcattaggttgatatccagcctgcttcaaaccaataccagcagtataaatggggaccttatggagctgaatagcattggagtcatattgaacatgttcttcaagtatacatggaataactttttgcatacacaagtggaaatttgtattgcactgattcttgcaagtccttttgaaaacacagaaaatgccacaattaccgatcaagactccactggtgataatttgttattaaaacatcttttccaaaaatgtcaattaatagaacgaatacttgaagcctgggaaatgaatgagaagaaacaggctgagggaggaagacggcatggttacatgggacacctaacgaggatagctaactgtatcgtgcacagcactgacaagggccccaacagtgcattagtgcagcagcttatcaaagatcttcccgacgaagtcagggaacgatgggagacgttctgcacaagctccttaggagaaactaacaagaggaacacggtagatctagttacaacctgccatattcattcatccagtgatgatgaaattgactttaaagaaacgggtttctcacaggattcttctttgcagcaagccttttctgattatcagatgcaacaaatgacgtccaattttattgaccagtttggcttcaacgatgagaagtttgcagatcaagatgacattggcaatgtttcttttgatcgagtatcagacatcaactttactctcaatacaaatgaaagtggaaatattgccttgtttgaagcatgttgtaaggaaagaatacaacagtttgatgatggtggctctgatgaggaagatatatgggaggaaaagcacatcgcattcacaccagaatcccaaagacgatccagctcggggagtacagacagtgaggaaagtacagactctgaagaagaagatggagcaaagcaagacttgtttgaacccagcagtgccaacacggaggataaaatggaggtggacctgagtgaaccacccaactggtcagctaactttgatgtcccaatggaaacaacccacggtgctccattggattctgtgggatctgatgtctggagcacagaggagccgatgccaactaaagagacgggctgggcttctttttcagagttcacgtcttccctgagcacaaaagattctttaaggagtaattctccagtggaaatggaaaccagcactgaacccatggaccctctgactcccagtgcggctgccctggcagtgcagccagaagcggcaggcagtgtggccatggaagccagctctgacggagaggaggatgcagaaagtacagacaaggtaactgagacagtgatgaatggcggcatgaaggaaacgctcagcctcactgtagatgccaagacagagactgcggtcttcaaaagagtgttgaaatcctatcgtgaggaagggaaactgtctacctctcaagatgctgcttgtaaagacgcagaggagtgtcccgagactgcagaggcgaagtgcgcggcgcccaggcctcccagcagcagtcccgagcagaggactggccaaccaagcgcaccaggtgacacttcagtgaatggccctgtatgacgggtgacgtctgctgctgctgactgaggactgcagaccgccaccactcaggggctctggaggggtcagctggagcccaccaagctgtcactgctgcactcactctgcaagggatcaggaccagcaacctttatattctagattctaagacattgtacagagaaattcagaagtgtaaaaatattgcacattgacaaataccaagaatttttgcgtatgtttatattgtattgttctaaataatgggtagcctgtgaaataagatcttgccacccatgtaataatagtagtaatactatagttaaaatggctgtaagaatagttttataaaagtgaatacacagatctattgtatttgaaacataactttgacaattattagtgtgaccaaagtattaggcggttttcatacatttttcaccttgtacaaaattatgaattcatttttcctccaggccgacaaggagttgtagaatgaaaatgccctctaagtgttattttggttgttctaacttacaaaagtgattttgaataagaaatatttggtgttctttttataaccagtttttgattggtaattgttttctgtattgtttaaaacggatcaaaaatgtaagtctattggtagagattaagtaaagtatttattgctacatcatagttgataaattgatgttatcgtaaagccatatgttctgttcaagtcttgtttgcttgaaatgattattcctacaagtgaaacactagactatttggagtgtatatggcttgtgttttgggattttttttttttttttttggcttttgtttttgtttgtttttttgtttcatttggtagttcatctgccttttaacccattcaccaaaatttaccttgttaacaagcatcaccaatgaacatttcagagcaatctgcatatttaacagacctaaaataaatcctattaggcaagtcagttgaaaatgctcgtgctgctaatggaattagagtgcgttcattttacaggctagtattttaaaagtagaaatcaaaatctggcaccgaagcatgctaattgtttactgtaccttgtgaggttttcactcataaatttaaaccagtgtatttttttagaactggtttgtgtatatatatagtgattatggatactaattcaatgtaatttataattttctatgtcaatacaaaaatacatcacagccttctcaaacagctcaagcaatatattgtatattgccatatcgtctggtgaaagggttaaattacttcacctcttgcacttttagatgcaaatcagtttttcatttctgtaatagaaaattattcacgtatttttacatcatttgtttttcctgaccagtatttaaaaccaaaaggatattctgaaaaatggccaacaatttttttagaagtagcatcccaagcagcgtgcctaaacattacattgcatatggaaataaaagaatcaaacgtctaatgccttattatttctgatttcctttttcattttaagtggtgtggagattccagcactcccaggacagtggagtcagcagtaagccctgggacaggtggcaagggtgggtcccttgacctttgcacgcctcctcaggaaccccctttcccgggtgagcccctctctgaagagactgtccttgggcctcctctggaagcagcacccccagaggacagggctcctcctgcttgcctcagggctgcctgacttgaatggcgttggacctcggggattactggtagataatatgctctggtctcgcctggtggtgagttttgccagccatggccagggtttggctccactggtggcacacgtggcctccgtggtatggacctggtggcttctccatcccactgtggcctctgtggtatggacctggtggcttctccatcctacccaaggtaacagtgtcttgcttcatcccactgactgctgggagagagcctctgggacttttctttggggcatcattttgttttgtctttcgtagcagggaaaggatatgacaatggggaggacagttcttttggaggttggaggggccaagccaaggacaggagcaagtgtgccctcattttgtttctacttttaatttctgtgtgttggccatactgaattatgagactaacagatgtctacaatacaatacctgtattcaaaataacaaaaataaagcctgattctttgtttctag

SEQ ID NO: 171382 - DNA, 2771 bp, Homo sapiens
  Payload ID: 13706
  Gene Symbol: PPP6R3
  Gene Name: protein phosphatase 6, regulatory subunit 3
  Uniprot ID: Q5H9R7
  ENST ID: ENST00000524845
  CDS Start-End: 237-2771
tttgggcgcttcgctgatggtgtcggtgagcgcgtttcccgcctgagcgcaactagcggcgggtcgtgggcacctccaggagagcttgtttcatatccatatcccactgtattcctgctaatctgctaatgcagtaaattggaggaaaactgttaccaggataacctgtaatgggcaaggagccacaaagaagaaaacatttcttttaatttttaaacttggtttgaaagaccagcatgttttggaaatttgatcttcactcatcatcccacatagacacacttctagaaagagaagatgtaacactgaaggagttaatggatgaggaagatgttttacaggaatgtaaagctcagaaccgcaaacttatagagtttctgttaaaagcagaatgtctcgaagatttagtctcattcattatagaagaaccacctcaagacatggatgaaaagatcagatacaagtatccaaatatatcttgtgagttgctcacttctgatgtctcccagatgaatgatagactgggagaagatgaatccttgctaatgaaattatatagcttcctcctaaacgattcccctttgaatccactacttgccagtttcttcagcaaggtgctaagtattcttatcagcagaaaaccagaacagattgtggatttcttaaagaagaagcatgattttgtagaccttattataaagcacataggaacttctgctatcatggatttgttgctcaggctcctgacgtgtatcgaacctccacagcccaggcaagatgtgctgaattggttaaatgaggagaaaattatccagaggcttgtggaaatagttcatccatcgcaagaagaagatcgacattcaaatgcatcacaatcactttgtgaaattgttcgcctgagcagagaccagatgttacaaattcagaacagtacagagcccgaccccctgcttgccactctagaaaagcaagaaattatagagcagcttctatcaaatattttccacaaggagaaaaatgagtcagccatagtcagtgcaatccagatattgctgactttacttgagacacgacgaccaacatttgaaggccatatagagatctgcccaccaggcatgagccattcagcttgttcagtaaacaagagtgttctagaagccatcagaggaagacttggatcttttcatgaactcctgctggagccacccaagaaaagtgtgatgaagaccacatggggtgtgctggatcctcctgtggggaatacccggttgaatgtcattaggttgatatccagcctgcttcaaaccaataccagcagtataaatggggaccttatggagctgaatagcattggagtcatattgaacatgttcttcaagtatacatggaataactttttgcatacacaagtggaaatttgtattgcactgattcttgcaagtccttttgaaaacacagaaaatgccacaattaccgatcaagactccactggtgataatttgttattaaaacatcttttccaaaaatgtcaattaatagaacgaatacttgaagcctgggaaatgaatgagaagaaacaggctgagggaggaagacggcatggttacatgggacacctaacgaggatagctaactgtatcgtgcacagcactgacaagggccccaacagtgcattagtgcagcagcttatcaaagatcttcccgacgaagtcagggaacgatgggagacgttctgcacaagctccttaggagaaactaacaagaggaacacggtagatctagccttttctgattatcagatgcaacaaatgacgtccaattttattgaccagtttggcttcaacgatgagaagtttgcagatcaagatgacattggcaatgtttcttttgatcgagtatcagacatcaactttactctcaatacaaatgaaagtggaaatattgccttgtttgaagcatgttgtaaggaaagaatacaacagtttgatgatggtggctctgatgaggaagatatatgggaggaaaagcacatcgcattcacaccagaatcccaaagacgatccagctcggggagtacagacagtgaggaaagtacagactctgaagaagaagatggagcaaagcaagacttgtttgaacccagcagtgccaacacggaggataaaatggaggtggacctgagtgaaccacccaactggtcagctaactttgatgtcccaatggaaacaacccacggtgctccattggattctgtgggatctgatgtctggagcacagaggagccgatgccaactaaagagacgggctgggcttctttttcagagttcacgtcttccctgagcacaaaagattctttaaggagtaattctccagtggaaatggaaaccagcactgaacccatggaccctctgactcccagtgcggctgccctggcagtgcagccagaagcggcaggcagtgtggccatggaagccagctctgacggagaggaggatgcagaaagtacagacaaggtaactgagacagtgatgaatggcggcatgaaggaaacgctcagcctcactgtagatgccaagacagagactgcggtcttcaaaagtgaggaagggaaactgtctacctctcaagatgctgcttgtaaagacgcagaggagtgtcccgagactgcagaggcgaagtgcgcggcgcccaggcctcccagcagcagtcccgagcagaggactggccaaccaagcgcaccaggtgacacttcagtgaatggccctgtatga

SEQ ID NO: 171383 - DNA, 826 bp, Homo sapiens
  Payload ID: 13706
  Gene Symbol: PPP6R3
  Gene Name: protein phosphatase 6, regulatory subunit 3
  ENST ID: ENST00000529907
  CDS Start-End: 406-826
attttgggcgcttcgctgatggtgtcggtgagcgcgtttcccgcctgagcgcaactagcggcgggtcgtgggcacctccagataagaaaacaagctcagagagatgtggtgacttgctcaaatagtgacagaacttcctcggccatatggaggggtcatataatacccttgtgtcttcagtttgaggtacctcccataattttaaggggagagcttgtttcatatccatatcccactgtattcctgctaatctgctaatgcagtaaattggaggaaaactgttaccaggataacctgtaatgggcaaggagccacaaagaagaaaacatttcttttaatttttaaacttggtttgaaaggtatccaaatatatcttgtgagttgctcacttctgatgtctcccagatgaatgatagactgggagaagatgaatccttgctaatgaaattatatagcttcctcctaaacgattcccctttgaatccactacttgccagtttcttcagcaaggtgctaagtattcttatcagcagaaaaccagaacagattgtggatttcttaaagaagaagcatgattttgtagaccttattataaagcacataggaacttctgctatcatggatttgttgctcaggctcctgacgtgtatcgaacctccacagcccaggcaagatgtgctgaattggttaaatgaggagaaaattatccagaggcttgtggaaatagttcatccatcgcaagaagaagatcgacattcaaatgcatcacaatcactttgtgaaattgttcgcctgagcagagaccagatgttacaaattcagaaca

SEQ ID NO: 171384 - DNA, 687 bp, Homo sapiens
  Payload ID: 13706
  Gene Symbol: PPP6R3
  Gene Name: protein phosphatase 6, regulatory subunit 3
  ENST ID: ENST00000531244
  CDS Start-End: 129-687
agagctttgtgctgaacatcagtcctccacatcgactcctcttgtaagatgttgtgtccaggtggatcatcacagtggctgccatccttaaatatgtcttggtcctgttgctgctaattgataccagcatgttttggaaatttgatcttcactcatcatcccacatagacacacttctagaaagagaagatgtaacactgaaggagttaatggatgaggaagatgttttacaggaatgtaaagctcagaaccgcaaacttatagagtttctgttaaaagcagaatgtctcgaagatttagtctcattcattatagaagaaccacctcaagacatggatgaaaagatcagatacaagtatccaaatatatcttgtgagttgctcacttctgatgtctcccagatgaatgatagactgggagaagatgaatccttgctaatgaaattatatagcttcctcctaaacgattcccctttgaatccactacttgccagtttcttcagcaaggtgctaagtattcttatcagcagaaaaccagaacagattgtggatttcttaaagaagaagcatgattttgtagaccttattataaagcacataggaacttctgctatcatggatttgttgctcaggctcctgacgtgtatcgaacctccacagcccaggcaagatgtgctgaattggttaa

SEQ ID NO: 171385 - DNA, 4292 bp, Homo sapiens
  Payload ID: 13706
  Gene Symbol: PPP6R3
  Gene Name: protein phosphatase 6, regulatory subunit 3
  Uniprot ID: Q5H9R7
  ENST ID: ENST00000524904
  CDS Start-End: 231-2834
cgcttcgctgatggtgtcggtgagcgcgtttcccgcctgagcgcaactagcggcgggtcgtgggcacctccaggagagcttgtttcatatccatatcccactgtattcctgctaatctgctaatgcagtaaattggaggaaaactgttaccaggataacctgtaatgggcaaggagccacaaagaagaaaacatttcttttaatttttaaacttggtttgaaagaccagcatgttttggaaatttgatcttcactcatcatcccacatagacacacttctagaaagagaagatgtaacactgaaggagttaatggatgaggaagatgttttacaggaatgtaaagctcagaaccgcaaacttatagagtttctgttaaaagcagaatgtctcgaagatttagtctcattcattatagaagaaccacctcaagacatggatgaaaagatcagatacaagtatccaaatatatcttgtgagttgctcacttctgatgtctcccagatgaatgatagactgggagaagatgaatccttgctaatgaaattatatagcttcctcctaaacgattcccctttgaatccactacttgccagtttcttcagcaaggtgctaagtattcttatcagcagaaaaccagaacagattgtggatttcttaaagaagaagcatgattttgtagaccttattataaagcacataggaacttctgctatcatggatttgttgctcaggctcctgacgtgtatcgaacctccacagcccaggcaagatgtgctgaattggttaaatgaggagaaaattatccagaggcttgtggaaatagttcatccatcgcaagaagaagatcgacattcaaatgcatcacaatcactttgtgaaattgttcgcctgagcagagaccagatgttacaaattcagaacagtacagagcccgaccccctgcttgccactctagaaaagcaagaaattatagagcagcttctatcaaatattttccacaaggagaaaaatgagtcagccatagtcagtgcaatccagatattgctgactttacttgagacacgacgaccaacatttgaaggccatatagagatctgcccaccaggcatgagccattcagcttgttcagtaaacaagagtgttctagaagccatcagaggaagacttggatcttttcatgaactcctgctggagccacccaagaaaagtgtgatgaagaccacatggggtgtgctggatcctcctgtggggaatacccggttgaatgtcattaggttgatatccagcctgcttcaaaccaataccagcagtataaatggggaccttatggagctgaatagcattggagtcatattgaacatgttcttcaagtatacatggaataactttttgcatacacaagtggaaatttgtattgcactgattcttgcaagtccttttgaaaacacagaaaatgccacaattaccgatcaagactccactggtgataatttgttattaaaacatcttttccaaaaatgtcaattaatagaacgaatacttgaagcctgggaaatgaatgagaagaaacaggctgagggaggaagacggcatggttacatgggacacctaacgaggatagctaactgtatcgtgcacagcactgacaagggccccaacagtgcattagtgcagcagcttatcaaagatcttcccgacgaagtcagggaacgatgggagacgttctgcacaagctccttaggagaaactaacaagaggaacacggtagatctagttacaacctgccatattcattcatccagtgatgatgaaattgactttaaagaaacgggtttctcacaggattcttctttgcagcaaatgcaacaaatgacgtccaattttattgaccagtttggcttcaacgatgagaagtttgcagatcaagatgacattggcaatgtttcttttgatcgagtatcagacatcaactttactctcaatacaaatgaaagtggaaatattgccttgtttgaagcatgttgtaaggaaagaatacaacagtttgatgatggtggctctgatgaggaagatatatgggaggaaaagcacatcgcattcacaccagaatcccaaagacgatccagctcggggagtacagacagtgaggaaagtacagactctgaagaagaagatggagcaaagcaagacttgtttgaacccagcagtgccaacacggaggataaaatggaggtggacctgagtgaaccacccaactggtcagctaactttgatgtcccaatggaaacaacccacggtgctccattggattctgtgggatctgatgtctggagcacagaggagccgatgccaactaaagagacgggctgggcttctttttcagagttcacgtcttccctgagcacaaaagattctttaaggagtaattctccagtggaaatggaaaccagcactgaacccatggaccctctgactcccagtgcggctgccctggcagtgcagccagaagcggcaggcagtgtggccatggaagccagctctgacggagaggaggatgcagaaagtacagacaaggtaactgagacagtgatgaatggcggcatgaaggaaacgctcagcctcactgtagatgccaagacagagactgcggtcttcaaaagtgaggaagggaaactgtctacctctcaagatgctgcttgtaaagacgcagaggagtgtcccgagactgcagaggcgaagtgcgcggcgcccaggcctcccagcagcagtcccgagcagaggactggccaaccaagcgcaccaggtgacacttcagtgaatggccctgtatgacgggtgacgtctgctgctgctgactgaggactgcagaccgccaccactcaggggctctggaggggtcagctggagcccaccaagctgtcactgctgcactcactctgcaagggatcaggaccagcaacctttatattctagattctaagacattgtacagagaaattcagaagtgtaaaaatattgcacattgacaaataccaagaatttttgcgtatgtttatattgtattgttctaaataatgggtagcctgtgaaataagatcttgccacccatgtaataatagtagtaatactatagttaaaatggctgtaagaatagttttataaaagtgaatacacagatctattgtatttgaaacataactttgacaattattagtgtgaccaaagtattaggcggttttcatacatttttcaccttgtacaaaattatgaattcatttttcctccaggccgacaaggagttgtagaatgaaaatgccctctaagtgttattttggttgttctaacttacaaaagtgattttgaataagaaatatttggtgttctttttataaccagtttttgattggtaattgttttctgtattgtttaaaacggatcaaaaatgtaagtctattggtagagattaagtaaagtatttattgctacatcatagttgataaattgatgttatcgtaaagccatatgttctgttcaagtcttgtttgcttgaaatgattattcctacaagtgaaacactagactatttggagtgtatatggcttgtgttttgggattttttttttttttttttggcttttgtttttgtttgtttttttgtttcatttggtagttcatctgccttttaacccattcaccaaaatttaccttgttaacaagcatcaccaatgaacatttcagagcaatctgcatatttaacagacctaaaataaatcctattaggcaagtcagttgaaaatgctcgtgctgctaatggaattagagtgcgttcattttacaggctagtattttaaaagtagaaatcaaaatctggcaccgaagcatgctaattgtttactgtaccttgtgaggttttcactcataaatttaaaccagtgtatttttttagaactggtttgtgtatatatatagtgattatggatactaattcaatgtaatttataattttctatgtcaatacaaaaatacatcacagccttctcaaacagctcaagcaatatattgtatattgccatatcgtctggtgaaagggttaaattacttcacctcttgcacttttagatgcaaatcagtttttcatttctgtaatagaaaattattcacgtatttttacatcatttgtttttcctgaccagtatttaaaaccaaaaggatattctgaaaaatggccaacaatttttttagaagtagcatcccaagcagcgtgcctaaacattacattgcatatggaaa

SEQ ID NO: 171386 - DNA, 603 bp, Homo sapiens
  Payload ID: 13706
  Gene Symbol: PPP6R3
  Gene Name: protein phosphatase 6, regulatory subunit 3
  ENST ID: ENST00000529344
  CDS Start-End: 377-603
ttttgggcgcttcgctgatggtgtcggtgagcgcgtttcccgcctgagcgcaactagcggcgggtcgtgggcacctccaggctcagaaggaaagaaaacatctcccaggaccagatgtggagtagatgggagttggagagaagctgaagcccaggcccagcaacaggctgggggcccaggtgcttcgggggtcccagccattaacagagcttcgtgcaggagagcttgtttcatatccatatcccactgtattcctgctaatctgctaatgcagtaaattggaggaaaactgttaccaggataacctgtaatgggcaaggagccacaaagaagaaaacatttcttttaatttttaaacttggtttgaaagaccagcatgttttggaaatttgatcttcactcatcatcccacatagacacacttctagaaagagaagatgtaacactgaaggagttaatggatgaggaagatgttttacaggaatgtaaagctcagaaccgcaaacttatagagtttctgttaaaagcagaatgtctcgaagatttagtctcattcattatagaagaaccacctcaagacatggatgaaaagatcagatacaa

SEQ ID NO: 171387 - DNA, 4862 bp, Homo sapiens
  Payload ID: 13706
  Gene Symbol: PPP6R3
  Gene Name: protein phosphatase 6, regulatory subunit 3
  ENST ID: ENST00000527403
  CDS Start-End: 153-2669
cttgtttcatatccatatcccactgtattcctgctaatctgctaatgcagtaaattggaggaaaactgttaccaggataacctgtaatgggcaaggagccacaaagaagaaaacatttcttttaatttttaaacttggtttgaaagaccagcatgttttggaaatttgatcttcactcatcatcccacatagacacacttctagaaagagaagatgtaacactgaaggagttaatggatgaggaagatgttttacaggaatgtaaagctcagaaccgcaaacttatagagtttctgttaaaagcagaatgtctcgaagatttagtctcattcattatagaagaaccacctcaagacatggatgaaaagatcagatacaagtatccaaatatatcttgtgagttgctcacttctgatgtctcccagatgaatgatagactgggagaagatgaatccttgctaatgaaattatatagcttcctcctaaacgattcccctttgaatccactacttgccagtttcttcagcaaggtgctaagtattcttatcagcagaaaaccagaacagattgtggatttcttaaagaagaagcatgattttgtagaccttattataaagcacataggaacttctgctatcatggatttgttgctcaggctcctgacgtgtatcgaacctccacagcccaggcaagatgtgctgaattggttaaatgaggagaaaattatccagaggcttgtggaaatagttcatccatcgcaagaagaagatcgacattcaaatgcatcacaatcactttgtgaaattgttcgcctgagcagagaccagatgttacaaattcagaacagtacagagcccgaccccctgcttgccactctagaaaagcaagaaattatagagcagcttctatcaaatattttccacaaggagaaaaatgagtcagccatagtcagtgcaatccagatattgctgactttacttgagacacgacgaccaacatttgaaggccatatagagatctgcccaccaggcatgagccattcagcttgttcagtaaacaagagtgttctagaagccatcagaggaagacttggatcttttcatgaactcctgctggagccacccaagaaaagtgtgatgaagaccacatggggtgtgctggatcctcctgtggggaatacccggttgaatgtcattaggttgatatccagcctgcttcaaaccaataccagcagtataaatggggaccttatggagctgaatagcattggagtcatattgaacatgttcttcaagtatacatggaataactttttgcatacacaagtggaaatttgtattgcactgattcttgcaagtccttttgaaaacacagaaaatgccacaattaccgatcaagactccactggtgataatttgttattaaaacatcttttccaaaaatgtcaattaatagaacgaatacttgaagcctgggaaatgaatgagaagaaacaggctgagggaggaagacggcatggttacatgggacacctaacgaggatagctaactgtatcgtgcacagcactgacaagggccccaacagtgcattagtgcagcagcttatcaaagatcttcccgacgaagtcagggaacgatgggagacgttctgcacaagctccttaggagaaactaacaagaggaacacggtagatctaatgcaacaaatgacgtccaattttattgaccagtttggcttcaacgatgagaagtttgcagatcaagatgacattggcaatgtttcttttgatcgagtatcagacatcaactttactctcaatacaaatgaaagtggaaatattgccttgtttgaagcatgttgtaaggaaagaatacaacagtttgatgatggtggctctgatgaggaagatatatgggaggaaaagcacatcgcattcacaccagaatcccaaagacgatccagctcggggagtacagacagtgaggaaagtacagactctgaagaagaagatggagcaaagcaagacttgtttgaacccagcagtgccaacacggaggataaaatggaggtggacctgagtgaaccacccaactggtcagctaactttgatgtcccaatggaaacaacccacggtgctccattggattctgtgggatctgatgtctggagcacagaggagccgatgccaactaaagagacgggctgggcttctttttcagagttcacgtcttccctgagcacaaaagattctttaaggagtaattctccagtggaaatggaaaccagcactgaacccatggaccctctgactcccagtgcggctgccctggcagtgcagccagaagcggcaggcagtgtggccatggaagccagctctgacggagaggaggatgcagaaagtacagacaaggtaactgagacagtgatgaatggcggcatgaaggaaacgctcagcctcactgtagatgccaagacagagactgcggtcttcaaaagtgaggaagggaaactgtctacctctcaagatgctgcttgtaaagacgcagaggagtgtcccgagactgcagaggcgaagtgcgcggcgcccaggcctcccagcagcagtcccgagcagaggactggccaaccaagcgcaccaggtgacacttcagtgaatggccctgtatgacgggtgacgtctgctgctgctgactgaggactgcagaccgccaccactcaggggctctggaggggtcagctggagcccaccaagctgtcactgctgcactcactctgcaagggatcaggaccagcaacctttatattctagattctaagacattgtacagagaaattcagaagtgtaaaaatattgcacattgacaaataccaagaatttttgcgtatgtttatattgtattgttctaaataatgggtagcctgtgaaataagatcttgccacccatgtaataatagtagtaatactatagttaaaatggctgtaagaatagttttataaaagtgaatacacagatctattgtatttgaaacataactttgacaattattagtgtgaccaaagtattaggcggttttcatacatttttcaccttgtacaaaattatgaattcatttttcctccaggccgacaaggagttgtagaatgaaaatgccctctaagtgttattttggttgttctaacttacaaaagtgattttgaataagaaatatttggtgttctttttataaccagtttttgattggtaattgttttctgtattgtttaaaacggatcaaaaatgtaagtctattggtagagattaagtaaagtatttattgctacatcatagttgataaattgatgttatcgtaaagccatatgttctgttcaagtcttgtttgcttgaaatgattattcctacaagtgaaacactagactatttggagtgtatatggcttgtgttttgggattttttttttttttttttggcttttgtttttgtttgtttttttgtttcatttggtagttcatctgccttttaacccattcaccaaaatttaccttgttaacaagcatcaccaatgaacatttcagagcaatctgcatatttaacagacctaaaataaatcctattaggcaagtcagttgaaaatgctcgtgctgctaatggaattagagtgcgttcattttacaggctagtattttaaaagtagaaatcaaaatctggcaccgaagcatgctaattgtttactgtaccttgtgaggttttcactcataaatttaaaccagtgtatttttttagaactggtttgtgtatatatatagtgattatggatactaattcaatgtaatttataattttctatgtcaatacaaaaatacatcacagccttctcaaacagctcaagcaatatattgtatattgccatatcgtctggtgaaagggttaaattacttcacctcttgcacttttagatgcaaatcagtttttcatttctgtaatagaaaattattcacgtatttttacatcatttgtttttcctgaccagtatttaaaaccaaaaggatattctgaaaaatggccaacaatttttttagaagtagcatcccaagcagcgtgcctaaacattacattgcatatggaaataaaagaatcaaacgtctaatgccttattatttctgatttcctttttcattttaagtggtgtggagattccagcactcccaggacagtggagtcagcagtaagccctgggacaggtggcaagggtgggtcccttgacctttgcacgcctcctcaggaaccccctttcccgggtgagcccctctctgaagagactgtccttgggcctcctctggaagcagcacccccagaggacagggctcctcctgcttgcctcagggctgcctgacttgaatggcgttggacctcggggattactggtagataatatgctctggtctcgcctggtggtgagttttgccagccatggccagggtttggctccactggtggcacacgtggcctccgtggtatggacctggtggcttctccatcccactgtggcctctgtggtatggacctggtggcttctccatcctacccaaggtaacagtgtcttgcttcatcccactgactgctgggagagagcctctgggacttttctttggggcatcattttgttttgtctttcgtagcagggaaaggatatgacaatggggaggacagttcttttggaggttggaggggccaagccaaggacaggagcaagtgtgccctcattttgtttctacttttaatttctgtgtgttggccatactgaattatgagactaacagatgtctacaatacaatacctgtattcaaaataacaaaaataa

SEQ ID NO: 171388 - DNA, 551 bp, Homo sapiens
  Payload ID: 13706
  Gene Symbol: PPP6R3
  Gene Name: protein phosphatase 6, regulatory subunit 3
  ENST ID: ENST00000533127
  CDS Start-End: 435-551
attttgggcgcttcgctgatggtgtcggtgagcgcgtttcccgcctgagcgcaactagcggcgggtcgtgggcacctccaggagagcttgtttcatatccatatcccactgtattcctgctaatctgctaatgcagtaaattggaggaaaactgttaccaggataacctgtaatgggcaaggagccacaaagaagaaaacatttcttttaatttttaaacttggtttgaaagaaaaatttcgttctttgccctgtgctcagaagatcacaataaaacttcaccacatcaagctgctgtgggatagggcaaaccgggatggttaagtccatgagtgcatgaagtttactgttggtgctactggttcagtaacaggtgatggatttcaaaagtctccagatgcctgctggcgaataatcaaagaataactaccagcatgttttggaaatttgatcttcactcatcatcccacatagacacacttctagaaagagaagatgtaacactgaaggagttaatggatgaggaagatgttttacaggaatgtaaagct

SEQ ID NO: 171389 - DNA, 576 bp, Homo sapiens
  Payload ID: 13706
  Gene Symbol: PPP6R3
  Gene Name: protein phosphatase 6, regulatory subunit 3
  ENST ID: ENST00000530734
  CDS Start-End: 1-155
cagaggagtgtcccgagactgcagaggcgaagtgcgcggcgcccaggcctcccagcagcagtcccgagcagagtgcctccgatgcctgtctgttgctccttaggactggccaaccaagcgcaccaggtgacacttcagtgaatggccctgtatgacgggtgacgtctgctgctgctgactgaggactgcagaccgccaccactcaggggctctggaggggtcagctggagcccaccaagctgtcactgctgcactcactctgcaagggatcaggaccagcaacctttatattctagattctaagacattgtacagagaaattcagaagtgtaaaaatattgcacattgacaaataccaagaatttttgcgtatgtttatattgtattgttctaaataatgggtagcctgtgaaataagatcttgccacccatgtaataatagtagtaatactatagttaaaatggctgtaagaatagttttataaaagtgaatacacagatctattgtatttgaaacataactttgacaattattagtgtgaccaaagtattaggcggttttcatacatttttcac

SEQ ID NO: 171390 - DNA, 830 bp, Homo sapiens
  Payload ID: 13706
  Gene Symbol: PPP6R3
  Gene Name: protein phosphatase 6, regulatory subunit 3
  ENST ID: ENST00000525421
  CDS Start-End: 1-337
gaaacaggctgagggaggaagacggcatggttacatgggacacctaacgaggatagctaactgtatcgtgcacagcactgacaagggccccaacagtgcattagtgcagcagcttatcaaagatcttcccgacgaagtcagggaacgatgggagacgttctgcacaagctccttaggagaaactaacaagaggaacacggtagatctagttacaacctgccatattcattcatccagtgatgatgaaattgactttaaagaaacgggtttctcacaggattcttctttgcagcaaaaaaacacaccaacttttatagccctatggctatgtaaataagatgatttctggaacacaaatgggcaaatagtatgtagaatatcattagaatcattatatcactgtcactggtcctggggttgccaggccttttctgattatcagatgcaacaaatgacgtccaattttattgaccagtttggcttcaacgatgagaagtttgcagatcaagatgacattggcaatgtttcttttgatcgagtatcagacatcaactttactctcaatacaaatgaaagtggaaatattgccttgtttgaagcatgttgtaaggaaagaatacaacagtttgatgatggtggctctgatgaggaagatatatgggaggaaaagcacatcgcattcacaccagaatcccaaagacgatccagctcggggagtacagacagtgaggaaagtacagactctgaagaagaagatggagcaaagcaagacttgtttgaacccagcagtgccaacacggaggataaaatggaggtggacctgagtgaac

SEQ ID NO: 171391 - DNA, 2968 bp, Homo sapiens
  Payload ID: 13706
  Gene Symbol: PPP6R3
  Gene Name: protein phosphatase 6, regulatory subunit 3
  ENST ID: ENST00000534534
  CDS Start-End: 278-2203
ttttgggcgcttcgctgatggtgtcggtgagcgcgtttcccgcctgagcgcaactagcggcgggtcgtgggcacctccaggagagcttgtttcatatccatatcccactgtattcctgctaatctgctaatgcagtaaattggaggaaaactgttaccaggataacctgtaatgggcaaggagccacaaagaagaaaacatttcttttaatttttaaacttggtttgaaaggtatccaaatatatcttgtgagttgctcacttctgatgtctcccagatgaatgatagactgggagaagatgaatccttgctaatgaaattatatagcttcctcctaaacgattcccctttgaatccactacttgccagtttcttcagcaaggtgctaagtattcttatcagcagaaaaccagaacagattgtggatttcttaaagaagaagcatgattttgtagaccttattataaagcacataggaacttctgctatcatggatttgttgctcaggctcctgacgtgtatcgaacctccacagcccaggcaagatgtgctgaataaaagtgtgatgaagaccacatggggtgtgctggatcctcctgtggggaatacccggttgaatgtcattaggttgatatccagcctgcttcaaaccaataccagcagtataaatggggaccttatggagctgaatagcattggagtcatattgaacatgttcttcaagtatacatggaataactttttgcatacacaagtggaaatttgtattgcactgattcttgcaagtccttttgaaaacacagaaaatgccacaattaccgatcaagactccactggtgataatttgttattaaaacatcttttccaaaaatgtcaattaatagaacgaatacttgaagcctgggaaatgaatgagaagaaacaggctgagggaggaagacggcatggttacatgggacacctaacgaggatagctaactgtatcgtgcacagcactgacaagggccccaacagtgcattagtgcagcagcttatcaaagatcttcccgacgaagtcagggaacgatgggagacgttctgcacaagctccttaggagaaactaacaagaggaacacggtagatctagttacaacctgccatattcattcatccagtgatgatgaaattgactttaaagaaacgggtttctcacaggattcttctttgcagcaagccttttctgattatcagatgcaacaaatgacgtccaattttattgaccagtttggcttcaacgatgagaagtttgcagatcaagatgacattggcaatgtttcttttgatcgagtatcagacatcaactttactctcaatacaaatgaaagtggaaatattgccttgtttgaagcatgttgtaaggaaagaatacaacagtttgatgatggtggctctgatgaggaagatatatgggaggaaaagcacatcgcattcacaccagaatcccaaagacgatccagctcggggagtacagacagtgaggaaagtacagactctgaagaagaagatggagcaaagcaagacttgtttgaacccagcagtgccaacacggaggataaaatggaggtggacctgagtgaaccacccaactggtcagctaactttgatgtcccaatggaaacaacccacggtgctccattggattctgtgggatctgatgtctggagcacagaggagccgatgccaactaaagagacgggctgggcttctttttcagagttcacgtcttccctgagcacaaaagattctttaaggagtaattctccagtggaaatggaaaccagcactgaacccatggaccctctgactcccagtgcggctgccctggcagtgcagccagaagcggcaggcagtgtggccatggaagccagctctgacggagaggaggatgcagaaagtacagacaaggtaactgagacagtgatgaatggcggcatgaaggaaacgctcagcctcactgtagatgccaagacagagactgcggtcttcaaaagtgaggaagggaaactgtctacctctcaagatgctgcttgtaaagacgcagaggagtgtcccgagactgcagaggcgaagtgcgcggcgcccaggcctcccagcagcagtcccgagcagaggactggccaaccaagcgcaccaggtgacacttcagtgaatggccctgtatgacgggtgacgtctgctgctgctgactgaggactgcagaccgccaccactcaggggctctggaggggtcagctggagcccaccaagctgtcactgctgcactcactctgcaagggatcaggaccagcaacctttatattctagattctaagacattgtacagagaaattcagaagtgtaaaaatattgcacattgacaaataccaagaatttttgcgtatgtttatattgtattgttctaaataatgggtagcctgtgaaataagatcttgccacccatgtaataatagtagtaatactatagttaaaatggctgtaagaatagttttataaaagtgaatacacagatctattgtatttgaaacataactttgacaattattagtgtgaccaaagtattaggcggttttcatacatttttcaccttgtacaaaattatgaattcatttttcctccaggccgacaaggagttgtagaatgaaaatgccctctaagtgttattttggttgttctaacttacaaaagtgattttgaataagaaatatttggtgttctttttataaccagtttttgattggtaattgttttctgtattgtttaaaacggatcaaaaatgtaagtctattggtagagattaagtaaagtatttattgctacatcatagttgataaattgatgttatcgtaaagccatatgttctgttcaagtcttgtttgcttgaaatgattattcctacaagtgaaacactagactatttggagtgtatat

SEQ ID NO: 171392 - DNA, 1980 bp, Homo sapiens
  Payload ID: 13706
  Gene Symbol: PPP6R3
  Gene Name: protein phosphatase 6, regulatory subunit 3
  ENST ID: ENST00000534190
  CDS Start-End: 1-1743
cagatattgctgactttacttgagacacgacgaccaacatttgaaggccatatagagatctgcccaccaggcatgagccattcagcttgttcagtaaacaagagtgttctagaagccatcagaggaagacttggatcttttcatgaactcctgctggagccacccaagctttttcttcttcagaaaagtgtgatgaagaccacatggggtgtgctggatcctcctgtggggaatacccggttgaatgtcattaggttgatatccagcctgcttcaaaccaataccagcagtataaatggggaccttatggagctgaatagcattggagtcatattgaacatgttcttcaagtatacatggaataactttttgcatacacaagtggaaatttgtattgcactgattcttgcaagtccttttgaaaacacagaaaatgccacaattaccgatcaagactccactggtgataatttgttattaaaacatcttttccaaaaatgtcaattaatagaacgaatacttgaagcctgggaaatgaatgagaagaaacaggctgagggaggaagacggcatggttacatgggacacctaacgaggatagctaactgtatcgtgcacagcactgacaagggccccaacagtgcattagtgcagcagcttatcaaagatcttcccgacgaagtcagggaacgatgggagacgttctgcacaagctccttaggagaaactaacaagaggaacacggtagatctagccttttctgattatcagatgcaacaaatgacgtccaattttattgaccagtttggcttcaacgatgagaagtttgcagatcaagatgacattggcaatgtttcttttgatcgagtatcagacatcaactttactctcaatacaaatgaaagtggaaatattgccttgtttgaagcatgttgtaaggaaagaatacaacagtttgatgatggtggctctgatgaggaagatatatgggaggaaaagcacatcgcattcacaccagaatcccaaagacgatccagctcggggagtacagacagtgaggaaagtacagactctgaagaagaagatggagcaaagcaagacttgtttgaacccagcagtgccaacacggaggataaaatggaggtggacctgagtgaaccacccaactggtcagctaactttgatgtcccaatggaaacaacccacggtgctccattggattctgtgggatctgatgtctggagcacagaggagccgatgccaactaaagagacgggctgggcttctttttcagagttcacgtcttccctgagcacaaaagattctttaaggagtaattctccagtggaaatggaaaccagcactgaacccatggaccctctgactcccagtgcggctgccctggcagtgcagccagaagcggcaggcagtgtggccatggaagccagctctgacggagaggaggatgcagaaagtacagacaaggtaactgagacagtgatgaatggcggcatgaaggaaacgctcagcctcactgtagatgccaagacagagactgcggtcttcaaaagtgaggaagggaaactgtctacctctcaagatgctgcttgtaaagacgcagaggagtgtcccgagactgcagaggcgaagtgcgcggcgcccaggcctcccagcagcagtcccgagcagaggactggccaaccaagcgcaccaggtgacacttcagtgaatggccctgtatgacgggtgacgtctgctgctgctgactgaggactgcagaccgccaccactcaggggctctggaggggtcagctggagcccaccaagctgtcactgctgcactcactctgcaagggatcaggaccagcaacctttatattctagattctaagacattgtacagagaaattcagaagtgtaaaaatattgcacattgacaaataccaagaatttttgcgtatgtttatattgtattgttct

SEQ ID NO: 171393 - DNA, 570 bp, Homo sapiens
  Payload ID: 13706
  Gene Symbol: PPP6R3
  Gene Name: protein phosphatase 6, regulatory subunit 3
  ENST ID: ENST00000526593
  CDS Start-End: 1-329
attctccagtggaaatggaaaccagcactgaacccatggaccctctgactcccagtgcggctgccctggcagtgcagccagaagcggcaggcagtgtggccatggaagccagctctgacggagaggaggatgcagaaagtacagacaaggtaactgagacagtgatgaatggcggcatgaaggaaacgctcagcctcactgtagatgccaagacagagactgcggtcttcaaaaggttctttgacaccttcaccgagtctgcagttttgcttacgtgcagtcgtggacatattattcccccaaattcctcatttctaggagtattctgaaactcttgtacatttctttttctgttttgcacactgggcttcagagtgttgaaatcctatcgtgaggaagggaaactgtctacctctcaagatgctgcttgtaaagacgcagaggagtgtcccgagactgcagaggcgaagtgcgcggcgcccaggcctcccagcagcagtcccgagcagaggactggccaaccaagcgcaccaggtgacacttcagtgaatggccctgtatgacgggtga

SEQ ID NO: 171394 - DNA, 538 bp, Homo sapiens
  Payload ID: 13706
  Gene Symbol: PPP6R3
  Gene Name: protein phosphatase 6, regulatory subunit 3
  ENST ID: ENST00000528635
  CDS Start-End: 514-538
acgtccgccattttgggcgcttcgctgatggtgtcggtgagcgcgtttcccgcctgagcgcaactagcggcgggtcgtgggcacctccagataagaaaacaagctcagagagatgtggtgacttgctcaaatagtgacagaacttcctcggccatatggaggggtcatataatacccttgtgtcttcagtttgaggtacctcccataattttaaggggctcagaaggaaagaaaacatctcccaggaccagatgtggagtagatgggagttggagagaagctgaagcccaggcccagcaacaggctgggggcccaggtgcttcgggggtcccagccattaacagagcttcgtgcaggagagcttgtttcatatccatatcccactgtattcctgctaatctgctaatgcagtaaattggaggaaaactgttaccaggataacctgtaatgggcaaggagccacaaagaagaaaacatttcttttaatttttaaacttggtttgaaagaccagcatgttttggaaatttgatcttcact

SEQ ID NO: 171395 - DNA, 3228 bp, Homo sapiens
  Payload ID: 13706
  Gene Symbol: PPP6R3
  Gene Name: protein phosphatase 6, regulatory subunit 3
  Uniprot ID: Q5H9R7
  ENST ID: ENST00000529710
  CDS Start-End: 278-2653
cgtgggcacctccagataagaaaacaagctcagagagatgtggtgacttgctcaaatagtgacagaacttcctcggccatatggaggggtcatataatacccttgtgtcttcagtttgaggagagcttgtttcatatccatatcccactgtattcctgctaatctgctaatgcagtaaattggaggaaaactgttaccaggataacctgtaatgggcaaggagccacaaagaagaaaacatttcttttaatttttaaacttggtttgaaagaccagcatgttttggaaatttgatcttcactcatcatcccacatagacacacttctagaaagagaagatgtaacactgaaggagttaatggatgaggaagatgttttacaggaatgtaaagctcagaaccgcaaacttatagagtttctgttaaaagcagaatgtctcgaagatttagtctcattcattatagaagaaccacctcaagacatggatgaaaagatcagatacaagtatccaaatatatcttgtgagttgctcacttctgatgtctcccagatgaatgatagactgggagaagatgaatccttgctaatgaaattatatagcttcctcctaaacgattcccctttgaatccactacttgccagtttcttcagcaaggtgctaagtattcttatcagcagaaaaccagaacagattgtggatttcttaaagaagaagcatgattttgtagaccttattataaagcacataggaacttctgctatcatggatttgttgctcaggctcctgacgtgtatcgaacctccacagcccaggcaagatgtgctgaattggttaaatgaggagaaaattatccagaggcttgtggaaatagttcatccatcgcaagaagaagatcgacattcaaatgcatcacaatcactttgtgaaattgttcgcctgagcagagaccagatgttacaaattcagaacagtacagagcccgaccccctgcttgccactctagaaaagcaagaaattatagagcagcttctatcaaatattttccacaaggagaaaaatgagtcagccatagtcagtgcaatccagatattgctgactttacttgagacacgacgaccaacatttgaaggccatatagagatctgcccaccaggcatgagccattcagcttgttcagtaaacaagagtgttctagaagccatcagaggaagacttggatcttttcatgaactcctgctggagccacccaagaacatgttcttcaagtatacatggaataactttttgcatacacaagtggaaatttgtattgcactgattcttgcaagtccttttgaaaacacagaaaatgccacaattaccgatcaagactccactggtgataatttgttattaaaacatcttttccaaaaatgtcaattaatagaacgaatacttgaagcctgggaaatgaatgagaagaaacaggctgagggaggaagacggcatggttacatgggacacctaacgaggatagctaactgtatcgtgcacagcactgacaagggccccaacagtgcattagtgcagcagcttatcaaagatcttcccgacgaagtcagggaacgatgggagacgttctgcacaagctccttaggagaaactaacaagaggaacacggtagatctagccttttctgattatcagatgcaacaaatgacgtccaattttattgaccagtttggcttcaacgatgagaagtttgcagatcaagatgacattggcaatgtttcttttgatcgagtatcagacatcaactttactctcaatacaaatgaaagtggaaatattgccttgtttgaagcatgttgtaaggaaagaatacaacagtttgatgatggtggctctgatgaggaagatatatgggaggaaaagcacatcgcattcacaccagaatcccaaagacgatccagctcggggagtacagacagtgaggaaagtacagactctgaagaagaagatggagcaaagcaagacttgtttgaacccagcagtgccaacacggaggataaaatggaggtggacctgagtgaaccacccaactggtcagctaactttgatgtcccaatggaaacaacccacggtgctccattggattctgtgggatctgatgtctggagcacagaggagccgatgccaactaaagagacgggctgggcttctttttcagagttcacgtcttccctgagcacaaaagattctttaaggagtaattctccagtggaaatggaaaccagcactgaacccatggaccctctgactcccagtgcggctgccctggcagtgcagccagaagcggcaggcagtgtggccatggaagccagctctgacggagaggaggatgcagaaagtacagacaaggtaactgagacagtgatgaatggcggcatgaaggaaacgctcagcctcactgtagatgccaagacagagactgcggtcttcaaaagtgaggaagggaaactgtctacctctcaagatgctgcttgtaaagacgcagaggagtgtcccgagactgcagaggcgaagtgcgcggcgcccaggcctcccagcagcagtcccgagcagagtggtgtggagattccagcactcccaggacagtggagtcagcagtaagccctgggacaggtggcaagggtgggtcccttgacctttgcacgcctcctcaggaaccccctttcccgggtgagcccctctctgaagagactgtccttgggcctcctctggaagcagcacccccagaggacagggctcctcctgcttgcctcagggctgcctgacttgaatggcgttggacctcggggattactggtagataatatgctctggtctcgcctggtggtgagttttgccagccatggccagggtttggctccactggtggcacacgtggcctccgtggtatggacctggtggcttctccatcccactgtggcctctgtggtatggacctggtggcttctccatcctacccaaggtaacagtgtcttgcttcatcccactgactgctgggagagagcctctgggacttttctttggggcatcattttgttttgtctttcgtagcagggaaaggatatgacaatggggaggacagttcttttggaggttggaggggccaagccaaggacaggagcaagtgtgccctcattttgtttctacttttaatttctgtgtgttggccatactga

SEQ ID NO: 171396 - DNA, 2677 bp, Homo sapiens
  Payload ID: 13707
  Gene Symbol: PPME1
  Gene Name: protein phosphatase methylesterase 1
  Uniprot ID: Q9Y570
  ENST ID: ENST00000328257
  CDS Start-End: 324-1484
attgcgcagggtgcattgccctgaagagcgctcctccttccggtgaaagtcgtcgggttcccagccgggagtctgcggagttctcatactctgttacccagcttcctttgtatgagtgctgttgcgcacttccggtggaagcgctgaagcgagtgggtggagtttacggagccggtgggcggtaggcggtgctacgggtagctgggtgctgtccaaaggcgacagggcgtcgttaggggagcgagtcgtgaccggttgggccacactcaacgtgggacgaagcttcgcctactgtttgactacgtgcgtgcagcctcccctcgatgtcggccctcgaaaagagcatgcacctcggccgccttccctctcgcccacctctacccggcagcgggggcagtcagagcggagccaagatgcgaatgggccctggaagaaagcgggacttttcccctgttccttggagtcagtattttgagtccatggaagatgtagaagtagagaatgaaactggcaaggatacttttcgagtctacaagagtggttcagagggtccagtcctgctccttctgcatggaggaggtcattctgccctttcttgggctgtgttcacggcagcgattattagtagagttcagtgtaggattgtagctttggatctgcgaagtcatggtgaaacaaaggtcaagaatcctgaagatctgtctgcagaaacaatggcaaaagacgttggcaatgtggttgaagccatgtatggggaccttcctcctccaattatgctgattggacatagcatgggtggtgctattgcagtccacacagcatcatccaacctggtaccaagcctcttgggtctgtgcatgattgatgttgtagaaggtacagctatggatgcacttaatagcatgcagaatttcttacggggtcgtcctaaaaccttcaagtctctggagaatgctattgaatggagtgtgaagagtggccagattcgaaatctggagtctgcccgtgtctcaatggttggccaagtcaaacagtgtgaaggaattacaagtccagaaggctcaaaatctatagtggaaggaatcatagaggaagaagaagaagatgaggaaggaagtgagtctataagcaagaggaaaaaggaagatgacatggagaccaagaaagaccatccatacacctggagaattgaactggcaaaaacagaaaaatactgggacggctggttccgaggcttatccaatctctttcttagttgtcccattcctaaattgctgctcttggctggtgttgatagattggataaagatctgaccattggccagatgcaagggaagttccagatgcaggtcctaccccagtgtggccatgcagtccatgaggatgcccctgacaaggtagctgaagctgttgccactttcctgatccggcacaggtttgcagaacccatcggtggattccagtgtgtgtttcctggctgttagtgacctgctgtccacccctcctcaacatcgagctctgttgtaaatacgtcgcaccagaggccactgtgatgccactgtctcctctccatcccgcccagccatgtgacactggctcccggtagacgggcaccccgagatgtaccaaccttttcatgtattctgccaaaagcattgttttccagggcccttgaccaacatcggcttccccagtccagggctcccctgctcctttcccttccctgtactggggtagctcctgcctgctctccctgcgttgcctagggtaaagcctccagatttgccatactgagcccctcttcctagcatcaggcgatacatctgagttcaaatgtcttcccaggctcagggacctccattccttgagattgtcttggcatggcccagccctgcctcatgggatggacaatgcatggggtggtctttatttttccctttcaaataaaacactagtcaggtaccgttttatcccagtcgtactcttccaggtttggaagacccagagaggccaagatcccatccttagccatagcgagcggtggtggtggatagcatcacaagaaacgagcctgaaaatcaggtccagccggtccaagcacatggcctcccatctgggagagcccactgtcccactcccacatgtctgggcacctgccctgggctgaggccaggctgctccaggggcctcctgcgccctcacctgccacagagcaacccaggttaaatacagcccatgcacaaagccacaggccaaagcctatggaattgtttttaatcatcaaatttaaccattttcataactggttcctggaggtgtgcagtgcccccttgcctcttcaaacctacagcttctctttgccatttgtggatttcacatcactccacacagaaacattacagcctggcatccccagtctttgccttcttccagctgcctcgacacagcactgtggcctgtccctattgcccaggcacgccatttccaagggcaggaaggggcagtgtcctgaagcccatcttttctgtgactgtcttaggtgatgtgtagccccctccacctttccactcaacaacctcccacccctgtcctgctgcatggtccggagtctgggacctactttgttttttgttatttatgaccttgtttaaagaaaataaatatctcccaaccttta

SEQ ID NO: 171397 - DNA, 2496 bp, Homo sapiens
  Payload ID: 13707
  Gene Symbol: PPME1
  Gene Name: protein phosphatase methylesterase 1
  Uniprot ID: Q9Y570
  ENST ID: ENST00000398427
  CDS Start-End: 101-1303
agggcgtcgttaggggagcgagtcgtgaccggttgggccacactcaacgtgggacgaagcttcgcctactgtttgactacgtgcgtgcagcctcccctcgatgtcggccctcgaaaagagcatgcacctcggccgccttccctctcgcccacctctacccggcagcgggggcagtcagagcggagccaagatgcgaatgggccctggaagaaagcgggacttttcccctgttccttggagtcagtattttgagtccatggaagatgtagaagtagagaatgaaactggcaaggatacttttcgagtctacaagagtggttcagagggtccagtcctgctccttctgcatggaggaggtcattctgccctttcttgggctgtgttcacggcagcgattattagtagagttcagtgtaggattgtagctttggatctgcgaagtcatggtgaaacaaaggtcaagaatcctgaagatctgtctgcagaaacaatggcaaaagacgttggcaatgtggttgaagccatgtatggggaccttcctcctccaattatgctgattggacatagcatgggtggtgctattgcagtccacacagcatcatccaacctggtaccaagcctcttgggtctgtgcatgattgatgttgtagaaggtacagctatggatgcacttaatagcatgcagaatttcttacggggtcgtcctaaaaccttcaagtctctggagaatgctattgaatggagtgtgaagagtggccagattcgaaatctggagtctgcccgtgtctcaatggttggccaagtcaaacagtgtgaaggaattacaagtccagaaggctcaaaatctatagtggaaggaatcatagaggaagaagaagaagatgaggaaggaagtgagtctataagcaagaggaaaaaggaagatgacatggaggggttgccctcggagactcagaacttgctcttattcctccagaccaagaaagaccatccatacacctggagaattgaactggcaaaaacagaaaaatactgggacggctggttccgaggcttatccaatctctttcttagttgtcccattcctaaattgctgctcttggctggtgttgatagattggataaagatctgaccattggccagatgcaagggaagttccagatgcaggtcctaccccagtgtggccatgcagtccatgaggatgcccctgacaaggtagctgaagctgttgccactttcctgatccggcacaggtttgcagaacccatcggtggattccagtgtgtgtttcctggctgttagtgacctgctgtccacccctcctcaacatcgagctctgttgtaaatacgtcgcaccagaggccactgtgatgccactgtctcctctccatcccgcccagccatgtgacactggctcccggtagacgggcaccccgagatgtaccaaccttttcatgtattctgccaaaagcattgttttccagggcccttgaccaacatcggcttccccagtccagggctcccctgctcctttcccttccctgtactggggtagctcctgcctgctctccctgcgttgcctagggtaaagcctccagatttgccatactgagcccctcttcctagcatcaggcgatacatctgagttcaaatgtcttcccaggctcagggacctccattccttgagattgtcttggcatggcccagccctgcctcatgggatggacaatgcatggggtggtctttatttttccctttcaaataaaacactagtcaggtaccgttttatcccagtcgtactcttccaggtttggaagacccagagaggccaagatcccatccttagccatagcgagcggtggtggtggatagcatcacaagaaacgagcctgaaaatcaggtccagccggtccaagcacatggcctcccatctgggagagcccactgtcccactcccacatgtctgggcacctgccctgggctgaggccaggctgctccaggggcctcctgcgccctcacctgccacagagcaacccaggttaaatacagcccatgcacaaagccacaggccaaagcctatggaattgtttttaatcatcaaatttaaccattttcataactggttcctggaggtgtgcagtgcccccttgcctcttcaaacctacagcttctctttgccatttgtggatttcacatcactccacacagaaacattacagcctggcatccccagtctttgccttcttccagctgcctcgacacagcactgtggcctgtccctattgcccaggcacgccatttccaagggcaggaaggggcagtgtcctgaagcccatcttttctgtgactgtcttaggtgatgtgtagccccctccacctttccactcaacaacctcccacccctgtcctgctgcatggtccggagtctgggacctactttgttttttgttatttatgaccttgtttaaagaaaataaatatctcccaaccttta

SEQ ID NO: 171398 - DNA, 1584 bp, Homo sapiens
  Payload ID: 13707
  Gene Symbol: PPME1
  Gene Name: protein phosphatase methylesterase 1
  ENST ID: ENST00000617237
  CDS Start-End: 1051-1458
gaagaagaagaagatgaggaaggaagtgagtctataagcaagaggaaaaaggaagatgacatggagaccaagaaagaccatccatacacctggagaattgaactggcaaaaacagaaaaatactgggacggctggttccgaggcttatccaatctctttcttagttgtcccattcctaaattgctgctcttggctggtgttgatagattggataaagatctgaccattggccagatgcaagggaagttccagatgcaggtcctaccccagtgtggccatgcagtccatgaggatgcccctgacaaggtagctgaagctgttgccactttcctgatccggcacaggtttgcagaacccatcggtggattccagtgtgtgtttcctggctgttagtgacctgctgtccacccctcctcaacatcgagctctgttgtaaatacgtcgcaccagaggccactgtgatgccactgtctcctctccatcccgcccagccatgtgacactggctcccggtagacgggcaccccgagatgtaccaaccttttcatgtattctgccaaaagcattgttttccagggcccttgaccaacatcggcttccccagtccagggctcccctgctcctttcccttccctgtactggggtagctcctgcctgctctccctgcgttgcctagggtaaagcctccagatttgccatactgagcccctcttcctagcatcaggcgatacatctgagttcaaatgtcttcccaggctcagggacctccattccttgagattgtcttggcatggcccagccctgcctcatgggatggacaatgcatggggtggtctttatttttccctttcaaataaaacactagtcaggtaccgttttatcccagtcgtactcttccaggtttggaagacccagagaggccaagatcccatccttagccatagcgagcggtggtggtggatagcatcacaagaaacgagcctgaaaatcaggtccagccggtccaagcacatggcctcccatctgggagagcccactgtcccactcccacatgtctgggcacctgccctgggctgaggccaggctgctccaggggcctcctgcgccctcacctgccacagagcaacccaggttaaatacagcccatgcacaaagccacaggccaaagcctatggaattgtttttaatcatcaaatttaaccattttcataactggttcctggaggtgtgcagtgcccccttgctcttcaaacctacagcttctctttgccatttgtggatttcacatcactccacacagaaacattacagcctggcatccccagtctttgccttcttccagctgcctcgacacagcactgtggcctgtccctattgcccaggcacgccatttccaagggcaggaaggggcagtgtcctgaagcccatcttttctgtgactgtcttaggtgatgtgtagccccctccacctttccactcaacaacctcccacccctgtcctgctgcatggtccggagtctgggacctactttgttttttgttatttatgaccttgtttaaagaaaataaatatctcccaaccttt

SEQ ID NO: 171399 - DNA, 2687 bp, Homo sapiens
  Payload ID: 13708
  Gene Symbol: PPEF1
  Gene Name: protein phosphatase, EF-hand calcium binding domain 1
  Uniprot ID: O14829
  ENST ID: ENST00000349874
  CDS Start-End: 482-2257
tgaagattacaaatgagactgggaaaccctcttcaataagacctgtgtgatgatagattgtgtcctgagcccgcaggtcaggctgaaagagtcaacaaccagcaaagtgaagatctaggagtctgttccccttgaacctgtgtggacctgatcaaacctcgagggaaaggctgggagaacacatccctggtcagctgtaggaaagccagagagcatttgagaagaggctgaagcttgaattttgcaaacacacaagccctctgcatttccccagagagaaggtttttttctcgtcttcatttcctttgaaacacctggggtgaggaaaaacctctacattggccaagcagaagaaacagaatctatgactgaagaggatcggctaagagtggttcctcgcagcttaaagggaggcacttttcacactctgtcttaaaatcagaagttgaattcatgaacacatatgatttagatagaagtcatgggatgcagcagttcttcaacgaaaaccaggagatctgacacatcactgagagctgcgttgatcatccagaactggtaccgaggttacaaagctcgactgaaggccagacaacactatgccctcaccatcttccagtccatcgaatatgctgatgaacaaggccaaatgcagttatccaccttcttttccttcatgttggaaaactacacacatatacataaggaagagctagaattaagaaatcagtctcttgaaagcgaacaggacatgagggatagatgggattatgtggactcgatagatgtcccagactcctataatggtcctcggctacaatttcctctcacttgtacggatattgatttacttcttgaggccttcaaggaacaacagatacttcatgcccattatgtcttagaggtgctatttgaaaccaagaaagtcctgaagcaaatgccgaatttcactcacatacaaacttctccctccaaagaggtaacaatctgtggtgatttgcatgggaaactggatgatctttttttgatcttctacaagaatggtctcccctcagagaggaacccgtatgtttttaatggtgactttgtagatcgaggaaagaattccatagagatcctaatgatcctgtgtgtgagttttcttgtctaccccaatgacctgcacttgaacagagggaaccacgaagattttatgatgaatctgaggtatggcttcacgaaagaaattttgcataaatataagctacatggaaaaagaatcttacaaatcttggaagaattctatgcctggctcccaatcggtacaatcgttgacaatgaaatcctggtcatccatggtgggatatcagagaccacagacttgaatttactccaccgtgtagagaggaacaagatgaaatctgtgctgataccaccaacggaaacaaacagagaccatgacactgactcgaagcacaataaagtaggtgtgacttttaatgcacatggaagaatcaaaacaaatggatctcctactgaacacttaacagagcatgaatgggaacaggtggtgactatattttctgcttctaattattatgaagaaggcagcaatcgaggagcttacatcaaactatgttctggtacaactcctcgatttttccagtaccaagtaactaaagcaacgtgctttcagcctcttcgccaaagagtggatactatggaaaacagcgccatcaagatattaagagagagagtgatttcacgaaaaagtgaccttactcgtgctttccaacttcaagaccacagaaaatcaggaaaactttctgtgagccagtgggctttttgcatggagaacattttggggctgaacttaccatggagatccctcagttcgaatctggtaaacatagaccaaaatggaaacgttgaatacatgtccagcttccagaatatccgcattgaaaaacctgtacaagaggctcattctactctagttgaaactctgtacagatacagatctgacctggaaatcatatttaatgccattgacactgatcactcaggcctgatctccgtggaagaatttcgtgccatgtggaaactttttagttctcactacaatgttcacattgatgattcccaagtcaataagcttgccaacataatggacttgaacaaagatggaagcattgactttaatgagtttttaaaggctttctatgtagtgcatagatatgaagacttgatgaaacctgatgtcaccaaccttggctaaacacaaatgagagcttccctcaggctccctgaaacagctaggcccaaatcacaagtacagtcctttccaacacccctgaaattcatagtcagtagcagagaaaagcagatcccaattcatcccacaaacagatgcatagtatgggttttggaagtccctagcaagctgttattggtaagattaggttaaatgtcagtaataggatttggtttcagcattagtacctacatattgccagtgagaaactgggttggacctagtggtgttgtcgtgagtgccacctaaccaggaggccagagcggtttgaaaacatcctgaaaggaactcatacagcacaagagaaaactactaagcttgacatctgtgagtgactgagggagacaggaggaataccaggttattcatggaataaagtctttccatctttaaa

SEQ ID NO: 171400 - DNA, 2890 bp, Homo sapiens
  Payload ID: 13708
  Gene Symbol: PPEF1
  Gene Name: protein phosphatase, EF-hand calcium binding domain 1
  Uniprot ID: O14829
  ENST ID: ENST00000361511
  CDS Start-End: 495-2456
agaatctacctcttgaagattacaaatgagactgggaaaccctcttcaataagacctgtgtgatgatagattgtgtcctgagcccgcaggtcaggctgaaagagtcaacaaccagcaaagtgaagatctaggagtctgttccccttgaacctgtgtggacctgatcaaacctcgagggaaaggctgggagaacacatccctggtcagctgtaggaaagccagagagcatttgagaagaggctgaagcttgaattttgcaaacacacaagccctctgcatttccccagagagaaggtttttttctcgtcttcatttcctttgaaacacctggggtgaggaaaaacctctacattggccaagcagaagaaacagaatctatgactgaagaggatcggctaagagtggttcctcgcagcttaaagggaggcacttttcacactctgtcttaaaatcagaagttgaattcatgaacacatatgatttagatagaagtcatgggatgcagcagttcttcaacgaaaaccaggagatctgacacatcactgagagctgcgttgatcatccagaactggtaccgaggttacaaagctcgactgaaggccagacaacactatgccctcaccatcttccagtccatcgaatatgctgatgaacaaggccaaatgcagttatccaccttcttttccttcatgttggaaaactacacacatatacataaggaagagctagaattaagaaatcagtctcttgaaagcgaacaggacatgagggatagatgggattatgtggactcgatagatgtcccagactcctataatggtcctcggctacaatttcctctcacttgtacggatattgatttacttcttgaggccttcaaggaacaacagatacttcatgcccattatgtcttagaggtgctatttgaaaccaagaaagtcctgaagcaaatgccgaatttcactcacatacaaacttctccctccaaagaggtaacaatctgtggtgatttgcatgggaaactggatgatctttttttgatcttctacaagaatggtctcccctcagagaggaacccgtatgtttttaatggtgactttgtagatcgaggaaagaattccatagagatcctaatgatcctgtgtgtgagttttcttgtctaccccaatgacctgcacttgaacagagggaaccacgaagattttatgatgaatctgaggtatggcttcacgaaagaaattttgcataaatataagctacatggaaaaagaatcttacaaatcttggaagaattctatgcctggctcccaatcggtacaatcgttgacaatgaaatcctggtcatccatggtgggatatcagagaccacagacttgaatttactccaccgtgtagagaggaacaagatgaaatctgtgctgataccaccaacggaaacaaacagagaccatgacactgactcgaagcacaataaagtaggtgtgacttttaatgcacatggaagaatcaaaacaaatggatctcctactgaacacttaacagagcatgaatgggaacagattattgatattctgtggagtgatcccagaggcaaaaatggctgttttccaaatacgtgccgaggagggggctgctattttggaccagatgttacttccaagattcttaataaataccagttgaagatgctcatcaggtctcatgaatgtaagcccgaagggtatgaaatctgtcatgatgggaaggtggtgactatattttctgcttctaattattatgaagaaggcagcaatcgaggagcttacatcaaactatgttctggtacaactcctcgatttttccagtaccaagtaactaaagcaacgtgctttcagcctcttcgccaaagagtggatactatggaaaacagcgccatcaagatattaagagagagagtgatttcacgaaaaagtgaccttactcgtgctttccaacttcaagaccacagaaaatcaggaaaactttctgtgagccagtgggctttttgcatggagaacattttggggctgaacttaccatggagatccctcagttcgaatctggtaaacatagaccaaaatggaaacgttgaatacatgtccagcttccagaatatccgcattgaaaaacctgtacaagaggctcattctactctagttgaaactctgtacagatacagatctgacctggaaatcatatttaatgccattgacactgatcactcaggcctgatctccgtggaagaatttcgtgccatgtggaaactttttagttctcactacaatgttcacattgatgattcccaagtcaataagcttgccaacataatggacttgaacaaagatggaagcattgactttaatgagtttttaaaggctttctatgtagtgcatagatatgaagacttgatgaaacctgatgtcaccaaccttggctaaacacaaatgagagcttccctcaggctccctgaaacagctaggcccaaatcacaagtacagtcctttccaacacccctgaaattcatagtcagtagcagagaaaagcagatcccaattcatcccacaaacagatgcatagtatgggttttggaagtccctagcaagctgttattggtaagattaggttaaatgtcagtaataggatttggtttcagcattagtacctacatattgccagtgagaaactgggttggacctagtggtgttgtcgtgagtgccacctaaccaggaggccagagcggtttgaaaacatcctgaaaggaactcatacagcacaagagaaaactactaagcttgacatctgtgagtgactgagggagacaggaggaataccaggttattcatggaataaagtctttccatctttaaactgt

SEQ ID NO: 171401 - DNA, 765 bp, Homo sapiens
  Payload ID: 13708
  Gene Symbol: PPEF1
  Gene Name: protein phosphatase, EF-hand calcium binding domain 1
  ENST ID: ENST00000496075
  CDS Start-End: 230-765
gaatctatgactgaagaggatcggctaagagtggttcctcgcagcttaaagggaggcacttttcacactctgtcttaaaatcagaagttgaattcatgaacacatatgatttagatagaagtcatgggatgcagcagttcttcaacgaaaaccaggagatctgacacatatacttcatgcccattatgtcttagaggtgctatttgaaaccaagaaagtcctgaagcaaatgccgaatttcactcacatacaaacttctccctccaaagaggtaacaatctgtggtgatttgcatgggaaactggatgatctttttttgatcttctacaagaatggtctcccctcagagaggaacccgtatgtttttaatggtgactttgtagatcgaggaaagaattccatagagatcctaatgatcctgtgtgtgagttttcttgtctaccccaatgacctgcacttgaacagagggaaccacgaagattttatgatgaatctgaggtatggcttcacgaaagaaattttgcataaatataagctacatggaaaaagaatcttacaaatcttggaagaattctatgcctggctcccaatcggtacaatcgttgacaatgaaatcctggtcatccatggtgggatatcagagaccacagacttgaatttactccaccgtgtagagaggaacaagatgaaatctgtgctgataccaccaacggaaacaaacagagaccatgacactgactcgaagcacaataaagtaggtgtgac

SEQ ID NO: 171402 - DNA, 408 bp, Homo sapiens
  Payload ID: 13708
  Gene Symbol: PPEF1
  Gene Name: protein phosphatase, EF-hand calcium binding domain 1
  ENST ID: ENST00000470157
  CDS Start-End: 1-348
gaaaaagtgaccttactcgtgctttccaacttcaagaccacagaaaatcaggctcattctactctagttgaaactctgtacagatacagatctgacctggaaatcatatttaatgccattgacactgatcactcaggcctgatctccgtggaagaatttcgtgccatgtggaaactttttagttctcactacaatgttcacattgatgattcccaagtcaataagcttgccaacataatggacttgaacaaagatggaagcattgactttaatgagtttttaaaggctttctatgtagtgcatagatatgaagacttgatgaaacctgatgtcaccaaccttggctaaacacaaatgagagcttccctcaggctccctgaaacagctaggcccaaatcacaagtacag

SEQ ID NO: 171403 - DNA, 557 bp, Homo sapiens
  Payload ID: 13708
  Gene Symbol: PPEF1
  Gene Name: protein phosphatase, EF-hand calcium binding domain 1
  ENST ID: ENST00000472826
  CDS Start-End: 270-557
attagaatctatgactgaagaggatcggctaagagtggttcctcgcagcttaaagggaggcacttttcacactctgtcttaaaatcagaagttgaattcatgaacacatatgatttagatagaagtcatgggatgcagcagttcttcaacgaaaaccaggagatctgacacatttatccaccttcttttccttcatgttggaaaactacacacatatacataaggaagagctagaattaagaaatcagtctcttgaaagcgaacaggacatgagggatagatgggattatgtggactcgatagatgtcccagactcctataatggtcctcggctacaatttcctctcacttgtacggatattgatttacttcttgaggccttcaaggaacaacagatacttcatgcccattatgtcttagaggtgctatttgaaaccaagaaagtcctgaagcaaatgccgaatttcactcacatacaaacttctccctccaaagaggtaacaatctgtggtgatttgcatgggaaactggatgatctttttttgatcttctacaag

SEQ ID NO: 171404 - DNA, 3414 bp, Homo sapiens
  Payload ID: 13709
  Gene Symbol: PPEF2
  Gene Name: protein phosphatase, EF-hand calcium binding domain 2
  Uniprot ID: O14830
  ENST ID: ENST00000286719
  CDS Start-End: 358-2619
gggggcctgatctgactgacgtcagggggtgcctactccttcgaggcaagaagcctgaactttccttcctgtcactgtgaatacttggccagggctgtgaatgtcaccattgcttttcaggaagaagacatggcagactagggctgcaccttctttatgggctctgtaggtctgaaagaaatcagatcagcctgggatccctcagccaactctgaagacaggatggggatcacgcctgcatgttaaagagatttctgccttgttgtgtctcatggtaaataaaaaacccagcaaagaagcaaacagctcactgtcctctggatctgctgcgtcctgcaggagcattgcgcttaaactatgggaagcggcacctccacccaacatcattttgctttccagaatgcagagagagccttcaaggcagcagccctgatccagagatggtaccggcgctacgtggcccgcctggagatgaggcggcgttgcacctggagcatcttccagtctatagaatatgctgggcagcaagaccaagtcaagctccatgacttcttcagctatctcatggatcacttcatccccagcagccacaacgacagggacttcctgacccgcatattcactgaggacagattcgcccaggactccgagatgaagaaatgcagtgactatgaatccatagaggtacccgacagttacacggggccacgcctctccttcccactcctgcctgaccatgcaactgccctggtagaagcattcagactgaaacaacagctccatgctcgctacgtcttgaaccttttgtatgaaaccaagaaacatctggtacagctgccaaacatcaaccgggtctcaacctgttacagtgaggagatcacagtgtgtggagacttacatggccaattggatgacttaatctttatattttataagaatggcctcccgtcgccagaacggtcatatgtgttcaacggtgactttgtggatcgaggcaaggattcagtagagatcctgatgattctttttgccttcatgctggtttaccccaaagagttccatcttaacagaggaaaccatgaggaccatatggtgaacttacgatatggcttcaccaaggaagtgatgaataaatacaaggtacacgggaaggaaatactaagaaccctgcaagatgttttctgttggcttccactggccactctgatagatgagaaagttctaattcttcatggtggggtgtcagacataactgatctggagcttttggacaaaatagagaggagcaagatagtttccaccatgaggtgcaaaacgagacagaagagtgagaagcagatggaggagaagagaagagccaaccagaagagctctgcacagggacccatcccatggtttctccccgaaagccgctctcttccctcttcgccccttcggcttggctcctacaaggcccagaaaaccagcaggtcctccagcatcccctgcagcggttccctggacgggcgggagctctcccggcaggtgcggagctccgtggaactggagctagagcggtgccggcagcaagcaggcctcctggtgaccggagagaaagaggagccctcccgctcagcctcagaagcagactctgaagccggagagctgcggaagcccactcaggaggagtggaggcaggttgtagatatcctgtggagtgatcccatggctcaagagggctgcaaggccaacactattcgaggaggaggctgttattttgggcctgatgtgacacaacagttgctacaaaaatacaacatgcaattcctgatccgttcacatgaatgcaaacctgaaggctatgaattctgtcacaaccgcaaggtattaacaatcttttctgcctccaactactatgaagttggcagcaacagaggggcctatgtcaaactggggccagccctgaccccacatattgtgcagtatcaagctaacaaggtgacccacacactcaccatgaggcaaaggattagcagagtggaggagtcggctctgagagctctgagggagaagctgtttgctcattcttcagatcttctcagtgaatttaagaagcatgatgcagataaagtcggtttaatcaccttgagtgactgggcagcagcggtggagtctgtgttgcacctaggactgccatggcggatgctgaggccacagctggtgaacagctcagcagacaacatgctggagtacaagtcttggctgaagaacttggccaaggaacaactgagtcgcgagaacatacaatcaagtttgctggaaacattgtatcgaaaccgatccaacctagagaccatttttaggatcatagacagtgatcattcagggttcatctcactggacgagttcaggcagacctggaagctgttcagctctcacatgaatatcgacattacagatgactgcatctgtgaccttgctcggagcattgatttcaacaaagatggccacattgatatcaatgagttcctggaggccttccgccttgtggagaaatcctgcccagagggcgatgcctcagaatgcccacaagctacaaatgctaaagacagtggctgcagcagtccaggtgcacactaagaacagcctggtcttcatcacccaaagtgcctcataggcaatgctcagcttctcactagactatctcccttattctccatgtgaaactttatgctgaaaatttacctatccatatgcatcagaatcacctgtgtatttcagtgtggaggggtgggttggggtgttgtgtatgtatgtgttttaagtatatgagtgccccaaccccacctcacaatcttcacaaagtagaacttaggtatagtgttttcaaattctaaagtccacttcagttaagaaccactgacaatgtaactctctcattgttttcattttatacgtttttttgagatggagtttctctcttgttgcccaggctggagtgcattggcgcgatctcggctcaccgcaaagtccgcctcccaggcgattctcctgcctcagcctcctgagtagctgggattacaggcatgcaccaccacaccaggctaattttgtatttttagtagacacagggtttctccatgttggtcaggctggtcttgaactcccaacctcaggtgatccaccctcctcagcctcccaaagtgctgggattacaggcatgagccaccgcacccagcctattttatactttttatttattgtctttaacaatgtctattggtaaaggaaagttatttttaaaaattgtattgtaattccatgacccaagcatatggattttcttcattatttactttttcttacttgttactgtagtgtttatataattttatgttctacttttaaaaaaataaattaatatctaattgtaaa

SEQ ID NO: 171405 - DNA, 4163 bp, Homo sapiens
  Payload ID: 13709
  Gene Symbol: PPEF2
  Gene Name: protein phosphatase, EF-hand calcium binding domain 2
  ENST ID: ENST00000511880
  CDS Start-End: 274-693
accattgcttttcaggaagaagacatggcagactagggctgcaccttctttatgggctctgtaggtctgaaagaaatcagatcagcctgggatccctcagccaactctgaagacaggatggggatcacgcctgcatgttaaagagatttctgccttgttgtgtctcatggtaaataaaaaacccagcaaagaagattctctcttcattttgtcagcaaacagctcactgtcctctggatctgctgcgtcctgcaggagcattgcgcttaaactatgggaagcggcacctccacccaacatcattttgctttccagaatgcagagagagccttcaaggcagcagccctgatccagagatggtaccggcgctacgtggcccgcctggagatgaggcggcgttgcacctggagcatcttccagtctatagaatatgctgggcagcaagaccaagtcaagctccatgacttcttcagctatctcatggatcacttcatccccagcagccacaacgacagggacttcctgacccgcatattcactgaggacagattcgcccaggactccgagatgaagaaatgcagtgactatgaatccatagaggtacccgacagttacacggggccacgcctctccttcccactcctgcctgaccatgcaactgccctggtagaagcattcagactgaaacaatagcagctccatgctcgctacgtcttgaaccttttgtatgaaaccaagaaacatctggtacagctgccaaacatcaaccgggtctcaacctgttacagtgaggagatcacagtgtgtggagacttacatggccaattggatgacttaatctttatattttataagaatggcctcccgtcgccagaacggtcatatgtgttcaacggtgactttgtggatcgaggcaaggattcagtagagatcctgatgattctttttgccttcatgctggtttaccccaaagagttccatcttaacagaggaaaccatgaggaccatatggtgaacttacgatatggcttcaccaaggaagtgatgaataaatacaaggtacacgggaaggaaatactaagaaccctgcaagatgttttctgttggcttccactggccactctgatagatgagaaagttctaattcttcatggtggggtgtcagacataactgatctggagcttttggacaaaatagagaggagcaaggaaatgctgctacaacatccatgacaacattttcctgggaagttccaaagacagggaacaatcagtctacttcagctttgggcaattctaatggatatggatatgaaagtctatgtatatgagacatacatgaaatgaaagaatacggctttagagtgagacagacctgggtttgaaccctggaataggcaattgttggctgaaatggcagtttggttctatgaagttgtccagagacccaggtttcttgttactctgccacccctaatgtgtggtttctagacttagctaccatttagcaagtaaggatatgactccttgtggtttggtaactagaaattgctgtgtccctgtacacccaaactcagtgttttcacttacacatctgttatatctttttttgtttgtttgtttttgagacaaggtctcactctgtcatccagactggagtgtggtaccacgatcacggctcactgcagccttgacctcctgggctgaggcaatcctccagcctcagcctcccgagtagctgggactacagtcacacacaatcatgcttggctaatttttaaaaaattatttgtagagggccgggtgtgatggctcacacctgtaatcccagcactctgagagtcggaggccagcggatcatgagatagtttccaccatgaggtgcaaaacgagacagaagagtgagaagcagatggaggagaagagaagagccaaccagaagagctctgcacagggacccatcccatggtttctccccgaaagccgctctcttccctcttcgccccttcggcttggctcctacaaggcccagaaaaccagcaggtcctccagcatcccctgcagcggttccctggacgggcgggagctctcccggcaggtgcggagctccgtggaactggagctagagcggtgccggcagcaagcaggcctcctggtgaccggagagaaagaggagccctcccgctcagcctcagaagcagactctgaagccggagagctgcggaagcccactcaggaggagtggaggcaggttgtagatatcctgtggagtgatcccatggctcaagagggctgcaaggccaacactattcgaggaggaggctgttattttgggcctgatgtgacacaacagttgctacaaaaatacaacatgcaattcctgatccgttcacatgaatgcaaacctgaaggctatgaattctgtcacaaccgcaaggtattaacaatcttttctgcctccaactactatgaagttggcagcaacagaggggcctatgtcaaactggggccagccctgaccccacatattgtgcagtatcaagctaacaaggtgacccacacactcaccatgaggcaaaggattagcagagtggaggagtcggctctgagagctctgagggagaagctgtttgctcattcttcagatcttctcagtgaatttaagaagcatgatgcagataaagtcggcctagcttccagccaactctgctactatcaacaaaaatagtgacagtgcccattatttctattacctgcagatagtaagaaggatgtcaggataaaaatatacacaccattgggcaggaaactagacttctaggtgacaaggcaacaggttagctctcacctgtaggtttaatcaccttgagtgactgggcagcagcggtggagtctgtgttgcacctaggactgccatggcggatgctgaggccacagctggtgaacagctcagcagacaacatgctggagtacaagtcttggctgaagaacttggccaaggaacaactgagtcgcgagaacatacaatcaagtttgctggaaacattgtatcgaaaccgatccaacctagagaccatttttaggatcatagacagtgatcattcagggttcatctcactggacgagttcaggcagacctggaagctgttcagctctcacatgaatatcgacattacagatgactgcatctgtgaccttgctcggagcattgatttcaacaaagatggccacattgatatcaatgagttcctggaggccttccgccttgtggagaaatcctgcccagagggcgatgcctcagaatgcccacaagctacaaatgctaaagacagtggctgcagcagtccaggtgcacactaagaacagcctggtcttcatcacccaaagtgcctcataggcaatgctcagcttctcactagactatctcccttattctccatgtgaaactttatgctgaaaatttacctatccatatgcatcagaatcacctgtgtatttcagtgtggaggggtgggttggggtgttgtgtatgtatgtgttttaagtatatgagtgccccaaccccacctcacaatcttcacaaagtagaacttaggtatagtgttttcaaattctaaagtccacttcagttaagaaccactgacaatgtaactctctcattgttttcattttatacgtttttttgagatggagtttctctcttgttgcccaggctggagtgcattggcgcgatctcggctcaccgcaaagtccgcctcccaggcgattctcctgcctcagcctcctgagtagctgggattacaggcatgcaccaccacaccaggctaattttgtatttttagtagacacagggtttctccatgttggtcaggctggtcttgaactcccaacctcaggtgatccaccctcctcagcctcccaaagtgctgggattacaggcatgagccaccgcacccagcctattttatactttttatttattgtctttaacaatgtctattggtaaaggaaagttatttttaaaaattgtattgtaattccatgacccaagcatatggattttcttcattatttactttttcttacttgttactgtagtgtttatataattttatgttctacttttaaaaaaataaattaatatctaattgtaaaccctttcc

SEQ ID NO: 171406 - DNA, 1797 bp, Homo sapiens
  Payload ID: 13709
  Gene Symbol: PPEF2
  Gene Name: protein phosphatase, EF-hand calcium binding domain 2
  Uniprot ID: O14830
  ENST ID: ENST00000621010
  CDS Start-End: 1-1797
atgggaagcggcacctccacccaacatcattttgctttccagaatgcagagagagccttcaaggcagcagccctgatccagagatggtaccggcgctacgtggcccgcctggagatgaggcggcgttgcacctggagcatcttccagtctatagaatatgctgggcagcaagaccaagtcaagctccatgacttcttcagctatctcatggatcacttcatccccagcagccacaacgacagggacttcctgacccgcatattcactgaggacagattcgcccaggactccgagatgaagaaatgcagtgactatgaatccatagaggtacccgacagttacacggggccacgcctctccttcccactcctgcctgaccatgcaactgccctggtagaagcattcagactgaaacaacagctccatgctcgctacgtcttgaaccttttgtatgaaaccaagaaacatctggtacagctgccaaacatcaaccgggtctcaacctgttacagtgaggagatcacagtgtgtggagacttacatggccaattggatgacttaatctttatattttataagaatggcctcccgtcgccagaacggtcatatgtgttcaacggtgactttgtggatcgaggcaaggattcagtagagatcctgatgattctttttgccttcatgctggtttaccccaaagagttccatcttaacagaggaaaccatgaggaccatatggtgaacttacgatatggcttcaccaaggaagtgatgaataaatacaaggtacacgggaaggaaatactaagaaccctgcaagatgttttctgttggcttccactggccactctgatagatgagaaagttctaattcttcatggtggggtgtcagacataactgatctggagcttttggacaaaatagagaggagcaagatagtttccaccatgaggtgcaaaacgagacagaagagtgagaagcagatggaggagaagagaagagccaaccagaagagctctgcacagggacccatcccatggtttctccccgaaagccgctctcttccctcttcgccccttcggcttggctcctacaaggcccagaaaaccagcaggtcctccagcatcccctgcagcggttccctggacgggcgggagctctcccggcaggtgcggagctccgtggaactggagctagagcggtgccggcagcaagcaggcctcctggtgaccggagagaaagaggagccctcccgctcagcctcagaagcagactctgaagccggagagctgcggaagcccactcaggaggagtggaggcaggttgtagatatcctgtggagtgatcccatggctcaagagggctgcaaggccaacactattcgaggaggaggctgttattttgggcctgatgtgacacaacagttgctacaaaaatacaacatgcaattcctgatccgttcacatgaatgcaaacctgaaggctatgaattctgtcacaaccgcaaggtattaacaatcttttctgcctccaactactatgaagttggcagcaacagaggggcctatgtcaaactggggccagccctgaccccacatattgtgcagtatcaagctaacaaggtgacccacacactcaccatgaggcaaaggattagcagagtggaggagtcggctctgagagctctgagggagaagctgtttgctcattcttcagatcttctcagtgaatttaagaagcatgatgcagataaagtcggcctagcttccagccaactctgctactatcaacaaaaatag

SEQ ID NO: 171407 - DNA, 4125 bp, Homo sapiens
  Payload ID: 13710
  Gene Symbol: PPM1A
  Gene Name: protein phosphatase, Mg2+/Mn2+ dependent, 1A
  Uniprot ID: P35813
  ENST ID: ENST00000325658
  CDS Start-End: 360-1334
ctctgcctccctctccaacgcccggatgatctgagccgcgagggcgccgacagccgggggcccggacgcagcccggctcctcccctcctccgccccttccccagcctgacctggcccgccgctgcagcggtgacccctcccccggctgccgccgtcgccgccgcggtgaccccctccccggctgccgccgccgccgcctcggccgaccagggacctgcccgcctgcggctgctccggattttaaataaacttggagccttttcttgaaagacagctggctgtggagagccttctaccaactgcagttttagatacgttttgaaaatttcatcacctgagacctagaggatcaagacataatgggagcatttttagacaagccaaagatggaaaagcataatgcccaggggcagggtaatgggttgcgatatgggctaagcagcatgcaaggctggcgtgttgaaatggaggatgcacatacggctgtgatcggtttgccaagtggacttgaatcgtggtcattctttgctgtgtatgatgggcatgctggttctcaggttgccaaatactgctgtgagcatttgttagatcacatcaccaataaccaggattttaaagggtctgcaggagcaccttctgtggaaaatgtaaagaatggaatcagaacaggttttctggagattgatgaacacatgagagttatgtcagagaagaaacatggtgcagatagaagtgggtcaacagctgtaggtgtcttaatttctccccaacatacttatttcattaactgtggagactcaagaggtttactttgtaggaacaggaaagttcatttcttcacacaagatcacaaaccaagtaatccgctggagaaagaacgaattcagaatgcaggtggctctgtaatgattcagcgtgtgaatggctctctggctgtatcgagggcccttggggattttgattacaaatgtgtccatggaaaaggtcctactgagcagcttgtctcaccagagcctgaagtccatgatattgaaagatctgaagaagatgatcagttcattatccttgcatgtgatggtatctgggatgttatgggaaatgaagagctctgtgattttgtaagatccagacttgaagtcactgatgaccttgagaaagtttgcaatgaagtagtcgacacctgtttgtataagggaagtcgagacaacatgagtgtgattttgatctgttttccaaatgcacccaaagtatcgccagaagcagtgaagaaggaggcagagttggacaagtacctggaatgcagagtagaaggtggatcatttaacaaaaaataagtagctttattaaagaaaaatcttcaacacaatcaaactttaacattttagcttttagatttttatgtgtctttgacagctagtgtctagtgtatgaaagtggaaaaggacatttctgtagtagctgttaagatgtatgcagttgtcctatcacagttatattagaaataacaactagtgtggaaagtaacccacattctgttcaggatacttttgttttaaaaggctaaaatgtttgtgtgctttaaaattcttaatgaattcactggcatgagtaattttatgccgggaaaatctgatttgtggtctatttaattacaaagagattgtgatggtgataatttgaataccatctttctatgaaaagctgtgtatattaattttaatctctagggccttttttcaataacttgaaaatcacagcctcatcattagcaactttatatacacagctttaaaaaatttgctttaaactgtttcagagcttcttccctaagccataaactgtctcacctaaacaagatagacctcaataaaagacataatatttctccacctggcagaaaagtaactgccaagtaagattaagaaataagttgagcatttctggagtatatttctcataattctgcagagacttccagtttattgcatatatgcagtaaagtgtatatattatgcagtttctctaagtggaaaaacttgacatgactttaatagtgttaaaacatgaaaatgctggtgagctgaggtagaaaaaaaacaagaaaaaaattttaaaaatagcgttaaaatgcattttaggctcctaatgtcgttaatttgcacgttaaagacctctaatcgcatgcaagcattgacctaccacacctacatcccactgtgcctgcattattgaaattactactcactttaattttttttcccctttttactgtttgataccaatcataatcagtctgatactagaatcatgattggttttgttctttagtactgtctagagctactattttgtttttattgctgtccgccacttgatagtcatacatctagtatgtgtttgtactatttagtattgcattcattggacgtactattcaacgaatttgtctccttactgttaccaagggtcttggaatttttatattttaaattaatcattcaatataagttatttataggtatagtacaattttaaaatatttagaatgctacaatcattggttcaaactattgattcatgggaaaatttaaattcataagaataatatgtatagggataagttgatatttaatgtattggcactttaacttgggcagacatgttttcttattggtttaaagaagtaataagtattttaatatttttactatgaaatgggatccaattttagaaatgaattgctacttttctctttagtgtgtacactttaagttttagatggaattatgaaatattcactttacgttattttgttacaataataagttttatatttcttattatcaagcaagagttgccacctggacagagtttacattgatactcaatatttttgatatgttaaagtgttattatacttgtaccattcaattggagattgtcataaattaaatatggtattttttactcagatttgatgagactgcaactagagaataaatattacattaaaattgctgctattttaaaacatagaatgtaactgtttgtattgtaaaagttgtgtgtcctcagtgaaaaatactgccttcagcttccaaagcaggcacctgaatgcctttttcttttctctctctcttctttctttaaatacatgccttcactagattgctgtgacctactaaacctcattttatttgcttggaacatttttggcttctctgtccacaccatagaaaaggacaaaggccttccagctctccttttctcttatttgttcccttctaaatacttgactctctgggggtgtgaaaagattcagctcataatttatactactattaattttgtggtccttctaagccaatttaaaattatacttttgtgtatatattttcaaaatctttgctactgactaccttagctttaaagttgctaatttggagatgactgatagaatccctgaaacttggtggaggggagtggaaaggagcagaatgtgtttgtgtatatgtatgtgaaacatggatcttctatatataaatattctttagaaaaagcgttcagtctttttacaattctaagtaaaacgtataggtcaacagaaattaaaggaatatttcttaaaattcatttatttttcttttttgaaagcagacagaagcaaggctagtatagtatgaatggtcaggtagtttaaatgcgttgtcccacgtggaacaggagatattaactgtttttaaagctttacattatttttttacaagaatttgttttcctgtaattttcttcacagttaaaatatcctaatttatattttaacaaaagagatgtaagatacatcaaatatagatgattcaaggtaatgttttttagacctgaaactattgattcaatttatcatcagtgtttatttctattgtatctagttatctatccaaataattgtattggcttagcggagactgtatgttaagtgtattagttttagattgtgaaattgtgcagtttaggtaaacatcaaatccctttatttttgtacagcagatttccagcattagaaccatgtagaacaaatatactagatgttaaagattacacaataaaggaacttggcaaaccaaa

SEQ ID NO: 171408 - DNA, 1713 bp, Homo sapiens
  Payload ID: 13710
  Gene Symbol: PPM1A
  Gene Name: protein phosphatase, Mg2+/Mn2+ dependent, 1A
  Uniprot ID: P35813
  ENST ID: ENST00000325642
  CDS Start-End: 97-1464
aatgtattatgatgtaggggagggaggaaggagggccagggtagggggcacaccctctccctgaatgaaattcatttaggggcactgtctgctcgcatgttctgttctgggagaaaatgggtagcagaagctacaatttgtactaagctaatgaaaagagagaaaagaagaatggggaagagaagggcaaagaaggcaaaaagagaagagaagaaaaagggaggagagagaaggagaaatgagaaaagaggaaaccaaatgaagaggatgtgtgagagaaaaaaatatgaaacagacctagaggatcaagacataatgggagcatttttagacaagccaaagatggaaaagcataatgcccaggggcagggtaatgggttgcgatatgggctaagcagcatgcaaggctggcgtgttgaaatggaggatgcacatacggctgtgatcggtttgccaagtggacttgaatcgtggtcattctttgctgtgtatgatgggcatgctggttctcaggttgccaaatactgctgtgagcatttgttagatcacatcaccaataaccaggattttaaagggtctgcaggagcaccttctgtggaaaatgtaaagaatggaatcagaacaggttttctggagattgatgaacacatgagagttatgtcagagaagaaacatggtgcagatagaagtgggtcaacagctgtaggtgtcttaatttctccccaacatacttatttcattaactgtggagactcaagaggtttactttgtaggaacaggaaagttcatttcttcacacaagatcacaaaccaagtaatccgctggagaaagaacgaattcagaatgcaggtggctctgtaatgattcagcgtgtgaatggctctctggctgtatcgagggcccttggggattttgattacaaatgtgtccatggaaaaggtcctactgagcagcttgtctcaccagagcctgaagtccatgatattgaaagatctgaagaagatgatcagttcattatccttgcatgtgatggtatctgggatgttatgggaaatgaagagctctgtgattttgtaagatccagacttgaagtcactgatgaccttgagaaagtttgcaatgaagtagtcgacacctgtttgtataagggaagtcgagacaacatgagtgtgattttgatctgttttccaaatgcacccaaagtatcgccagaagcagtgaagaaggaggcagagttggacaagtacctggaatgcagagtagaagaaatcataaagaagcagggggaaggcgtccccgacttagtccatgtgatgcgcacattagcgagtgagaacatccccagcctcccaccagggggtgaattggcaagcaagaggaatgttattgaagccgtttacaatagactgaatccttacaaaaatgacgacactgactctacatcaacagatgatatgtggtaaaactgctcatctagccatggagtttaccttcacctccaaaggagagtacagctcaactttgttgaaacttttaacatccatcctcaactttaaggaaggggatatgacatgggtgagaatgattacatcagagaacttcagcagtacaacagctagcccagaactgatttttttttttttttttgtaaatttgagacttatgtaagcgtgatttcaaaccataattcgtgttgtaaatcagactccagc

SEQ ID NO: 171409 - DNA, 8184 bp, Homo sapiens
  Payload ID: 13710
  Gene Symbol: PPM1A
  Gene Name: protein phosphatase, Mg2+/Mn2+ dependent, 1A
  Uniprot ID: P35813
  ENST ID: ENST00000395076
  CDS Start-End: 431-1579
cgggagctagagagcagtggtctcggcgctcgtccggcccgcagcttcgggtcctcaggcggctgttgctccggaacgggtggttggggaggggggggtggggggactctagacagctgaggcgcgaaagcgatgagtcctcggctcttcctcctccttctccgggacccgctctctgcctccctctccaacgcccggatgatctgagccgcgagggcgccgacagccgggggcccggacgcagcccggctcctcccctcctccgccccttccccagcctgacctggcccgccgctgcagcggtgacccctcccccggctgccgccgtcgccgccgcggtgaccccctccccggctgccgccgccgccgcctcggccgaccagggacctgcccgcctgcggctgctccggacctagaggatcaagacataatgggagcatttttagacaagccaaagatggaaaagcataatgcccaggggcagggtaatgggttgcgatatgggctaagcagcatgcaaggctggcgtgttgaaatggaggatgcacatacggctgtgatcggtttgccaagtggacttgaatcgtggtcattctttgctgtgtatgatgggcatgctggttctcaggttgccaaatactgctgtgagcatttgttagatcacatcaccaataaccaggattttaaagggtctgcaggagcaccttctgtggaaaatgtaaagaatggaatcagaacaggttttctggagattgatgaacacatgagagttatgtcagagaagaaacatggtgcagatagaagtgggtcaacagctgtaggtgtcttaatttctccccaacatacttatttcattaactgtggagactcaagaggtttactttgtaggaacaggaaagttcatttcttcacacaagatcacaaaccaagtaatccgctggagaaagaacgaattcagaatgcaggtggctctgtaatgattcagcgtgtgaatggctctctggctgtatcgagggcccttggggattttgattacaaatgtgtccatggaaaaggtcctactgagcagcttgtctcaccagagcctgaagtccatgatattgaaagatctgaagaagatgatcagttcattatccttgcatgtgatggtatctgggatgttatgggaaatgaagagctctgtgattttgtaagatccagacttgaagtcactgatgaccttgagaaagtttgcaatgaagtagtcgacacctgtttgtataagggaagtcgagacaacatgagtgtgattttgatctgttttccaaatgcacccaaagtatcgccagaagcagtgaagaaggaggcagagttggacaagtacctggaatgcagagtagaagaaatcataaagaagcagggggaaggcgtccccgacttagtccatgtgatgcgcacattagcgagtgagaacatccccagcctcccaccagggggtgaattggcaagcaagaggaatgttattgaagccgtttacaatagactgaatccttacaaaaatgacgacactgactctacatcaacagatgatatgtggtaaaactgctcatctagccatggagtttaccttcacctccaaaggagagtacagctcaactttgttgaaacttttaacatccatcctcaactttaaggaaggggatatgacatgggtgagaatgattacatcagagaacttcagcagtacaacagctagcccagaactgatttttttttttttttttgtaaatttgagacttatgtaagcgtgatttcaaaccataattcgtgttgtaaatcagactccagcaatttttgttgtatgattttgtttttttgtaaagtgtaattgtccttgtacaaaatgctcatatttaattatgaactgctttaaatcactatcaaagttacaagaaatgtttggcttattgtgtgatgcaacagatatatagccctttcaagtcatgttgtgtttggacttggggttggaacagggagagcagcagccatgtcagctacacgctcaaatgtgcagatgattatggaaaataacctcaaaatcttacaaagctgaacatccaaggagttattgaaaactatcttaaatgttcttggtaggggagttggcattgttgataaagccagtcccttcatttaactgtctttcaggatgttccttcgttgtttccatgagtattgcaggtaataatacagtgtattcataagaatctcaatcttggggctaaatgccttgtttctttgcacctcttttcaagtccttacatttaattactaattgataagcagcagcttcctacatatagtaggaaactgccacatttttgctatcatgattggctgggcctgctgctgttcctagtaagatattctgaattccattttatcaataaagcttgatttaacaaacaagaaacttaatcatgtatgtgtaattcctcttttaccctggccttttaaaacactgtgccgttgtaatgagacgtttctcatagggaaagatgttagtctcttttaattggacaacactgtcactcaaggcatagatgaaactttccttccattagaaagactaaaagatttaattcttggttgtaccttaatctattttttaaataggtttctttcaggctgcttatttttcattaagatgtgtatcagcttggatttgcctactgtttaattaaaatatttattgtcaaagtttgacaatctaacactctatggtaggggtgtgtgtgtgtgtgtttgtgagtgtgtgtttgcctgtgatttttaattggcccatgtctttagaatccaagtggttaagatgtatttgtgatttgaaatatagcatgttgataatatttagctgttggcctttacaaataactttcaaagcttaaggaattgtagatataaaaataacctaatttaatttaggcttaaattcctctgattaagcatgtgaaagtaagttttaaaatctgtcgcattgaaaagattactgttccgtgcccttctgtatttttgtctctttaggttgaatattgtatttatcaccatgtaatcattcagtaggcagattcccactagaaaactgttgaaatgtaagactaaaatacaacattgaatacaaaatcaaaattttgtgtataaaaaccagtatagtccattttgttatatttgttttttccctaacttggaaatatacatatttgtatatatagccttaaaattaatgtaaagttaggggagtagtggggaaagtaatgtgaaatgtctcagatttaagtagttaaataccagcaaaatcttttcattatccctcttattttgtgaggtgattaaatgtaacttaattgtatttaatttatatcttattccagcatgaatgaggaaaaactgaagtactatttatatttagaaattcatatcagttgaaattacagaaccaattccatacttacaataaatacttaatgtctaaatctgtggtagagtgcgaagtatgataatgttctaagttatggctttgcaagcatctaaatgtgcatttaatgaataccagtgcttctagtatagactaattaccagacatactggtactgaaagctaaatccctattataacaaaccagttccttaatattttaagtagactgacaactttagttccagaaattgcaaaactttgaactggactgtgtaatcttttgagatgcaaaacttaagtcacaagtagagtatgtgatggaaagctgtatttcaaaccataacagcatatttagagccttttttttttgagtctttaaacaagagaaaattaaaatattcctgtcaaaattattagtattgaaattaggcttggacacgagagagaaccgtatttgagtgatgtgagaagactaaatcttttccacatgagtcagcactgccatactaataatttttttactataaaaatacaggaaggaagtatacattataacagcagactgtgtgtgttcctgattcctggaggtaatagtggggggaaaccaaccatactttttaaaggcacttttgcacctctattgtgcacttcattcttgtaccacttaaattcttcacccccatcccctttttttgtgctaattagcatctcagggcaatgcctcaaaaatgtttgatgtgttctgttctttggagggaaaaagttcttatgtgatgataatatagtactcaaaatatacttttatcatttaaatgtcttatttgctgctatgaataggaaataacattttgtatagcaggctctgttttaccctaacattaaaaaatttcactgatctttctttcattaacagggtagaatctcctaatttccactttcttgggaatatacttttatagacaatagaagcagttctcaatattagcatatactttaaaaaatcaaagtgataacttaattcagctttggaagtatctcaaacatatttttactttatagtgcattaacttgcttctagagtacttaatgcaactgctctagccacttaattttttatactaatctcaacattaagaaatttggattaagtaataaattagttatgtaattcaagtaatctgaattacagcagtacttttagtgatcattcataggactatatattaacccagctaataactcagtttttttacaaaatgtttcgagtattattggtaaaacactgttctaggctaagcacattgggactgtaaagaaatgagtagatccttggcttcaagtttacatctggacaatttataatctagtgtatgttagtattataactggatcactcatcaaaaaatatatatatatatctattgcccacctgctatctaccaggtacttagctgatcaaggcaggcccctgccctaaagaccttgtttatacttcctttactcacctgaaaactgttctccagtttattttcttctctctaaagttaaagagtaattcagaagaaaattttgcttagcataagaataaaattggactgaagaggcttaagcccattcagtatccttgattgcatttatccaacggcctttattcttcctgctgacagcagtaactcagaggaataggtagtagatttctgaaaattatccagccatggaaatgtaggtggggtttgagtttaaggcatttaaaaatgtaaatatctctagctaaatttatcttaagtagaactctgtgtttttgtaacacactgccagtgttaatatcaaattttagccaaattattactatgtgttttaatattttaaaataatttcactgcccatctttactggacaaactcatttggagttcaacttgtgatttctgaaagaactgatgaaattgggtactgctttttttctccatttttcgttttgttttaattttgaatttcatggtatatacttttagttcaaactcagctgtttgtacagtattgtattaggatttggtattagaaaagatgtgtaaatatcttagtatataattgtttctcatttgaggtttttcttctaagggaccttaaagagttttatatacttttgctcacagaaactgctggtgagattaccattttttgagtatctagtcttctagtttttcttttaggcattaggaagccttctttagagttcaaaattttagaagcctaatttgctcttacttccttcaattatgtgccatgtgttttggtttgtatatgttttaaattgtatatttccttggaatatgcttgaaatatttaagaatacattttcaaaatgtataatactgtattgttttgttgatcagaataataagtctcagttaaatgtttgttattactgatagtcaaaatgctcaatagaaatgatgagaggcattggttccaattcattgtcaaatgaacgttttctaattttgttcacagattctttccctttcgattgttctgtatgttaagatagtggcttctgctctcactgttttcctatttatattactagcaggtaggagtgctaattagaaaaacttagatggtattgaaattacagttgacaacttatatttttatgagatggagaaaaaagattaagttgatataacaacaaagtggactttttttcttccttatcctgcacgaaatattgcccttgtttcctctactttcctcttggtgttttctctttttttcaaacagaaacaggccaattccattttcttgagcaagaaagcttagtgtgttacttcatcaaggccagctaatactgtgttaaaccgggctgaaaatgagaaaacttgggagatggaggaatggggaaatggcagtgggataggtagggaaggattactcttaattgttttaaaagccataggaaagtcttccttgtacgtggctgtaaatttataagaactattgtgtcacataaaccaacaagaatgaacctttgctgcttcagataatttgatttttccagcaaggaaattaataagttactgattcttcagcatagaaacaactgagaagaattaatgcaatgtttcttcactagaaaacccaacccttcatttcttttcattgctccaaaacccagttttcaactaatggttttctcattaaactaaatgtttagaaaagttgtttagagtttttctttttcttttacatagtcctcctgatccagtataagactatttagtaacgtgcatttgtatggtactatctaaagtaagttagattgatgtaagagatcgggtagctgcggaacaaaattagttatatcctaattaggtacagtgaatgacacaaaatcattttagcaatgcttcttaaccttttggggtcacaggcgttttgagactgatgaatcctagggacttatttacccaggaaaatgcgtatataacatacatatctccctaaagtttacaatattgtagtggttcatgggccccctggttaagagcccattctaaagtacaatagggcatcatcccttttcctgcaaagcccaaaagtatatttctagggcatgaaaataacttgagtctattttaaggaattgtttcactctagaggtagataggggacctggctagaatctgacattaaaatatactttttaaaaaatattatatttggggtggggaaagtgattaaaaggtgaaaaaaaaacatagtattcagaagttttggaggttaatgtctttctctaagatttgccactttagaaattcaacagaaaagaggtaaaacagaaatggaatgtatctggaacatttttggcctccatagtgcagatatactatattaacaagtaatacatttatttacctgtcagatctccaggttttaagattttgagctttctagtattaggattcattaaatgttcaattcatttcatattctaaggaattaggttatttacttactaattcaggatgttaaaataacatccaagtcggacaaccaccaccaatgcacacagttaatgagatttctaaaatataataagtacaatgtaacaaacgtatagaattttgcatttgttgccaaaattagatgtttaatgacagcttatttaattcccatttgtgggacttctggaacatagaaaccattatcttacctggttatcccttgactaaatagcatatctgcaggaaaatatcttgtttgtagtgatatgccccaatagtgattgatttcactcttgaaatgagttatatcacttaatttgtataaatgttatgagtggagagacatgtacatgttaaaagcatgttgcattatatattcattttttaaactctataaatgttaagaataatataattgcagaaatatttttcttaaatacaatgtgtaacaaaattctccgtagcaactcacccactttgcagtttatgtgatccacacttttaaagaaattccataaatgtatattttgtattatgtattatttcctggtccaaagaaaatatgtgaattcagttctaactttaagaatgtactgtttgttttcaagttcattgaaaaattgcattcagcctgcgaatggttgcagattgtatgttagatgaaaagtagaaataatttctagtttggaaaactggtgccactaaataaacaggcaattacataa

SEQ ID NO: 171410 - DNA, 564 bp, Homo sapiens
  Payload ID: 13710
  Gene Symbol: PPM1A
  Gene Name: protein phosphatase, Mg2+/Mn2+ dependent, 1A
  ENST ID: ENST00000528241
  CDS Start-End: 179-564
cgcctgcggctgctccggtactttgttttgaaaagttcagatcaactgataatactagtgctgtgatgagactcagcttgtactcaagaacagatttatgactagcttatagttggctgcttcaccaggactctacaaattgctcagaacccaaggagacctagaggatcaagacataatgggagcatttttagacaagccaaagatggaaaagcataatgcccaggggcagggtaatgggttgcgatatgggctaagcagcatgcaaggctggcgtgttgaaatggaggatgcacatacggctgtgatcggtttgccaagtggacttgaatcgtggtcattctttgctgtgtatgatgggcatgctggttctcaggttgccaaatactgctgtgagcatttgttagatcacatcaccaataaccaggattttaaagggtctgcaggagcaccttctgtggaaaatgtaaagaatggaatcagaacaggttttctggagattgatgaacacatgagagttatgtcagagaagaaacatggtgcagatagaagtgggtcaacagc

SEQ ID NO: 171411 - DNA, 854 bp, Homo sapiens
  Payload ID: 13710
  Gene Symbol: PPM1A
  Gene Name: protein phosphatase, Mg2+/Mn2+ dependent, 1A
  ENST ID: ENST00000525399
  CDS Start-End: 292-854
ccttctaccaactgcagttttagatacgttttgaaaatttcatcacctgagggataagagttggtgtccttgttcttttttctttcctgggaattgttctagtactgagatttcctctttggcttgaagtttctggtcttcactctagcactaattgaaaaaaaaaaaatttgttttccgagaactgttactttcctccatattttcaaatttattaacagagaattgtacagagtgatttattttacaacaataaaattctatttgtgagacctagaggatcaagacataatgggagcatttttagacaagccaaagatggaaaagcataatgcccaggggcagggtaatgggttgcgatatgggctaagcagcatgcaaggctggcgtgttgaaatggaggatgcacatacggctgtgatcggtttgccaagtggacttgaatcgtggtcattctttgctgtgtatgatgggcatgctggttctcaggttgccaaatactgctgtgagcatttgttagatcacatcaccaataaccaggattttaaagggtctgcaggagcaccttctgtggaaaatgtaaagaatggaatcagaacaggttttctggagattgatgaacacatgagagttatgtcagagaagaaacatggtgcagatagaagtgggtcaacagctgtaggtgtcttaatttctccccaacatacttatttcattaactgtggagactcaagaggtttactttgtaggaacaggaaagttcatttcttcacacaagatcacaaaccaagtaatccgctggagaaagaacgaattcagaatgcaggtggctctgtaatgattcagcgtgtgaa

SEQ ID NO: 171412 - DNA, 569 bp, Homo sapiens
  Payload ID: 13710
  Gene Symbol: PPM1A
  Gene Name: protein phosphatase, Mg2+/Mn2+ dependent, 1A
  ENST ID: ENST00000531937
  CDS Start-End: 126-569
ttatttgccaagagtttcagagctattaacagaagcctaatacatgttcttggactttgcagaaataatttgttgatccatgcggtttcattgctactgcggaaaacctagaggatcaagacataatgggagcatttttagacaagccaaagatggaaaagcataatgcccaggggcagggtaatgggttgcgatatgggctaagcagcatgcaaggctggcgtgttgaaatggaggatgcacatacggctgtgatcggtttgccaagtggacttgaatcgtggtcattctttgctgtgtatgatgggcatgctggttctcaggttgccaaatactgctgtgagcatttgttagatcacatcaccaataaccaggattttaaagggtctgcaggagcaccttctgtggaaaatgtaaagaatggaatcagaacaggttttctggagattgatgaacacatgagagttatgtcagagaagaaacatggtgcagatagaagtgggtcaacagctgtaggtgtcttaatttctccccaacatacttatttcattaactgtggagactcaaga

SEQ ID NO: 171413 - DNA, 1561 bp, Homo sapiens
  Payload ID: 13710
  Gene Symbol: PPM1A
  Gene Name: protein phosphatase, Mg2+/Mn2+ dependent, 1A
  ENST ID: ENST00000532036
  CDS Start-End: 64-558
ggccagggtagggggcacaccctctccctgaatgaaattcatttaggggcactgtctgctcgcatgttctgttctgggagaaaatgggtagcagaagctacaatttgtactaagctaatgaaaagagagaaaagaagaatggggaagagaagggcaaagaaggcaaaaagagaagagaagaaaaagggaggagagagaaggagaaatgagaaaagaggaaaccaaatgaagaggatgtgtgagagaaaaaaatatgaaacagacctagaggatcaagacataatgggagcatttttagacaagccaaagatggaaaagcataatgcccaggggcagggtaatgggttgcgatatgggctaagcagcatgcaagggaagtcgagacaacatgagtgtgattttgatctgttttccaaatgcacccaaagtatcgccagaagcagtgaagaaggaggcagagttggacaagtacctggaatgcagagtagaagaaatcataaagaagcagggggaaggcgtccccgacttagtccatgtgatgcgcacattagcgagtgagaacatccccagcctcccaccagggggtgaattggcaagcaagaggaatgttattgaagccgtttacaatagactgaatccttacaaaaatgacgacactgactctacatcaacagatgatatgtggtaaaactgctcatctagccatggagtttaccttcacctccaaaggagagtacagctcaactttgttgaaacttttaacatccatcctcaactttaaggaaggggatatgacatgggtgagaatgattacatcagagaacttcagcagtacaacagctagcccagaactgatttttttttttttttttgtaaatttgagacttatgtaagcgtgatttcaaaccataattcgtgttgtaaatcagactccagcaatttttgttgtatgattttgtttttttgtaaagtgtaattgtccttgtacaaaatgctcatatttaattatgaactgctttaaatcactatcaaagttacaagaaatgtttggcttattgtgtgatgcaacagatatatagccctttcaagtcatgttgtgtttggacttggggttggaacagggagagcagcagccatgtcagctacacgctcaaatgtgcagatgattatggaaaataacctcaaaatcttacaaagctgaacatccaaggagttattgaaaactatcttaaatgttcttggtaggggagttggcattgttgataaagccagtcccttcatttaactgtctttcaggatgttccttcgttgtttccatgagtattgcaggtaataatacagtgtattcataagaatctcaatcttggggctaaatgccttgtttctttgcacctcttttcaagtccttacatttaattactaattgataagcagcagcttcctacatatagtaggaaactgccacatttttgctatcatgattggctgggcctgctgctgttcctagtaagatattctgaattccattttatcaataaagcttgatttaacaaacaagaaa

SEQ ID NO: 171414 - DNA, 1546 bp, Homo sapiens
  Payload ID: 13710
  Gene Symbol: PPM1A
  Gene Name: protein phosphatase, Mg2+/Mn2+ dependent, 1A
  ENST ID: ENST00000531143
  CDS Start-End: 92-373
attatgatgtaggggagggaggaaggagggccagggtagggggcacaccctctccctgaatgaaattcatttaggggcactgtctgctcgcatgttctgttctgggagaaaatgggtagcagaagctacaatttgtactaagctaatgaaaagagagaaaagaagaatggggaagagaagggcaaagaaggcaaaaagagaagagaagaaaaagggaggagagagaaggagaaatgagaaaagaggaaaccaaatgaagaggatgtgtgagagaaaaaaatatgaaacagtactttgttttgaaaagttcagatcaactgataatactagtgctgtgatgagactcagcttgtactcaagaacagatttatgactagacctagaggatcaagacataatgggagcatttttagacaagccaaagatggaaaagcataatgcccaggggcagggtaatgggttgcgatatgggctaagcagcatgcaaggctggcgtgttgaaatggaggatgcacatacggctgtgatcggtttgccaagtggacttgaatcgtggtcattctttgctgtgtatgatgggcatgctggttctcaggttgccaaatactgctgtgagcatttgttagatcacatcaccaataaccaggattttaaagggtctgcaggagcaccttctgtggaaaatgtaaagaatggaatcagaacaggttttctggagattgatgaacacatgagagttatgtcagagaagaaacatggtgcagatagaagtgggtcaacagctgtaggtgtcttaatttctccccaacatacttatttcattaactgtggagactcaagaggtttactttgtaggaacaggaaagttcatttcttcacacaagatcacaaaccaagtaatccgctggagaaagaacgaattcagaatgcaggtggctctgtaatgattcagcgtgtgaatggctctctggctgtatcgagggcccttggggattttgattacaaatgtgtccatggaaaaggtcctactgagcagcttgtctcaccagagcctgaagtccatgatattgaaagatctgaagaagatgatcagttcattatccttgcatgtgatggtatctgggatgttatgggaaatgaagagctctgtgattttgtaagatccagacttgaagtcactgatgaccttgagaaagtttgcaatgaagtagtcgacacctgtttgtataagggaagtcgagacaacatgagtgtgattttgatctgttttccaaatgcacccaaagtatcgccagaagcagtgaagaaggaggcagagttggacaagtacctggaatgcagagtagaagaaatcataaagaagcagggggaaggcgtccccgacttagtccatgtgatgcgcacattagcgagtgagaacatccccagcctcccaccagggggtgaattggcaagcaagaggaatgttattgaagccgtttacaatagactgaatccttacaaaaatgacgacactgactctacatcaacagatgatatgtggtaa

SEQ ID NO: 171415 - DNA, 2606 bp, Homo sapiens
  Payload ID: 13711
  Gene Symbol: PPM1B
  Gene Name: protein phosphatase, Mg2+/Mn2+ dependent, 1B
  Uniprot ID: O75688
  ENST ID: ENST00000282412
  CDS Start-End: 413-1852
aaaaggagccgagcggcttctgctcaatggcggaaaagccgccggtgctctgacggcctcgttcccctagcagttgcgggggagtttcctgccggcgcggctggagtctctgattctcagggttcggtggttggaagatgctccagagagacgaggctgcggcggaggaggtggcggcggccgaatcggcaacggcgctagggtggagagaaggcggcatcggcggcggcggcggcgtgaggggccgggcggtgtaaacagccccggaggcggcggtcgagaccccgagggggaagcggcggctgagtcagggtcgcgcctccgttggaaacttgggctgagtaccgcggcgggcgcgagcgaggcgccctagacatcttctccctcccttgcctcagatttattgctaaacatgggtgcatttttggataaacccaaaactgaaaaacataatgctcatggtgctgggaatggtttacgttatggcctgagcagcatgcaaggatggagagtggaaatggaagatgcacacacagctgttgtaggtattcctcacggcttggaagactggtcattttttgcagtttatgatggtcatgctggatcccgagtggcaaattactgctcaacacatttattagaacacatcactactaacgaagactttagggcagctggaaaatcaggatctgctcttgagctttcagtggaaaatgttaagaatggtatcagaactggatttttgaaaattgatgaatacatgcgtaacttttcagacctcagaaacgggatggacaggagtggttcaactgcagtgggagttatgatttcacctaagcatatctactttatcaactgtggtgattcacgtgctgttctgtataggaatggacaagtctgcttttctacccaggatcacaaaccttgcaatccaagggaaaaggagcgaatccaaaatgcaggaggcagcgtgatgatacaacgtgttaatggttcattagcagtatctcgtgctctgggggactatgattacaagtgtgttgatggcaagggcccaacagaacaacttgtttctccagagcctgaggtttatgaaattttaagagcagaagaggatgaatttatcatcttggcttgtgatgggatctgggatgttatgagtaatgaggagctctgtgaatatgttaaatctaggcttgaggtatctgatgacctggaaaatgtgtgcaattgggtagtggacacttgtttacacaagggaagtcgagataacatgagtattgtactagtttgcttttcaaatgctcccaaggtctcagatgaagcggtgaaaaaagattcagagttggataagcacttggaatcacgggttgaagagattatggagaagtctggcgaggaaggaatgcctgatcttgcccatgtcatgcgcatcttgtctgcagaaaatatcccaaatttgcctcctgggggaggtcttgctggcaagcgtaatgttattgaagctgtttatagtagactgaatccacatagagaaagtgatggggcctccgatgaagcagaggaaagtggatcacagggaaaattggtggaagctctcaggcaaatgagaattaatcataggggaaactaccgacaacttctggaggagatgctgactagttacaggctagctaaagtagagggagaagaaagccctgctgaaccagctgccacagctacttcttcgaacagtgatgctggaaacccagtgacaatgcaggaaagccatactgaatcagaaagtggtcttgctgaattagacagctctaatgaagatgcagggacaaagatgagtggtgaaaaaatatgactttcctttttggtaatatttttgtgatctttgatggtttttaacctaggaagtgtaatgtatgcatttatataactgttttgttatttgaatcttggaaaactagttttattatattcagatagccttgttttttaaaaaggcctttgcatacacctttatgagatagtgtaaaattgactatttatagtactatggatttaatgaaattatatgtcatttcacattgtatgccagaaattaggctaccaattatgaattaaagtcagtagttaaattaatactagatagaattagaaattttgattagagagattatgctatattatggaaaaacttgttaatgtagaattatactgcttcatattattttacctattagtacactcatagttagctttgtaataaatttatgttttctttaataattttagttcttcaaagaatggctgatgctggcctgtaatttttctttcaaggatgataatttgtgtgttgtttgatttgtttatattttacatctctgtagttttatttttagaagttgtgagatattggatgtgtggctatttttcctttctctgtattctttatgaaacataacttttgaaaaacctatgtattattcatacagctttggtttgtatattctgtatagcctaactacacacatcaaaatgtatgtcaaccaagtgtttagaatgaaattataagtgtttaagtccaaataaagcatgtgatgtggaataatcta

SEQ ID NO: 171416 - DNA, 1713 bp, Homo sapiens
  Payload ID: 13711
  Gene Symbol: PPM1B
  Gene Name: protein phosphatase, Mg2+/Mn2+ dependent, 1B
  Uniprot ID: O75688
  ENST ID: ENST00000345249
  CDS Start-End: 381-959
aaaagccgccggtgctctgacggcctcgttcccctagcagttgcgggggagtttcctgccggcgcggctggagtctctgattctcagggttcggtggttggaagatgctccagagagacgaggctgcggcggaggaggtggcggcggccgaatcggcaacggcgctagggtggagagaaggcggcatcggcggcggcggcggcgtgaggggccgggcggtgtaaacagccccggaggcggcggtcgagaccccgagggggaagcggcggctgagtcagggtcgcgcctccgttggaaacttgggctgagtaccgcggcgggcgcgagcgaggcgccctagacatcttctccctcccttgcctcagggaagtcgagataacatgagtattgtactagtttgcttttcaaatgctcccaaggtctcagatgaagcggtgaaaaaagattcagagttggataagcacttggaatcacgggttgaagagattatggagaagtctggcgaggaaggaatgcctgatcttgcccatgtcatgcgcatcttgtctgcagaaaatatcccaaatttgcctcctgggggaggtcttgctggcaagcgtaatgttattgaagctgtttatagtagactgaatccacatagagaaagtgatggggcctccgatgaagcagaggaaagtggatcacagggaaaattggtggaagctctcaggcaaatgagaattaatcataggggaaactaccgacaacttctggaggagatgctgactagttacaggctagctaaagtagagggagaagaaagccctgctgaaccagctgccacagctacttcttcgaacagtgatgctggaaacccagtgacaatgcaggaaagccatactgaatcagaaagtggtcttgctgaattagacagctctaatgaagatgcagggacaaagatgagtggtgaaaaaatatgactttcctttttggtaatatttttgtgatctttgatggtttttaacctaggaagtgtaatgtatgcatttatataactgttttgttatttgaatcttggaaaactagttttattatattcagatagccttgttttttaaaaaggcctttgcatacacctttatgagatagtgtaaaattgactatttatagtactatggatttaatgaaattatatgtcatttcacattgtatgccagaaattaggctaccaattatgaattaaagtcagtagttaaattaatactagatagaattagaaattttgattagagagattatgctatattatggaaaaacttgttaatgtagaattatactgcttcatattattttacctattagtacactcatagttagctttgtaataaatttatgttttctttaataattttagttcttcaaagaatggctgatgctggcctgtaatttttctttcaaggatgataatttgtgtgttgtttgatttgtttatattttacatctctgtagttttatttttagaagttgtgagatattggatgtgtggctatttttcctttctctgtattctttatgaaacataacttttgaaaaacctatgtattattcatacagctttggtttgtatattctgtatagcctaactacacacatcaaaatgtatgtcaaccaagtgtttagaatgaaattataagtgtttaagtccaaataaagcatgtgatgtggaataatcta

SEQ ID NO: 171417 - DNA, 3877 bp, Homo sapiens
  Payload ID: 13711
  Gene Symbol: PPM1B
  Gene Name: protein phosphatase, Mg2+/Mn2+ dependent, 1B
  Uniprot ID: O75688
  ENST ID: ENST00000378551
  CDS Start-End: 413-1576
aaaaggagccgagcggcttctgctcaatggcggaaaagccgccggtgctctgacggcctcgttcccctagcagttgcgggggagtttcctgccggcgcggctggagtctctgattctcagggttcggtggttggaagatgctccagagagacgaggctgcggcggaggaggtggcggcggccgaatcggcaacggcgctagggtggagagaaggcggcatcggcggcggcggcggcgtgaggggccgggcggtgtaaacagccccggaggcggcggtcgagaccccgagggggaagcggcggctgagtcagggtcgcgcctccgttggaaacttgggctgagtaccgcggcgggcgcgagcgaggcgccctagacatcttctccctcccttgcctcagatttattgctaaacatgggtgcatttttggataaacccaaaactgaaaaacataatgctcatggtgctgggaatggtttacgttatggcctgagcagcatgcaaggatggagagtggaaatggaagatgcacacacagctgttgtaggtattcctcacggcttggaagactggtcattttttgcagtttatgatggtcatgctggatcccgagtggcaaattactgctcaacacatttattagaacacatcactactaacgaagactttagggcagctggaaaatcaggatctgctcttgagctttcagtggaaaatgttaagaatggtatcagaactggatttttgaaaattgatgaatacatgcgtaacttttcagacctcagaaacgggatggacaggagtggttcaactgcagtgggagttatgatttcacctaagcatatctactttatcaactgtggtgattcacgtgctgttctgtataggaatggacaagtctgcttttctacccaggatcacaaaccttgcaatccaagggaaaaggagcgaatccaaaatgcaggaggcagcgtgatgatacaacgtgttaatggttcattagcagtatctcgtgctctgggggactatgattacaagtgtgttgatggcaagggcccaacagaacaacttgtttctccagagcctgaggtttatgaaattttaagagcagaagaggatgaatttatcatcttggcttgtgatgggatctgggatgttatgagtaatgaggagctctgtgaatatgttaaatctaggcttgaggtatctgatgacctggaaaatgtgtgcaattgggtagtggacacttgtttacacaagggaagtcgagataacatgagtattgtactagtttgcttttcaaatgctcccaaggtctcagatgaagcggtgaaaaaagattcagagttggataagcacttggaatcacgggttgaagagattatggagaagtctggcgaggaaggaatgcctgatcttgcccatgtcatgcgcatcttgtctgcagaaaatatcccaaatttgcctcctgggggaggtcttgctggcaagcgtaatgttattgaagctgtttatagtagactgaatccacatagagaaagtgatgggggtgctggagatctagaagacccatggtagccttaaaaaccttctaaaatgcttttgattctgaaaattgggggaaaaaacttttaatcacaattttcttcaatacaaggggaaaatattcttgcggattcccaacgttttgtgatatgagcagaaaatcattagcatttcccatcatttgttcatatttgtgttttctgacagttgccacttgtagcattgcctgtactacagtattttttgccaacctcaggcatactcgttacatctgtattgaactttcggccctagaaaccagtggagttatttcaccacaaatcaacaatgtgcctgaggtgcatgggaaatatagttagctatactctgaaaatacattatgttttttttctttaaacaaaacacacaacatgtaagcatgtaagagtaaagaattgtatgatatgttccttttttcagttcaccaagttggaagccttttgcagctctgtggcttggaatttcatttgagcaatttctataggatatgtatttattattgattgttatttaatttttttccaattttacctgtattaccaaactgggttctccaataatgtccaaattgtaatgttgccttgcttcaagataaagtgtatttgggaataatattataaacccttacaaattttatgcatgtatctactgcatccttcaactctcactagaaaatcttttgaaaccaaatggattaatttatggctatttataatttgctttgacatctcactgttggaaattttttaaagatgagatttgcctttataatgtaaattgtgatttttgttttacatgtgggtttctatagttttaattttttcagcttttaagatacgagttttgtgtaatttggtatttttaatcatttatgttattttaaaagctcagaatatcacattgaaattactataaatacatttaaaattatctattttagatctaaggaaatactacagagatattttcatgggttcagtaacttttcattttataacattgggcacggtacagagtgattgtcacataaggtacttgaagatttattagtttaattctatttttacagtaaccttgaattcttctgagttttgcatgtattaaattcaattaatgctgaacatgaagagtaaagtatttatctgaaagaagtttctgggttaggagaagtaatgaatgtatccatttgtacatggtttacatgttgtggatgctttgtaaacattttcctgtatgtttaaattgtgtttcagcaggatgtaattgcccttgtgtgtagttaaaatgagtcatcatctggtcctttgtgaaatggaattcatggtattttctgtaacgttttcctgaagctgtttctggagagccacacatttaaatacagacagctttcctgatcatttgatttattgtgcacctgatttttggtctaaaaggaattattgccacaatatattttatttattctttagattttagccttgtaagttaaagtgctttacatgatgatgtgaaaagctgtttgtccctttactgggtttggggggttgttaaaagatagggaatgaagaatgcaaaatggtttatcgttcaaactgtccactctgatccaaccctgtactgatagtacttcccagtatgatattgtgatgtttcatacaatgcagtgaacataaccaacttgttacctaaataaagaattgataaaaacagtgtgacatattactatttggtatgattcagtttttaatgttattttaaacttcttatatggttggcatatttctgaaaatttaattccaaagaggaattaaccaaactgtacaggacaatattaaccccttctgtactctagaaatatttatactccttttaaaaaaacctgcctttggccgggtgcattggctcacacctgtaatcccagcactttgggaggccaaggcgggtggatcacgaggtcaagagatcgtgaccatcctggccaacacggtgaaaccctgcctctactaaaaatacaaagattagctgggcatggtggtgcttgcctgtaatcccagctgcttgggaggctgaggcagaagaattgcttgaacccaggaggcggaggttgcagtgagctaagatcgcgccactgcactccagcctggcgacagagcgagactccgtctcaaaaaaaaaaaaaaagaaaaaaaaaaacttttccggcagggggcagggtgggggttactggtgcttgaaacagaaataatgtatgagttagtaaaagaaaaacccatattcagtgttgactcatctgaa

SEQ ID NO: 171418 - DNA, 923 bp, Homo sapiens
  Payload ID: 13711
  Gene Symbol: PPM1B
  Gene Name: protein phosphatase, Mg2+/Mn2+ dependent, 1B
  ENST ID: ENST00000409473
  CDS Start-End: 15-923
atttattgctaaacatgggtgcatttttggataaacccaaaactgaaaaacataatgctcatggtgctgggaatggtttacgttatggcctgagcagcatgcaaggatggagagtggaaatggaagatgcacacacagctgttgtaggtattcctcacggcttggaagactggtcattttttgcagtttatgatggtcatgctggatcccgagtggcaaattactgctcaacacatttattagaacacatcactactaacgaagactttagggcagctggaaaatcaggatctgctcttgagctttcagtggaaaatgttaagaatggtatcagaactggatttttgaaaattgatgaatacatgcgtaacttttcagacctcagaaacgggatggacaggagtggttcaactgcagtgggagttatgatttcacctaagcatatctactttatcaactgtggtgattcacgtgctgttctgtataggaatggacaagtctgcttttctacccaggatcacaaaccttgcaatccaagggaaaaggagcgaatccaaaatgcaggaggcagcgtgatgatacaacgtgttaatggttcattagcagtatctcgtgctctgggggactatgattacaagtgtgttgatggcaagggcccaacagaacaacttgtttctccagagcctgaggtctcagatgaagcggtgaaaaaagattcagagttggataagcacttggaatcacgggttgaagagattatggagaagtctggcgaggaaggaatgcctgatcttgcccatgtcatgcgcatcttgtctgcagaaaatatcccaaatttgcctcctgggggaggtcttgctggcaagcgtaatgttattgaagctgtttatagtagactgaatccacatagagaaagtgatggg

SEQ ID NO: 171419 - DNA, 3025 bp, Homo sapiens
  Payload ID: 13711
  Gene Symbol: PPM1B
  Gene Name: protein phosphatase, Mg2+/Mn2+ dependent, 1B
  Uniprot ID: O75688
  ENST ID: ENST00000409432
  CDS Start-End: 413-1555
aaaaggagccgagcggcttctgctcaatggcggaaaagccgccggtgctctgacggcctcgttcccctagcagttgcgggggagtttcctgccggcgcggctggagtctctgattctcagggttcggtggttggaagatgctccagagagacgaggctgcggcggaggaggtggcggcggccgaatcggcaacggcgctagggtggagagaaggcggcatcggcggcggcggcggcgtgaggggccgggcggtgtaaacagccccggaggcggcggtcgagaccccgagggggaagcggcggctgagtcagggtcgcgcctccgttggaaacttgggctgagtaccgcggcgggcgcgagcgaggcgccctagacatcttctccctcccttgcctcagatttattgctaaacatgggtgcatttttggataaacccaaaactgaaaaacataatgctcatggtgctgggaatggtttacgttatggcctgagcagcatgcaaggatggagagtggaaatggaagatgcacacacagctgttgtaggtattcctcacggcttggaagactggtcattttttgcagtttatgatggtcatgctggatcccgagtggcaaattactgctcaacacatttattagaacacatcactactaacgaagactttagggcagctggaaaatcaggatctgctcttgagctttcagtggaaaatgttaagaatggtatcagaactggatttttgaaaattgatgaatacatgcgtaacttttcagacctcagaaacgggatggacaggagtggttcaactgcagtgggagttatgatttcacctaagcatatctactttatcaactgtggtgattcacgtgctgttctgtataggaatggacaagtctgcttttctacccaggatcacaaaccttgcaatccaagggaaaaggagcgaatccaaaatgcaggaggcagcgtgatgatacaacgtgttaatggttcattagcagtatctcgtgctctgggggactatgattacaagtgtgttgatggcaagggcccaacagaacaacttgtttctccagagcctgaggtttatgaaattttaagagcagaagaggatgaatttatcatcttggcttgtgatgggatctgggatgttatgagtaatgaggagctctgtgaatatgttaaatctaggcttgaggtatctgatgacctggaaaatgtgtgcaattgggtagtggacacttgtttacacaagggaagtcgagataacatgagtattgtactagtttgcttttcaaatgctcccaaggtctcagatgaagcggtgaaaaaagattcagagttggataagcacttggaatcacgggttgaagagattatggagaagtctggcgaggaaggaatgcctgatcttgcccatgtcatgcgcatcttgtctgcagaaaatatcccaaatttgcctcctgggggaggtcttgctggcaagcgtaatgttattgaagctgtttatagtagactgaatccacatagagaaagtgatgggcagaaatgatgaagaaactgttctgatggcctgcttttctgtccttttcctactgctttaaacattgattttcttttgtactaaatcatatagccaaatattgtttaagtaagtcagttttaggaaatgcttgtgttgctgttgaattataaaagctgagtaaatttcagattaaactttaaatgactgtgaaataagacataaactagttaatggtaatttgcttaaaatgacttgagattattattggaagtttttattaattgatacaggtaagaattgatatttaataaaatgttctcatgcttagactatattacttttcggtagagaaattagtattttgctgtaatgtgttatgaaatacatgtgatatcctagtttgtctactgacactggggtcttgaatcttaaaaaaaggcctccgatgaagcagaggaaagtggatcacagggaaaattggtggaagctctcaggcaaatgagaattaatcataggggaaactaccgacaacttctggaggagatgctgactagttacaggctagctaaagtagagggagaagaaagccctgctgaaccagctgccacagctacttcttcgaacagtgatgctggaaacccagtgacaatgcaggaaagccatactgaatcagaaagtggtcttgctgaattagacagctctaatgaagatgcagggacaaagatgagtggtgaaaaaatatgactttcctttttggtaatatttttgtgatctttgatggtttttaacctaggaagtgtaatgtatgcatttatataactgttttgttatttgaatcttggaaaactagttttattatattcagatagccttgttttttaaaaaggcctttgcatacacctttatgagatagtgtaaaattgactatttatagtactatggatttaatgaaattatatgtcatttcacattgtatgccagaaattaggctaccaattatgaattaaagtcagtagttaaattaatactagatagaattagaaattttgattagagagattatgctatattatggaaaaacttgttaatgtagaattatactgcttcatattattttacctattagtacactcatagttagctttgtaataaatttatgttttctttaataattttagttcttcaaagaatggctgatgctggcctgtaatttttctttcaaggatgataatttgtgtgttgtttgatttgtttatattttacatctctgtagttttatttttagaagttgtgagatattggatgtgtggctatttttcctttctctgtattctttatgaaacataacttttgaaaaacctatgtattattcatacagctttggtttgtatattctgtatagcctaactacacacatcaaaatgtatgtcaaccaagtgtttagaatgaaattataagtgtttaagtccaaataaagcatgtgatgtggaataatct

SEQ ID NO: 171420 - DNA, 2084 bp, Homo sapiens
  Payload ID: 13711
  Gene Symbol: PPM1B
  Gene Name: protein phosphatase, Mg2+/Mn2+ dependent, 1B
  ENST ID: ENST00000419807
  CDS Start-End: 951-2084
ggctgaagcaaaacaaccgcctctcccctgcccacttcttgtcctcgtctgagtcgtcccttcccgtctccacgccgaagagaggcgtttagatcctccaatgagggcctaggaggactttcttagccaatcagtagccaagcccctgcaattccgggtgggaccaggcgtccacacctatagctggactgctcgttggtcccttatggcgcttcttttacgcgaggcttagaggtcaaatacaagggggcacggtcctcacagaacggaaaggatccgtacagactctccgggtttgaccgttttctaggacgaaccaatcgctttccagatacttccccgccttttgcgcgttcatttgaaaaaagccggtgtgacggacttggaaattggctcagtgactgacccgcaagaaagccagtgactgggggttcggatcacgagttggaccaataagaaaagacaatcgctggggccggggctttgctaggaggagcgcaggtgggcgttatttgattgacggagggctctacttatggctggtagcgggggctggtccctgacgttcgggaggtaggacctagcggaggcggggccgaataaagtaaatgttgcgggggagtttcctgccggcgcggctggagtctctgattctcagggttcggtggttggaagatgctccagagagacgaggctgcggcggaggaggtggcggcggccgaatcggcaacggcgctagggtggagagaaggcggcatcggcggcggcggcggcgtgaggggccgggcggtgtaaacagccccggaggcggcggtcgagaccccgagggggaagcggcggctgagtcagggtcgcgcctccgttggaaacttgggctgagtaccgcggcgggcgcgagcgaggcgccctagacatcttctccctcccttgcctcagatttattgctaaacatgggtgcatttttggataaacccaaaactgaaaaacataatgctcatggtgctgggaatggtttacgttatggcctgagcagcatgcaaggatggagagtggaaatggaagatgcacacacagctgttgtaggtattcctcacggcttggaagactggtcattttttgcagtttatgatggtcatgctggatcccgagtggcaaattactgctcaacacatttattagaacacatcactactaacgaagactttagggcagctggaaaatcaggatctgctcttgagctttcagtggaaaatgttaagaatggtatcagaactggatttttgaaaattgatgaatacatgcgtaacttttcagacctcagaaacgggatggacaggagtggttcaactgcagtgggagttatgatttcacctaagcatatctactttatcaactgtggtgattcacgtgctgttctgtataggaatggacaagtctgcttttctacccaggatcacaaaccttgcaatccaagggaaaaggagcgaatccaaaatgcaggaggcagcgtgatgatacaacgtgttaatggttcattagcagtatctcgtgctctgggggactatgattacaagtgtgttgatggcaagggcccaacagaacaacttgtttctccagagcctgaggtttatgaaattttaagagcagaagaggatgaatttatcatcttggcttgtgatgggatctgggatgttatgagtaatgaggagctctgtgaatatgttaaatctaggcttgaggtatctgatgacctggaaaatgtgtgcaattgggtagtggacacttgtttacacaagggaagtcgagataacatgagtattgtactagtttgcttttcaaatgctcccaaggtctcagatgaagcggtgaaaaaagattcagagttggataagcacttggaatcacgggttgaagagattatggagaagtctggcgaggaaggaatgcctgatcttgcccatgtcatgcgcatcttgtctgcagaaaatatcccaaatttgcctcctgggggaggtcttgctggcaagcgtaatgttattgaagctgtttatagtagactgaatccacatagagaaagtgatggg

SEQ ID NO: 171421 - DNA, 4778 bp, Homo sapiens
  Payload ID: 13712
  Gene Symbol: PPM1D
  Gene Name: protein phosphatase, Mg2+/Mn2+ dependent, 1D
  Uniprot ID: O15297
  ENST ID: ENST00000305921
  CDS Start-End: 233-2050
ggggaagcgcagtgcgcaggcgcaactgcctggctctgctcgctccggcgctccggcccagctctcgcggacaagtccagacatcgcgcgcccccccttctccgggtccgccccctcccccttctcggcgtcgtcgaagataaacaatagttggccggcgagcgcctagtgtgtctcccgccgccggattcggcgggctgcgtgggaccggcgggatcccggccagccggccatggcggggctgtactcgctgggagtgagcgtcttctccgaccagggcgggaggaagtacatggaggacgttactcaaatcgttgtggagcccgaaccgacggctgaagaaaagccctcgccgcggcggtcgctgtctcagccgttgcctccgcggccgtcgccggccgcccttcccggcggcgaagtctcggggaaaggcccagcggtggcagcccgagaggctcgcgaccctctcccggacgccggggcctcgccggcacctagccgctgctgccgccgccgttcctccgtggcctttttcgccgtgtgcgacgggcacggcgggcgggaggcggcacagtttgcccgggagcacttgtggggtttcatcaagaagcagaagggtttcacctcgtccgagccggctaaggtttgcgctgccatccgcaaaggctttctcgcttgtcaccttgccatgtggaagaaactggcggaatggccaaagactatgacgggtcttcctagcacatcagggacaactgccagtgtggtcatcattcggggcatgaagatgtatgtagctcacgtaggtgactcaggggtggttcttggaattcaggatgacccgaaggatgactttgtcagagctgtggaggtgacacaggaccataagccagaacttcccaaggaaagagaacgaatcgaaggacttggtgggagtgtaatgaacaagtctggggtgaatcgtgtagtttggaaacgacctcgactcactcacaatggacctgttagaaggagcacagttattgaccagattccttttctggcagtagcaagagcacttggtgatttgtggagctatgatttcttcagtggtgaatttgtggtgtcacctgaaccagacacaagtgtccacactcttgaccctcagaagcacaagtatattatattggggagtgatggactttggaatatgattccaccacaagatgccatctcaatgtgccaggaccaagaggagaaaaaatacctgatgggtgagcatggacaatcttgtgccaaaatgcttgtgaatcgagcattgggccgctggaggcagcgtatgctccgagcagataacactagtgccatagtaatctgcatctctccagaagtggacaatcagggaaactttaccaatgaagatgagttatacctgaacctgactgacagcccttcctataatagtcaagaaacctgtgtgatgactccttccccatgttctacaccaccagtcaagtcactggaggaggatccatggccaagggtgaattctaaggaccatatacctgccctggttcgtagcaatgccttctcagagaattttttagaggtttcagctgagatagctcgagagaatgtccaaggtgtagtcataccctcaaaagatccagaaccacttgaagaaaattgcgctaaagccctgactttaaggatacatgattctttgaataatagccttccaattggccttgtgcctactaattcaacaaacactgtcatggaccaaaaaaatttgaagatgtcaactcctggccaaatgaaagcccaagaaattgaaagaacccctccaacaaactttaaaaggacattagaagagtccaattctggccccctgatgaagaagcatagacgaaatggcttaagtcgaagtagtggtgctcagcctgcaagtctccccacaacctcacagcgaaagaactctgttaaactcaccatgcgacgcagacttaggggccagaagaaaattggaaatcctttacttcatcaacacaggaaaactgtttgtgtttgctgaaatgcatctgggaaatgaggtttttccaaacttaggatataagagggctttttaaatttggtgccgatgttgaactttttttaaggggagaaaattaaaagaaatatacagtttgactttttggaattcagcagttttatcctggccttgtacttgcttgtattgtaaatgtggattttgtagatgttagggtataagttgctgtaaaatttgtgtaaatttgtatccacacaaattcagtctctgaatacacagtattcagagtctctgatacacagtaattgtgacaatagggctaaatgtttaaagaaatcaaaagaatctattagattttagaaaaacatttaaactttttaaaatacttattaaaaaatttgtataagccacttgtcttgaaaactgtgcaactttttaaagtaaattattaagcagactggaaaagtgatgtattttcatagtgacctgtgtttcacttaatgtttcttagagccaagtgtcttttaaacattattttttatttctgatttcataattcagaactaaatttttcatagaagtgttgagccatgctacagttagtcttgtcccaattaaaatactatgcagtatctcttacatcagtagcatttttctaaaaccttagtcatcagatatgcttactaaatcttcagcatagaaggaagtgtgtttgcctaaaacaatctaaaacaattcccttctttttcatcccagaccaatggcattattaggtcttaaagtagttactcccttctcgtgtttgcttaaaatatgtgaagttttccttgctatttcaataacagatggtgctgctaattcccaacatttcttaaattattttatatcatacagttttcattgattatatgggtatatattcatctaataaatcagtgaactgttcctcatgttgctgaatttgtagttgttggtttattttaatggtatgtacaagttgagtatcccttatccaaaatgcttgggaccagaagtgtttcagattttttaaaattttggaatatttgctttatactgagcttttgagtgttcccaatctgaaattcaaaatgctctaatgagcatttcctttgagcatcatgcctgctctgaaaaagtttctgattctggagcattttggattttggattttcagattagggatgcttaacctggattaacattctgttgtgccatgatcatgctttacagtgagtgtattttatttatttattattttgtttgtttgtttgagatggagtctcactctgtcatccaggctagagtgcagtggcgtgatctcggctgactgcaacctctgcctcccgggttcaagtgattctcctgcctcaatctctctccccagaagctgggattacaggtgtgtgccaccacacccggctaatttttttttttttttttgagatggagtctagctctgtcatccaggctggagtgcagtggtgtgatctcggctccctgcaacctctgccttctgggttcctgcgattctcctgcctcagcctcctgagtagctgagattacaggcacgcgccactgtgcccagccaatttttgtatttttagtagagatggggtttcacatgtcagtcatgctggtcttgatctcctgacctcgtgatccacccgcctcgacctcccaaagtactgggattacaggcgtgagccaccgcatccggcctgagttttatgctttcaatgtatttcttacatttcagttcaagtgattttcatgtctcagcctcctgagtagctggaactacaggtgcgtgccaccatgcctggctaagttttgtatttttagtagagatgggttttcatcatgttggccaagatggtcttgatctcttgacctcatgatccaccagcctaggcctcccaaagtgctgggattacaggtgtgagccaccgtgcccagccaactatgccattatttaaccatgtccacacattctggttattttcaatattttgcagaagataattcttgatcggtgtgtcttatgccacaaggattaaaatatgtattcattgctacaaaacaatatctcgaaatttagcagtttaaaacaacaaatattatctccagtttctgagcctcagaaatctgagagtggtttagctgggtgatagtctcgtggttttggtcaagctaccaaccagggctacaatctttcgaaggtgtcattggggctagaagatctgcttcccgcaagactcacagctgttggcaggagacctcagtttgttgccacatgttcccctccagagggcctctcacaacatggcagttatttgtccccagagcaagcaacaccggagggcaaggaagaagccatgatgttttttgtaacctagcctctgaaagtgtcataccaattctgtattttgttggtcacacagaccaagtcaactacaacgtgggagactcctacacaaggcatgaattctaggaggtgggcatttttaagtgtcatctggaaggaggctgtcacaacctggaagttaaaagcattgatattctgaaatacagcgtgtataacattgttttagtagggtgtgcaatagttatgttttggtaatagcattaatgaacaatgttattttcatcttccagacatctggaagattgctctagtggagtaaaacatcttaatgtattttgtccctaaataaactatctcactaacaaa

SEQ ID NO: 171422 - DNA, 2996 bp, Homo sapiens
  Payload ID: 13712
  Gene Symbol: PPM1D
  Gene Name: protein phosphatase, Mg2+/Mn2+ dependent, 1D
  Uniprot ID: O15297
  ENST ID: ENST00000392995
  CDS Start-End: 147-1439
cgcgcccccccttctccgggtccgccccctcccccttctcggcgtcgtcgaagataaacaatagttggccggcgagcgcctagtgtgtctcccgccgccggattcggcgggctgcgtgggaccggcgggatcccggccagccggccatggcggggctgtactcgctgggagtgagcgtcttctccgaccagggcgggaggaagtacatggaggacgttactcaaatcgttgtggagcccgaaccgacggctgaagaaaagccctcgccgcggcggtcgctgtctcagccgttgcctccgcggccgtcgccggccgcccttcccggcggcgaagtctcggggaaaggcccagcggtggcagcccgagaggctcgcgaccctctcccggacgccggggcctcgccggcacctagccgctgctgccgccgccgttcctccgtggcctttttcgccgtgtgcgacgggcacggcgggcgggaggcggcacagtttgcccgggagcacttgtggggtttcatcaagaagcagaagggtttcacctcgtccgagccggctaaggtttgcgctgccatccgcaaaggctttctcgcttgtcaccttgccatgtggaagaaactggcggaatggccaaagactatgacgggtcttcctagcacatcagggacaactgccagtgtggtcatcattcggggcatgaagatgtatgtagctcacgtaggtgactcaggggtggttcttggaattcaggatgacccgaaggatgactttgtcagagctgtggaggtgacacaggaccataagccagaacttcccaaggaaagagaacgaatcgaaggacttggtgggagtgtaatgaacaagtctggggtgaatcgtgtagtttggaaacgacctcgactcactcacaatggacctgttagaaggagcacagttattgaccagattccttttctggcagtagcaagagcacttggtgatttgtggagctatgatttcttcagtggtgaatttgtggtgtcacctgaaccagacacaagtgtccacactcttgaccctcagaagcacaagtatattatattggggagtgatggactttggaatatgattccaccacaagatgccatctcaatgtgccaggaccaagaggagaaaaaatacctgatgggtgagcatggacaatcttgtgccaaaatgcttgtgaatcgagcattgggccgctggaggcagcgtatgctccgagcagataacactagtgccatagtaatctgcatctctccagaagtggacaatcagggaaactttaccaatgaagatgagttatacctgaacctgactgacagcccttcctataatagtcaagaaacctgtgtgatgactccttccccatgttctacaccaccagtcaaggattttggatttgaactcgattcaagaaagtgatgtaacttattatcagagagccatctttacatcaatactaatctgaatgccagccatgtgtacagcactaataaaaagtcactggaggaggatccatggccaagggtgaattctaaggaccatatacctgccctggttcgtagcaatgccttctcagagaattttttagaggtttcagctgagatagctcgagagaatgtccaaggtgtagtcataccctcaaaagatccagaaccacttgaagaaaattgcgctaaagccctgactttaaggatacatgattctttgaataatagccttccaattggccttgtgcctactaattcaacaaacactgtcatggaccaaaaaaatttgaagatgtcaactcctggccaaatgaaagcccaagaaattgaaagaacccctccaacaaactttaaaaggacattagaagagtccaattctggccccctgatgaagaagcatagacgaaatggcttaagtcgaagtagtggtgctcagcctgcaagtctccccacaacctcacagcgaaagaactctgttaaactcaccatgcgacgcagacttaggggccagaagaaaattggaaatcctttacttcatcaacacaggaaaactgtttgtgtttgctgaaatgcatctgggaaatgaggtttttccaaacttaggatataagagggctttttaaatttggtgccgatgttgaactttttttaaggggagaaaattaaaagaaatatacagtttgactttttggaattcagcagttttatcctggccttgtacttgcttgtattgtaaatgtggattttgtagatgttagggtataagttgctgtaaaatttgtgtaaatttgtatccacacaaattcagtctctgaatacacagtattcagagtctctgatacacagtaattgtgacaatagggctaaatgtttaaagaaatcaaaagaatctattagattttagaaaaacatttaaactttttaaaatacttattaaaaaatttgtataagccacttgtcttgaaaactgtgcaactttttaaagtaaattattaagcagactggaaaagtgatgtattttcatagtgacctgtgtttcacttaatgtttcttagagccaagtgtcttttaaacattattttttatttctgatttcataattcagaactaaatttttcatagaagtgttgagccatgctacagttagtcttgtcccaattaaaatactatgcagtatctcttacatcagtagcatttttctaaaaccttagtcatcagatatgcttactaaatcttcagcatagaaggaagtgtgtttgcctaaaacaatctaaaacaattcccttctttttcatcccagaccaatggcattattaggtcttaaagtagttactcccttctcgtgtttgcttaaaatatgtgaagttttccttgctatttcaataacagatggtgctgctaattcccaacatttcttaaattattttatatcatacagttttcattgattatatgggtatatattcatctaataaatcagtgaactgtt

SEQ ID NO: 171423 - DNA, 489 bp, Homo sapiens
  Payload ID: 13712
  Gene Symbol: PPM1D
  Gene Name: protein phosphatase, Mg2+/Mn2+ dependent, 1D
  ENST ID: ENST00000590418
  CDS Start-End: 113-489
atacaaaataaaaaattagcttggcatggtagcatgtgcgtgtagtctctgctactccagaggctgagatggagggattgcttgagcctgggaggtggggttacagtgaaccatgatggagcctgtgcactcagcctgggcaacagaagaaaaaacggaatggccaaagactatgacgggtcttcctagcacatcagggacaactgccagtgtggtcatcattcggggcatgaagatgtatgtagctcacgtaggtgactcaggggtggttcttggaattcaggatgacccgaaggatgactttgtcagagctgtggaggtgacacaggaccataagccagaacttcccaaggaaagagaacgaatcgaaggacttggtgggagtgtaatgaacaagtctggggtgaatcgtgtagtttggaaacgacctcgactcactcacaatggacctgttagaaggagcacagttattgaccagattccttttct

SEQ ID NO: 171424 - DNA, 1525 bp, Homo sapiens
  Payload ID: 13712
  Gene Symbol: PPM1D
  Gene Name: protein phosphatase, Mg2+/Mn2+ dependent, 1D
  Uniprot ID: O15297
  ENST ID: ENST00000629650
  CDS Start-End: 233-1525
ggggaagcgcagtgcgcaggcgcaactgcctggctctgctcgctccggcgctccggcccagctctcgcggacaagtccagacatcgcgcgcccccccttctccgggtccgccccctcccccttctcggcgtcgtcgaagataaacaatagttggccggcgagcgcctagtgtgtctcccgccgccggattcggcgggctgcgtgggaccggcgggatcccggccagccggccatggcggggctgtactcgctgggagtgagcgtcttctccgaccagggcgggaggaagtacatggaggacgttactcaaatcgttgtggagcccgaaccgacggctgaagaaaagccctcgccgcggcggtcgctgtctcagccgttgcctccgcggccgtcgccggccgcccttcccggcggcgaagtctcggggaaaggcccagcggtggcagcccgagaggctcgcgaccctctcccggacgccggggcctcgccggcacctagccgctgctgccgccgccgttcctccgtggcctttttcgccgtgtgcgacgggcacggcgggcgggaggcggcacagtttgcccgggagcacttgtggggtttcatcaagaagcagaagggtttcacctcgtccgagccggctaaggtttgcgctgccatccgcaaaggctttctcgcttgtcaccttgccatgtggaagaaactggcggaatggccaaagactatgacgggtcttcctagcacatcagggacaactgccagtgtggtcatcattcggggcatgaagatgtatgtagctcacgtaggtgactcaggggtggttcttggaattcaggatgacccgaaggatgactttgtcagagctgtggaggtgacacaggaccataagccagaacttcccaaggaaagagaacgaatcgaaggacttggtgggagtgtaatgaacaagtctggggtgaatcgtgtagtttggaaacgacctcgactcactcacaatggacctgttagaaggagcacagttattgaccagattccttttctggcagtagcaagagcacttggtgatttgtggagctatgatttcttcagtggtgaatttgtggtgtcacctgaaccagacacaagtgtccacactcttgaccctcagaagcacaagtatattatattggggagtgatggactttggaatatgattccaccacaagatgccatctcaatgtgccaggaccaagaggagaaaaaatacctgatgggtgagcatggacaatcttgtgccaaaatgcttgtgaatcgagcattgggccgctggaggcagcgtatgctccgagcagataacactagtgccatagtaatctgcatctctccagaagtggacaatcagggaaactttaccaatgaagatgagttatacctgaacctgactgacagcccttcctataatagtcaagaaacctgtgtgatgactccttccccatgttctacaccaccagtcaaggattttggatttgaactcgattcaagaaagtga

SEQ ID NO: 171425 - DNA, 6542 bp, Homo sapiens
  Payload ID: 13713
  Gene Symbol: PPM1E
  Gene Name: protein phosphatase, Mg2+/Mn2+ dependent, 1E
  Uniprot ID: Q8WY54
  ENST ID: ENST00000308249
  CDS Start-End: 130-2397
agtgctgatcgctcgtgccggtgcggccgttaaccgcccttgccggagccctaggctcaaaagcagccccttacccttcctgggcttcccccaacccctttcccggtctgccctggggcatgagcagcgatggccggctgcatccctgaggagaaaacttaccggcgcttcctggagctattcctgggcgagtttcgcggaccgtgcggcggcggcgagccggagccggaacccgaacccgaacccgaacccgaacccgagtccgagcccgagcccgaacctgaactggtagaagctgaggcggccgaggcttcggtagaggaacccggggaggaggcggccacggtagccgcgacggaggagggggaccaggagcaagacccggagcccgaggaggaggcggcggttgagggtgaggaggaggaggagggcgcggcgacggcggcggcagccccggggcactcggccgtgccgccgccgccgccccagctgccgcctttgcccccgctcccgcgaccgctgtcagagcgcatcacccgcgaggaggtggagggcgaaagcctggacctgtgcctgcagcagctctacaaatataattgcccttcctttttggctgctgctttagccagagccacatcagatgaagtccttcagagtgatctttctgcacattatatcccaaaggaaacggatggcacagaagggactgtggagattgagacagtgaaattggcccgttctgtcttcagcaaactacacgagatttgctgcagctgggtgaaagacttccccctccgcaggagaccccagctttattatgagacatcaatccatgccatcaaaaacatgcgcaggaaaatggaggacaaacatgtctgcattcctgactttaatatgctcttcaacctagaggaccaggaagaacaagcttactttgcagtgtttgatggccatgggggagtagatgctgctatttatgcctccattcacctccacgttaacttagtccgccaggagatgttcccccatgatcctgctgaggccctgtgcagggccttccgggtcactgatgagcggtttgtgcagaaagcagccagggagagcttaagatgtgggaccacaggagtggtgactttcatcagaggcaacatgctacatgtggcctgggtgggtgattcccaggttatgcttgtgagaaagggccaagctgttgaactaatgaagccacacaaaccagacagagaggatgaaaagcagagaattgaggcccttggaggttgcgtagtctggtttggtgcctggagggtgaatggaagtctgtcggtttccagagctattggagatgctgaacataagccatatatctgtggggatgcagattctgcctccactgttctggatgggaccgaagactacctcattctggcctgtgatggcttctatgacaccgtgaaccctgatgaggcagtgaaagttgtgtccgaccacctgaaagagaataatggagacagcagcatggttgcccacaaattagtggcatcagctcgtgatgctgggtcaagtgataacatcacggttattgtggtattcctgagggacatgaacaaagctgtaaatgttagtgaggaatcagattggacagagaactcttttcaaggagggcaagaagatggtggggatgataaggagaatcatggagagtgcaaacgcccttggcctcagcaccagtgctcagcaccagccgacctaggctatgatgggcgtgtggattcattcactgatagaactagcctgagcccagggtcccaaatcaacgtgctggaagacccaggctacctagatctcacacaaatagaagcaagcaaacctcacagtgcccagtttttgctaccagttgagatgtttggtcctggtgcaccaaagaaagcaaatcttattaatgagttaatgatggagaaaaaatcagttcagtcatcattgcctgaatggagtggtgctggagagtttcccactgctttcaatttgggttcaacaggggagcagatatacagaatgcagagcttgtctcctgtctgttcagggttggaaaatgaacagttcaaatccccgggaaacagagtttctagattgtctcatttacgccaccactactcaaagaagtggcacagattcaggtttaatccaaagttttattcatttctctctgctcaagagccttcccacaaaataggcactagcctgtcctcacttactggaagtgggaagagaaataggataagaagttctctgccatggaggcaaaatagttggaaagggtacagtgaaaacatgaggaagctcagaaagactcatgatattccatgcccagatcttccttggagctataaaatagaataatttttctttcaagtaggttagctagctctcccccaataaaaataccactatcagagtagaaacaaggtagacatttctaaaacatatgtgcttcattatgaatccatggatggctcaattcttaaatgtaaatagatctctaggaaactcaaagtacagtgttttcaatctaaaaagaagtattggcagtttcacttgcaaaattacacagctggtccctgtgatgtgtctcgacaccaatacacaacccccttcccaccatccttcatgtcactagatacacaacccccttcccaccatcccttcagtcactagtggaagctttcaagttagttatttcagtcaggatatacagtgttgaaatctcaatgcagttgaaatctggtctgatgtgcctaatttatctgtggaaaatttaatgctgaattacatttggttgggaaatgtccctcaaaatcctgggcactatgaaggaaccccctgccccctcacctttttgggtaggtaaaagactaaaagccatatggattttaactgataacaatgaaagtggtaaatcagtgtaaaagtgtcatattctcagacttgtgaggcggtttatagtcagaaagatttacggatttttttcctgtaacataaaagattgtgaactttttttaattaaaaaatatttcctagggctgtagttatttgggagtttcataacctgttatggtgcttttggtggaaatttttattatttagcattttaggagaccgctgtcaactggttttaatctatgatgctaatgtgttttccactgtaccctcatctcaggaataaaactgctttaacggagatgatgtcaggtacaaatacactatagagtcaaaataccatttacaaagaaaatcaaaagcatttctatattttgtctttttttagttcagacagcaaaggcatgtactactataaaatacaaagtgattttagagaatgaaaaatgctacttttatcttctctaaaattatttcccccaaggtagtgaagtaattggaatgaaggaggctgaaagtattgtctaaagtgagcccagaggccactgagaatgcagattactgacagccaggtctgtttagttgtaattggaagacacatgagtgtcctgcttacatgtagcttcagactgcagagacaggacgtgtgcttttcatttcaatatttagttatatttgatattttgaaactgtctgctttttgctatttctgcagtttcaagttagttagaagcatgttgtcaactaaagacaacaaactatcagattcattcattcagtgaagcagcctctgattctctaagagtcacgaatgtcttagtgttaccctcccctagtcaacagcagaccagcctggccaatgcctatgggtggcccctctggagtgctcactaacaagggtgagtgctctcgctaagaagtgtcccccgcctaatcatgtgtttataggatagtacacgttccccaggcccataacagaggactaaaatctctgaattttaaagacacagatgactggcatattttggataccagtatagctatatcaaatagacaaaaacagcttcactttagcaatgatcagattgttaatctacagattttattttttaaaatttggatgtaagtagagactttcagtatttgttttctcttgattttgaagtcatttcttcttctcacgtctgtgacaaatggttgaaaaggagtcaacatggccccaactatagtgccggaaccttttcatcattctgaggctttgccccacacatggtcctcactcatatctgtcaccttctgaagcctagatcttgttaacccatcaggtgcagtgtcagtttcaaatcaaattatctaagaaaacaagaaaacaaaggcagcagactattggtacacattatagtccaaagtgcttagcgaagtaaaaaaaaaagctttttaaaatttctattgttgtctattggtaatgtttttgatcagaataaagagggtaaagggaaaaagttactacacatgctaggctttctcagtggggaaaaaaatggctggatagaactgggacaaacacagacccatctttaggggtctggattttgtaggtccgactacacagcagtgttaactcatttctcatgccattagctctctacaaaataaagcaaagtagttctagtgtggtcgttataaaccaatattgtgaaaaatagcaactattcatttgttcacaacatgcgtatttatagagtagttaggtaccatttgtaaggtaaatcctttaaaattctataatacatactaaaatagtggttattggtctgatatatgctgctcttggttctataaactagataaaagcagtgctttgtgaaatgcagtgttctctcttaacgccactggtgataggaagtagttcccttcagttcaaatcctgtgcccttatttgctgcttgctgacgtaagcaataagtaaccctctaactaatggtatctacatatttctgtaacttgtatttaatgatggtgtacctggtgattgtaaaaatattagacagatataaaagtatctatataatatctataaactgttaatgctgaggtatagtctgtgaattatgtgttttgtatttttattcattgtgtaatttagtggtggtgaaagttctacactcaatccttaaagagtggcagtatccctttttcaatttaacatggtctgcatcaatctgtttgcctgctaaacaagttagaataggaaatagtaaaataaatccaaacaagagtgtaatattggttagggaaacaaacttcaggtcaccaactgaagtcattacaaactccttgtacattcactgtgagtttcaaagggagtcagtccctaatttacaggtttcctttgttcactttctagatgtgtacttttgagggacatgaggttaggcaacattacagcaacacacactggggctattaatcccatttaggtctgtactaaagaggatgggtagaaacacatatgtatataccttttctttacctagaagtgccatccattgtccttgaattattatgattaaagttactgttgcatttaggaggctccttgaaagtaacaccttttccaaggacaatggcaacaatgtcaatgtcaacactgagtctaattttgaccacatttatagtggtatagtgtcaatactgcattttcatgacaaccacactccactgttgaaacactgtgccagtgagaagtgcaacatccagtgggcagatgaaaatgatgcatggccaagttcagtgtttacagataaaactgctgtggttcaagtgcttccttccccatcaaatccttgataaggctttgtgggaaaatgatctaaattattgttttaatttttaaacctaatttattcactcagtgaacattcttacctaagcaaggctataaaagggaatactacagttttgtccacactttaatttgagaccatttttctttgaatcgtaagttagcaaaagaaatttttttcacctttgaaaatcacgtgatgttaaaggacaaatgcccactcttctattctgatctgcaaatagcttaaatgtctcttgcaaaacaaagtaagataccaccagtattacaacacaatgattttccagacaaatggtatggtgttgaaaaataactgttacttcttaaagcagcattttatcttctattttgaagactatttattgtaataattagaaaacatgaaatagggaactccagactgacacagcagttgtttttgaaaaggaaataaactttgatgaattagataatccagatacatcattgtaaactcttactctaggtgctctttggtgagagacaggctttgttctcttgttcataacatttctctgcaaagaattctctatggagtgaagcgaatgaagtgaataatttcttaccaaataaatttatcaatttacaaatctgctctacatctcacttttgagttcagttgtagtcatgagtgatccttcatattttattaaaagtgttcattcaggtaaggtgtatgttgaaattttgccaattatcttaataaaacctggcaatttaaaaa

SEQ ID NO: 171426 - DNA, 5143 bp, Homo sapiens
  Payload ID: 13714
  Gene Symbol: PPM1F
  Gene Name: protein phosphatase, Mg2+/Mn2+ dependent, 1F
  Uniprot ID: P49593
  ENST ID: ENST00000263212
  CDS Start-End: 107-1471
ggacacggagccgcgaggagacagctgaggcccgcggagaccagggggtgaagcctggagaccctcttgccctggcctagctgcaggcccccgggatgctttgggcatgtcctctggagccccacagaagagcagcccaatggccagtggagctgaggagaccccaggcttcctggacacgctcctgcaagacttcccagccctgctgaacccagaggaccctctgccatggaaggccccagggacggtgctcagccaggaggaggtggagggcgagctggctgagctggccatgggctttctgggcagcaggaaggccccgccaccacttgctgctgctctggcccacgaagcagtttcacagctgctacagacagacctttccgaattcaggaagttgcccagggaggaagaagaagaggaggaggacgatgacgaggaggaaaaggcccctgtgaccttgctggatgcccaaagcctggcacagagtttctttaaccgcctttgggaagtcgccggccagtggcagaagcaggtgccattggctgcccgggcctcacagcggcagtggctggtctccatccacgccatccggaacactcgccgcaagatggaggaccggcacgtgtccctcccttccttcaaccagctcttcggcttgtctgaccctgtgaaccgcgcctactttgctgtgtttgatggtcacggaggcgtggatgctgcgaggtacgccgctgtccacgtgcacaccaacgctgcccgccagccagagctgcccacagaccctgagggagccctcagagaagccttccggcgcaccgaccagatgtttctcaggaaagccaagcgagagcggctgcagagcggcaccacaggtgtgtgtgcgctcattgcaggagcgaccctgcacgtcgcctggctcggggattcccaggtcattttggtacagcagggacaggtggtgaagctgatggagccacacagaccagaacggcaggatgagaaggcgcgcattgaagcattgggtggctttgtgtctcacatggactgctggagagtcaacgggaccctggccgtctccagagccatcggggatgtcttccagaagccctacgtgtctggggaggccgatgcagcttcccgggcgctgacgggctccgaggactacctgctgcttgcctgtgatggcttctttgacgtcgtaccccaccaggaagttgttggcctggtccagagccacctgaccaggcagcagggcagcgggctccgtgtcgccgaggagctggtggctgcggcccgggagcggggctcccacgacaacatcacggtcatggtggtcttcctcagggacccccaagagctgctggagggcgggaaccagggagaaggggacccccaggcagaagggaggaggcaggacttgccctccagccttccagaacctgagacccaggctccaccaagaagctaggtggtttccaggcccctgccctccccttcctcccatccttgtccttctctccctcagaagcctcaggacccaacaggtggcaggcagtggacagggtgcccgccccacagtgctttccccagcaccccagagccagtcgggacaccccccgcagcccgtcctggtggctgtggaactgcactgggtggcgggcagatggtggaaggcagcttaggagacctcaccaaagagaagatggaccggctcttgctcccagctcctattaggcccggggtgggaccagaggtcataggtgcccaacggcagccaaaccaaagacactggtgtgcatggggcagcatggttgtgcacgtgggaccctggggcggacccaggagccaaactcttgaagcaccccctgggtcaggcccagcagcggagtggccagccccagtttcccattgctcctctctgcggccagggccaggtgggttcatatttacagatatgcccagccagtcctggtcggccacaccagtgtcccaaagaggagagcgcagcagagccaggggtctgttctgtagcagccacccccctgcccccactccagggcagccatgatgtgcttgggcccaccagggccttccgggctgctctcttccctgagcccggaaccggcgacgcacatgtgtcttttgttggtgtgtttgtttttttccagggaggtctaattccgaagcagtattccaggttttctctttgttttatcagtgccaagatgacctgttgtgtcatataatttaagcagagcttagcatttattttattctttagaaaacttaagtatttacttttttaaagctatttttcaaggaacctttttttgcagtattattgaatttattttctaaatcaggattgaaacaggaacttttccaggtggtgttaataagccattcaagtgccttacacagctttgaagaaactaggactgcagtgggctcggataggcccattgaggtttttagaaaagcaggatttgttttgttagggaggcatgattttggtgagatctttctggaagagttttccgcctctttgtgatgctgaacacccccaaggttctcccctccccccgctgcccaggtgactggcaggagctgcgactgccacgtagtggtgcctgggcccgacagcggggctctgggcatcccgggtgaccttggcccatctgcctgcattcccacccccttgggcctggctggatcccaggcagagggaccttgctgctgtgtgattggaacattcccaaatatcttgtgaatttgtaatcaaattggtctcattgggaaagactcttaattaagaggctcaggcaagcacagaggcagcccgtgggtctctgtctcagtctggaggcagcagggatgctgctgggagtccatggcacaggccacagcccctcaccttgccgcggtggctggcagcacgcctgccttgctctgccccatgccctgaacaggcatgagagctccacgtcccctagtgcaccctgagagggggctcacaagtgaccgatcctgggtgcctcagggagctcactgagggcgtgcaaagttgaaagtggcaaggctgggggagggtgtcgggtagagggaagagggcagggggctaggggaggactcagaggccatctgcagggccaagccacaggaagggctgagctggaggtgggcagggctgctccaggcaggtcagagcagtgcagggggaggagaggagaaagggaggaagctgggctgtgtggtccccatgaaggcattcagagtccacctgcagacagcgagagccccaggaaggtttgcacagctgtgccccaagcaccttggcctcctctcagctcgccgaggaggcacgctagagccgccttcccggtgggagccctctgtcccacagggagcggggagccagctttgctggggccctacctgcatgcccagccttacccctcattctcacagcacagatgaggttgagaccatgcagtcaatgcattgcttaaggtctcttatttacaaaaaaaaaccttaaacatagtcgctgtcattcagacattcagagaatggttggccacaaacaatgaccaagtattgcttggcttaacttgaaggcctgctgtctccttctgggggtcagggacgcagctccaccctcaccactagcccaccctgcccgtgggcataaccttgacgaagagagagaatgattggcatctgcttttctcttttctttgctaataattctgttcctggctgccgagagtgaagtttcaccatgtggaggtttggctcctatcacctggtggtctgattcataccctagcctgaggctccactggaagatctcgcagcctcagtgtatgggaaaccctttccccaggcttgtcccagcactgccgctccccacccctgagccaggaccccagaggatggccatgccccgtgcctggcagaggtctggtgccagcactgggagctgctccgcccttgccttggggccgagggagccctcgtccacccctgcacagcagctgggcacagaggagcgctcttccatcttgaccaggactgcaccaagaagcaccaggtgtcttcagcctccaacctccggggcgaccttctcttccagccacagtcccatgagggcccctagccagggacactggtctgtaaattgtaatcctttctccagcccagctctccacttgttccttgtgtgagctgagcaggcagtgcacctctgagtgtcccttttgtaaggcccaggggttgcactgagtctgcagaggccgcgacctcctagaacgctgtgggtgcaggtgagccggcgtgtcctggggagatgctgccagcacacaggggccctcctgctgccagcaggttggggtggttaagtcttattagtgtctattcttaaaattaagtgggctggagaagaatggagctccacatgccagcaccgtatatggaatacaaaagctggggaagcagggcctgccttacaggtgtggctgactctgagcccaggcctgcaggggtggagggcagtccctcagaatcccagaggcagtcccagcctcagaacccaggataggaaatgggtgtgtttagtggggaaagggacggggtgcagacggcagggccagtatggggccccctccctctcctctcctctcctatggtgagcccagcgtgggcaccgggccgtctcagccgtgttcccagggctgggaggacagctctggcccttcttaggcctagcctcgtcccaagctaaatgtaagccagttgggctgtgttaaaggaagcagtgtttttggttcgattctgcctctgtagctcaaggggggcagcccccagagtcctgtgcattctgccaaggctccatagctttgccaaatgcacggagctctgccattccggtgcagtgcaggccttgcgaagggtttatctgcgttcgtctcggtgggcttctcctgcatgggagttgtgttcctgtgcaagggggagctttgctccaggacaggatgactgtcttccctattcttagggacaagtcccaagatgccagaaaggcagtctcccaaggacccaccatgcagaagtgtcaataaaccacaagttctgaactctg

SEQ ID NO: 171427 - DNA, 1778 bp, Homo sapiens
  Payload ID: 13714
  Gene Symbol: PPM1F
  Gene Name: protein phosphatase, Mg2+/Mn2+ dependent, 1F
  ENST ID: ENST00000397495
  CDS Start-End: 101-1186
ggagccgcgaggagacagctgaggcccgcggagaccagggggtgaagcctggagaccctcttgccctggcctagctgcaggcccccgggatgctttgggcatgtcctctggagccccacagaagagcagcccaatggccagtggagctgaggagaccccaggcttcctggacacgctcctgcaagacttcccagccctgctgaacccagaggaccctctgccatggaaggccccagggacggtgctcagccaggaggaggtggagggcgagctggctgagctggccatgggctttctgggcagcaggaaggccccgccaccacttgctgctgctctggcccacgaagcagtttcacagctgctacagacagacctttccgaattcaggaagttgcccagggaggaagaagaagaggaggaggacgatgacgaggaggaaaaggcccctgtgaccttgctggatgcccaaagcctggcacagagtttctttaaccgcctttgggaagtcgccggccagtggcagaagcaggtgccattggctgcccgggcctcacagcggcagtggctggtctccatccacgccatccggaacactcgccgcaagatggaggaccggcacgtgtccctcccttccttcaaccagctcttcggcttgtctgaccctgtgaaccgcgcctactttgctgtgtttgatggtcacggaggcgtggatgctgcgaggtacgccgctgtccacgtgcacaccaacgctgcccgccagccagagctgcccacagaccctgagggagccctcagagaagccttccggcgcaccgaccagatgtttctcaggaaagccaagcgagagcggctgcagagcggcaccacaggtgtgtgtgcgctcattgcaggagcgaccctgcacgtcgcctggctcggggattcccaggtcattttggtacagcagggacaggtggtgaagctgatggagccacacagaccagaacggcaggatgagaaggcgcgcattgaagcattgggtggctttgtgtctcacatggactgctggagagtcaacgggaccctggccgtctccagagccatcggtgagagccaaagaggccgacccaagtgggagaaggtctctcggaagcccaggcctcgagtgtggcccgcggctcaccaggggttcagggaggcagtgtgatgggccgagggggatttgtcatgcactggggtgataccctcgtagtgtgaagggaacagggcagattcagagactgcagcaccagtgtctgagtgtaagttacactgtatgttattatctcacctaaaacagctcctacaaatctcatagaaacctgtggctcaccaccctatgggctggaagtagagcttccaatattccggaaatgaggtttatcctcctcccgcgttcatgctgacaatccttttttctcttttgggaaaaaagtgggttcgctgggcgcggtggctcacgcctgtaatcccagcactttgggaggccgaggtgggtggatcacctgaggtcgggagttcgagaccagcctgatgaaaccccatgtctactaaaaaaaaaatacaaaaaattagccaggcatggtagtgagcccctgtaattccagctattcagaaggctgaggcaggagaatcacttgaacccagaaggcggaggttgcagtgagctgagatcgcgccactccactccagcctggataacgaggaaaactctgtctcaaaaaataataataaaaataaataaaaattttaaaaagtaa

SEQ ID NO: 171428 - DNA, 5587 bp, Homo sapiens
  Payload ID: 13714
  Gene Symbol: PPM1F
  Gene Name: protein phosphatase, Mg2+/Mn2+ dependent, 1F
  ENST ID: ENST00000407142
  CDS Start-End: 1062-1922
tccctgttgttctaaattcggcattactagtgcatgcgtgcatccggggaaaaggaacaaggtgggagaagagagagaaagcgaatacccgaggccgccagcatcagtgggtgcccgcgctctcctcctcgctctcgtcctctgccctccgccctggctccctgcccgcattccctgggagcgcagccttgccttagcctgggagacagctgtccacagtgacaggcggccattgttctcggccgagccagcaggcttccggccggtggcagctgctgctcctccgctctgcggccccaccaagggggcgccgccaccgcccaggccctccccgcctgatgggtctctgtccgtccacgcgggagacagcgccacctgccggtgagaaggagcgttgctgcgccggcaccagcccagtcctacgctcggggctcctgcaggcctgggaaggagggagggcgcagctagaaggaagtctcgcctgcccttgcttccccgtctgtcagagtgcctcgcatgcaggcctgcctagcggccttgatcatgctctccctgtcacggaagtagaatgtagtcaagtttttggactccaagccattcttacaaaattgcgtcagagtggggattgtattataagaattgccactgaagagcagcgagtggctgaaacctctgtgtggctgccagtcagcccctccccggtgactggatcagcgaagaatccagaagcgaggttgcggggctgcagcccttggcatggggagtccgtgggctgggcagcactgcctcagccgctggcctttcctgagcagagtctaggctaagcggctgttggaaatagcagtagcacccggggcgagaccgtgagccacagcggcggccggagtctcccccagcccgagctcaggcctgtgctggatgcccaaagcctggcacagagtttctttaaccgcctttgggaagtcgccggccagtggcagaagcaggtgccattggctgcccgggcctcacagcggcagtggctggtctccatccacgccatccggaacactcgccgcaagatggaggaccggcacgtgtccctcccttccttcaaccagctcttcggcttgtctgaccctgtgaaccgcgcctactttgctgtgtttgatggtcacggaggcgtggatgctgcgaggtacgccgctgtccacgtgcacaccaacgctgcccgccagccagagctgcccacagaccctgagggagccctcagagaagccttccggcgcaccgaccagatgtttctcaggaaagccaagcgagagcggctgcagagcggcaccacaggtgtgtgtgcgctcattgcaggagcgaccctgcacgtcgcctggctcggggattcccaggtcattttggtacagcagggacaggtggtgaagctgatggagccacacagaccagaacggcaggatgagaaggcgcgcattgaagcattgggtggctttgtgtctcacatggactgctggagagtcaacgggaccctggccgtctccagagccatcggggatgtcttccagaagccctacgtgtctggggaggccgatgcagcttcccgggcgctgacgggctccgaggactacctgctgcttgcctgtgatggcttctttgacgtcgtaccccaccaggaagttgttggcctggtccagagccacctgaccaggcagcagggcagcgggctccgtgtcgccgaggagctggtggctgcggcccgggagcggggctcccacgacaacatcacggtcatggtggtcttcctcagggacccccaagagctgctggagggcgggaaccagggagaaggggacccccaggcagaagggaggaggcaggacttgccctccagccttccagaacctgagacccaggctccaccaagaagctaggtggtttccaggcccctgccctccccttcctcccatccttgtccttctctccctcagaagcctcaggacccaacaggtggcaggcagtggacagggtgcccgccccacagtgctttccccagcaccccagagccagtcgggacaccccccgcagcccgtcctggtggctgtggaactgcactgggtggcgggcagatggtggaaggcagcttaggagacctcaccaaagagaagatggaccggctcttgctcccagctcctattaggcccggggtgggaccagaggtcataggtgcccaacggcagccaaaccaaagacactggtgtgcatggggcagcatggttgtgcacgtgggaccctggggcggacccaggagccaaactcttgaagcaccccctgggtcaggcccagcagcggagtggccagccccagtttcccattgctcctctctgcggccagggccaggtgggttcatatttacagatatgcccagccagtcctggtcggccacaccagtgtcccaaagaggagagcgcagcagagccaggggtctgttctgtagcagccacccccctgcccccactccagggcagccatgatgtgcttgggcccaccagggccttccgggctgctctcttccctgagcccggaaccggcgacgcacatgtgtcttttgttggtgtgtttgtttttttccagggaggtctaattccgaagcagtattccaggttttctctttgttttatcagtgccaagatgacctgttgtgtcatataatttaagcagagcttagcatttattttattctttagaaaacttaagtatttacttttttaaagctatttttcaaggaacctttttttgcagtattattgaatttattttctaaatcaggattgaaacaggaacttttccaggtggtgttaataagccattcaagtgccttacacagctttgaagaaactaggactgcagtgggctcggataggcccattgaggtttttagaaaagcaggatttgttttgttagggaggcatgattttggtgagatctttctggaagagttttccgcctctttgtgatgctgaacacccccaaggttctcccctccccccgctgcccaggtgactggcaggagctgcgactgccacgtagtggtgcctgggcccgacagcggggctctgggcatcccgggtgaccttggcccatctgcctgcattcccacccccttgggcctggctggatcccaggcagagggaccttgctgctgtgtgattggaacattcccaaatatcttgtgaatttgtaatcaaattggtctcattgggaaagactcttaattaagaggctcaggcaagcacagaggcagcccgtgggtctctgtctcagtctggaggcagcagggatgctgctgggagtccatggcacaggccacagcccctcaccttgccgcggtggctggcagcacgcctgccttgctctgccccatgccctgaacaggcatgagagctccacgtcccctagtgcaccctgagagggggctcacaagtgaccgatcctgggtgcctcagggagctcactgagggcgtgcaaagttgaaagtggcaaggctgggggagggtgtcgggtagagggaagagggcagggggctaggggaggactcagaggccatctgcagggccaagccacaggaagggctgagctggaggtgggcagggctgctccaggcaggtcagagcagtgcagggggaggagaggagaaagggaggaagctgggctgtgtggtccccatgaaggcattcagagtccacctgcagacagcgagagccccaggaaggtttgcacagctgtgccccaagcaccttggcctcctctcagctcgccgaggaggcacgctagagccgccttcccggtgggagccctctgtcccacagggagcggggagccagctttgctggggccctacctgcatgcccagccttacccctcattctcacagcacagatgaggttgagaccatgcagtcaatgcattgcttaaggtctcttatttacaaaaaaaaaccttaaacatagtcgctgtcattcagacattcagagaatggttggccacaaacaatgaccaagtattgcttggcttaacttgaaggcctgctgtctccttctgggggtcagggacgcagctccaccctcaccactagcccaccctgcccgtgggcataaccttgacgaagagagagaatgattggcatctgcttttctcttttctttgctaataattctgttcctggctgccgagagtgaagtttcaccatgtggaggtttggctcctatcacctggtggtctgattcataccctagcctgaggctccactggaagatctcgcagcctcagtgtatgggaaaccctttccccaggcttgtcccagcactgccgctccccacccctgagccaggaccccagaggatggccatgccccgtgcctggcagaggtctggtgccagcactgggagctgctccgcccttgccttggggccgagggagccctcgtccacccctgcacagcagctgggcacagaggagcgctcttccatcttgaccaggactgcaccaagaagcaccaggtgtcttcagcctccaacctccggggcgaccttctcttccagccacagtcccatgagggcccctagccagggacactggtctgtaaattgtaatcctttctccagcccagctctccacttgttccttgtgtgagctgagcaggcagtgcacctctgagtgtcccttttgtaaggcccaggggttgcactgagtctgcagaggccgcgacctcctagaacgctgtgggtgcaggtgagccggcgtgtcctggggagatgctgccagcacacaggggccctcctgctgccagcaggttggggtggttaagtcttattagtgtctattcttaaaattaagtgggctggagaagaatggagctccacatgccagcaccgtatatggaatacaaaagctggggaagcagggcctgccttacaggtgtggctgactctgagcccaggcctgcaggggtggagggcagtccctcagaatcccagaggcagtcccagcctcagaacccaggataggaaatgggtgtgtttagtggggaaagggacggggtgcagacggcagggccagtatggggccccctccctctcctctcctctcctatggtgagcccagcgtgggcaccgggccgtctcagccgtgttcccagggctgggaggacagctctggcccttcttaggcctagcctcgtcccaagctaaatgtaagccagttgggctgtgttaaaggaagcagtgtttttggttcgattctgcctctgtagctcaaggggggcagcccccagagtcctgtgcattctgccaaggctccatagctttgccaaatgcacggagctctgccattccggtgcagtgcaggccttgcgaagggtttatctgcgttcgtctcggtgggcttctcctgcatgggagttgtgttcctgtgcaagggggagctttgctccaggacaggatgactgtcttccctattcttagggacaagtcccaagatgccagaaaggcagtctcccaaggacccaccatgcagaagtgtcaataaaccacaagttctg

SEQ ID NO: 171429 - DNA, 576 bp, Homo sapiens
  Payload ID: 13714
  Gene Symbol: PPM1F
  Gene Name: protein phosphatase, Mg2+/Mn2+ dependent, 1F
  ENST ID: ENST00000424647
  CDS Start-End: 331-576
gttctaaattcggcattactagtgcatgcgtgcatccggggaaaaggaacaaggtgggagaagagagagaaagcgaatacccgaggccgccagcatcagtgggtgcccgcgctctcctcctcgctctcgtcctctgccctccgccctggctccctgcccgcattccctgggagcgcagccttgccttagcctgggagacagctgtccacagtgacaggcggccattgttctcggccgagccagcaggcttccggccggtggcagctgctgctcctccgctctgcggccccaccaagggggcgccgccaccgcccaggccctccccgcctgatgggtctctgtccgtccacgcgggagacagcgccacctgccgtgctggatgcccaaagcctggcacagagtttctttaaccgcctttgggaagtcgccggccagtggcagaagcaggtgccattggctgcccgggcctcacagcggcagtggctggtctccatccacgccatccggaacactcgccgcaagatggaggaccggcacgtgtccctcccttccttcaaccagctcttcggcttgtct

SEQ ID NO: 171430 - DNA, 650 bp, Homo sapiens
  Payload ID: 13714
  Gene Symbol: PPM1F
  Gene Name: protein phosphatase, Mg2+/Mn2+ dependent, 1F
  ENST ID: ENST00000445205
  CDS Start-End: 382-650
ggaggctgtcatctgagatcaggatattgacagaactggctccttctggtggtttgtgggcaacccttggcattccctggcttgaaggccccgccaccacttgctgctgctctggcccacgaagcagtttcacagctgctacagacagacctttccgaattcaggaagttgcccagggaggaagaagaagaggaggaggacgatgacgaggaggaaaaggcccctgtgaccttgctggatgcccaaagcctggcacagagtttctttaaccgcctttgggaagtcgccggccagtggcagaagcaggtgccattggctgcccgggcctcacagcggcagtggctggtctccatccacgccatccggaacactcgccgcaagatggaggaccggcacgtgtccctcccttccttcaaccagctcttcggcttgtctgaccctgtgaaccgcgcctactttgctgtgtttgatggtcacggaggcgtggatgctgcgaggtacgccgctgtccacgtgcacaccaacgctgcccgccagccagagctgcccacagaccctgagggagccctcagagaagccttccggcgcaccgaccagatgtttctcaggaaagccaagcgagagcggctgcagagcggcaccacaggtgt

SEQ ID NO: 171431 - DNA, 2311 bp, Homo sapiens
  Payload ID: 13715
  Gene Symbol: PPM1G
  Gene Name: protein phosphatase, Mg2+/Mn2+ dependent, 1G
  Uniprot ID: O15355
  ENST ID: ENST00000344034
  CDS Start-End: 266-1906
ggcgagttgctaaggaaatgactgcccgcagcgcctggccccgccgcgcaggccgggcggggtctggagcggcgccgtttccgcttccgctccctcacagctcccgtcccgttaccgcctcctggccggcctcgcgcctttcaccggcaccttgcgtcggtcgcgccgcggggcctgctcctgccgcgcgcacccccggggcttcggctccggcacgggtcgcgcccagctttcctgcacctgaggccgccggccagccgccgccatgggtgcctacctctcccagcccaacacggtgaagtgctccggggacggggtcggcgccccgcgcctgccgctgccctacggcttctccgccatgcaaggctggcgcgtctccatggaggatgctcacaactgtattcctgagctggacagtgagacagccatgttttctgtctacgatggacatggaggggaggaagttgccttgtactgtgccaaatatcttcctgatatcatcaaagatcagaaggcctacaaggaaggcaagctacagaaggctttagaagatgccttcttggctattgacgccaaattgaccactgaagaagtcattaaagagctggcacagattgcagggcgacccactgaggatgaagatgaaaaagaaaaagtagctgatgaagatgatgtggacaatgaggaggctgcactgctgcatgaagaggctaccatgactattgaagagctgctgacacgctacgggcagaactgtcacaagggccctccccacagcaaatctggaggtgggacaggcgaggaaccagggtcccagggcctcaatggggaggcaggacctgaggactcaactagggaaactccttcacaagaaaatggccccacagccaaggcctacacaggcttttcctccaactcggaacgtgggactgaggcaggccaagttggtgagcctggcattcccactggtgaggctgggccttcctgctcttcagcctctgacaagctgcctcgagttgctaagtccaagttctttgaggacagtgaggatgagtcagatgaggcggaggaagaagaggaagacagtgaggaatgcagcgaggaagaggatggctacagcagtgaggaggcagagaatgaggaagatgaggatgacaccgaggaggctgaagaggacgatgaagaagaagaagaagagatgatggtgccagggatggaaggcaaagaggagcctggctctgacagtggtacaacagcggtggtggccctgatacgagggaagcagttgattgtagccaacgcaggagactctcgctgtgtggtatctgaggctggcaaagctttagacatgtcctatgatcacaaaccagaggatgaagtagaactagcacgcatcaagaatgctggtggcaaggtcaccatggatgggcgagtcaacgggggcctcaacctctccagagccattggggaccacttctataagagaaacaagaacctgccacctgaggaacagatgatttcagcccttcctgacatcaaggtgctgactctcactgacgaccatgaattcatggtcattgcctgtgatggcatctggaatgtgatgagcagccaggaagttgtagatttcattcaatcaaagatcagccagcgtgatgaaaatggggagcttcggttattgtcatccattgtggaagagctgctggatcagtgcctggcaccagacacttctggggatggtacagggtgtgacaacatgacctgcatcatcatttgcttcaagccccgaaacacagcagagctccagccagagagtggcaagcgaaaactagaggaggtgctctctactgagggggctgaagaaaatggcaacagcgacaagaagaagaaggccaagcgagactagcagtcatccagacccctgcccacctagactgttttctgagccctccggacctgagactgagttttgtctttttcctttagccttagcagtgggtatgaggtgtgcagggggagctgggtggcttcactccgcccattccaaagagggctctccctccacactgcagccgggagcctctgctgtccttcccagccgcctctgctcctcgggctcatcaccggttctgtgcctgtgctctgttgtgttggagggaaggactggcggttctggtttttactctgtgaactttatttaaggacattcttttttattggcggctccatggccctcggccgcttgcacccgctctctgttgtacactttcaatcaacactttttcagactaaaggccaaaacctaatcgta

SEQ ID NO: 171432 - DNA, 6353 bp, Homo sapiens
  Payload ID: 13716
  Gene Symbol: PPM1H
  Gene Name: protein phosphatase, Mg2+/Mn2+ dependent, 1H
  Uniprot ID: Q9ULR3
  ENST ID: ENST00000228705
  CDS Start-End: 302-1846
gctgcagctgcagccgcctgggcgctcctggagcgcgcggtgactcccccggtcggcccgctccatgcagctccgttgcggaagtgtagcggggggaggcggcggccaccgcggcactaagcacgagaggccggggctcggccccctgcagcactaggctctgggagccgcgcgcggcgcgtcccagtggcccgactcgccgtgcgcccggcgcccaccgcagcctgcatgccccgcgctgcgccttgcccggcccccgccgcctcctgctcgcaccgctgcagccgggcgccggagtaatatgctcactcgagtgaaatctgccgtggccaatttcatgggcggcatcatggctggcagctcaggctccgagcacggcggcggcagctgcggaggctcggacctgcccctgcgtttcccctacgggcggccagagttcctggggctgtctcaggacgaggtggagtgcagcgccgaccacatcgcccgccccatcctcatcctcaaggagactcggcggctgccctgggccactggctacgcagaggttatcaatgccgggaagagcacacacaatgaagaccaagccagctgtgaggtgctcactgtgaagaagaaggcaggggccgtgacctcaaccccaaacaggaactcatccaagagacggtcctcccttcccaatggggaagggctgcagctgaaggagaactcggaatccgagggtgtttcctgccactattggtcgctgtttgacgggcacgcggggtccggggccgcggtggtggcgtcacgcctgctgcagcaccacatcacggagcagctgcaggacatcgtggacatcctgaagaactccgccgtcctgccccctacctgcctgggggaggagcctgagaacacgcccgccaacagccggactctgacccgggcagcctccctgcgcggaggggtgggggccccgggctcccccagcacgccccccacacgcttctttaccgagaagaagattccccatgagtgcctggtcatcggagcgcttgaaagtgcattcaaggaaatggacctacagatagaacgagagaggagttcatataatatatctggtggctgcacggccctcattgtgatttgccttttggggaagctgtatgttgcaaatgctggggatagcagggccataatcatcagaaatggagaaattatccccatgtcttcagaatttacccccgagacggagcgccagcgacttcagtacctggcattcatgcagcctcacttgctgggaaatgagttcacacatttggagtttccaaggagagtacagagaaaggagcttggaaagaagatgctctacagggactttaatatgacaggctgggcatacaaaaccattgaggatgaggacttgaagttcccccttatatatggagaaggcaagaaggcccgggtaatggcaactattggagtgaccaggggacttggggaccatgacctgaaggtgcatgactccaacatctacattaaaccattcctgtcttcagctccagaggtaagaatctacgatctttcaaaatatgatcatggatcagatgatgtgctgatcttggccactgatggactctgggacgttttatcaaatgaagaagtagcagaagcaatcactcagtttcttcctaactgtgatccagatgatcctcacaggtacacactggcagctcaggacctggtgatgcgtgcccggggtgtgctgaaggacagaggatggcggatatctaatgaccgactgggctcaggagacgacatttctgtatatgtcattcctttaatacatggaaacaagctgtcatgaaaatggcccaggggattgggaggacagaggggaagaaagctgggatgcctcttggcaggacggaactgggaagtgccccagctgagttccaagtgatgcagtctcttcccagcccaagcggggagttcatggccaaaagactatgcttcaagatgaccctttggtttccatttcttctttagtaacaggtcaactcaacaagagcaaaacacaaaggctgctaccaagtgttgttgtatttcagttcctttcataggcctccgaggtggccattgactatttggggtatatatgtcatatttattttatctagagtagctggggcagccattttcaggtgtaaatggcagaggactcttcagcctgtcaagctgccagcttatctacgggttaaaaagtgctgcattggaaagtagggggtcatgcctcaaaatgtaagtaagtgcccaccttctaggaagcctgaggtttatttcagggattgccgtctgccccccgccccccttctctttttttcttctctgtttctattcttttatggcagtggtggagtgaggcagggatttttttttttttttttcgtgtttttgacattccttgaatctgttttttattccccttccacagaacaggcctgggactttccaacaccctgctaaggaagttctgtgtccaagtcccacccaggctgggttgtccccacctcctccagcccacacagcccaggcagcatccgggccagtgccctgcatgacagagggtctttgttgtgtaatgtttgttcccaagttgcattttctaaccgaatcagtgtgttttcatgaaactgagtgtttctgtggaccagtagttcctctgttgtcttcagtggtcttcctgtgtggctcaagggttctctgtgagagtctggattttcatttctggaatggctggccccatcccacttttctgtatcatggggacacatataaagcagtgtttaatagagcagtttaagaagttgcttgcatctgttggttcaccatggctcatctggggaccattttggattcatgtttcatggcttgtgactgtccccaagcccactccaaacaaagtgtaaggatcagagttctgtcaaggagcagcagttctgctctccccatcatctttgtgcaaggcccctcggggggcactttaataaaagaatttgaaatgggttgactggccattctcatgctgtgctccctgtctcttctcttctctaaagaatcatgtcccagctcctcaaggtccctctatggttccacatctgagtgttcgccacaagagcagcagcagcaggcacagtgcatgccatatctacctgctgcttctctgctgggaggaatggccaagtagattataaaactcacttctgtctcttaggcagacttgtacggccacaaaattacctagtcttcttcctgctgagctactgaggtattgccaccattttgacaactttgagtaattaaaacactcttctgacccaaaaaggaaaaaaggtcactgacgtgacccccccagcatgctagagagctaattccagttctcatatttgtttgaatttcttcccagaggagaggataggaacctctcctccagggcagtaaatcacctgcatttctggagttgtcggtattgtattcgaaaaggcctggagcccctcctgctcaggaaagaactcattccagggtgtggagacagtgccgtctggcaggtgaaatactgtgggaattcacgccaccaggtgtttgtgcaagtgttggcctgggaagaatgggacttcggccttgtcaggagttgtcttcatctgcagcacgtttcttcctcctgcagtagatcttagctaccccagatatctctatggagagaagtttgtggaaaatgctttgcttcgtggcagagtctgatgctgtaggaaaaccttcgggcatgtgacagcagtgtggtccactccctgttctgccctggcactcagagtcatgtgtaagtaggaaacctgagcaagtcttccgtggaggaccctgagctgccgtctttgggatccttcctgtgtccccaccgtctttcatttatttgctttcctgggcctctatctgggccctaccttgagcttctccagttttattcaagccaccagagtaagaatttgggtgtagatgtcacaactaccttctactcaattcaccaattcatttactgctatggcacgtctcaggaataactctagaaacctctaaatcgaaatattataaaatcttgagcacttagtcctgctggttttagttagaaaggcatccaggaattgttttcctacgcccccttgagtggaaagatcttagttagaagataaagtcaagtttgtgttcaggggatgggaggaagactataaataagatgaagaaatcaaaagtaggaaacatgatgtaaacgaagcatggcagatctgtccagcactgatattgctctataaattgagcttactcagttttggccttatttttttacccaggccccatgtcacccagtcctaaaacagtaaccgtgtctacataacgggttggcccctggtgcatccctggaaaagtcaaaggacgcacacttcgaaattctgcagaacgtatttatacatggttcagaaatcttgcgtatctgacttatagccaaatctgcttgctcgaatagcctcagaggaagtcttgtttaataaaaaccttttgatttcctagtcaagtctttatggttgtctcgaggggtgtgtggctactttaatgaaaggctttcctgctctaaatctctttgctgggctgggcctcttcagactatctggtgaaactcctttccttagaacaaactcagtccgtccatgctctgtggcattttgctagatgataaccaaagccttattcctgtagccagtgtcagcagtcagagaggtggagggtgtgttctgctgtggttatgcatacctatctgctgttcttgaggtgtaaaaggaaaggtgaaaatcgggccaggccaagtactcagctgtcttaataggatgaagccttaagcagtggaaatttcagttattttccacagtattccattttggaggatttggggtgtttactttttaaattcttgaacaacttaacctccatgaggctttgtgaagtcagctgtgaccaccctcctcttactgtgttctcagtattcattcacttccagggaagaatgacagccacagggagatggtggtgggcaagaatgagagtcccaggatccagatttagcctcagatcttccccattcaggaagggttttccatttaacaagagcactagtatgaaaacattagggacaaatctcccatgtctttgaaattcggattctcctcttgagatccccttcctcacctgccaatcaactttataaggccacaagtggtcactggttttccttccacaggtttgaggttctcagctttccttaagcgacccagcagctccgctgttttcagagtgaatatgttaagctttgatgagattctattttcagtaagttagtgcttctgggacacttggagaaagctgtgagagtcattgtctacgcaaagaacaacgaagctgatcctaaaagtgatccaatctaagaaaatggtaaaacgagctctggccacagcacagaattttatgtgaggaactcagatttttgaagacttaacaattgcagagaaaggttgcagcctgcacaccatagcccacctctctgagcagactttggttttgtgtggtgacgtggcacatgtttgtacactgggatttttcaaaggacgctacgcgagcagactgacttgcctcttctgtgagcactgtggcttttgtcagatggagtgccggtctgcagaggactgctctttcgaatccacagtgttatctgtgtaaatagctttaatttttcttctgtgtcttaggtgaagttttgttcatgtagcaaccaggtagacagtgaccaaataaggctgtaaatgtgctgtagttttctactgtgatgtacttgaaggagaacctgtgtcctctacttttctgatctcccacaagtattttgtgtttgtttcctgagtcctgaggttattattttactcctgttttgcccccagttttctttgttttttttctggagacccagggaggcccatggtggagatcatttgtaaggaatggatcatggtctgggtttccaaaactaccctagtacagtgaatgagagaaatctgcctggaaattgtttcagaaccatgtacctttatgctttgtgattgtgaaacattgacttttttgtaaccccaaaatgaaaactgtttagtaaaggggatctattttgtgtgttttgaaacttaggtgcaatgtcccctggaaaaagctaaagaaatgtatatgttcaatgacattttaaaataaaatattatatatatgtatatacgacatattcagcaaaa

SEQ ID NO: 171433 - DNA, 1863 bp, Homo sapiens
  Payload ID: 13717
  Gene Symbol: PPM1J
  Gene Name: protein phosphatase, Mg2+/Mn2+ dependent, 1J
  Uniprot ID: Q5JR12
  ENST ID: ENST00000309276
  CDS Start-End: 177-1694
gggccggttcctggggtggcccagagcaagggcaagtttcgcccgggacccgcccagctggccgggagccagtagcagggaagggccggctggcgcgagcaccgcccacgcggagccatgggggcggggcctgggcgggggcggggccgcggccgagggcggggcagggaggcagcatgctaaaccgggtgcgctcggccgtggcgcacctggtgagctccgggggcgctccgcctccgcgccccaaatccccggacctgcccaacgccgcctcggcgccgcccgccgccgctccagaagcgcccaggagccctcccgcgaaggctgggagcgggagcgcgacgcccgcgaaggctgttgaggctcgagcgagcttctccagaccgacctttctgcagctgagccccggggggctgcgacgcgccgatgaccacgcgggccgggctgtgcaaagccccccggacacgggccgccgcctgccctggagcacaggctacgccgaggtcatcaatgctggcaagagtcggcacaatgaggaccaggcttgctgtgaagtggtgtatgtggaaggtcggaggagtgttacaggagtacctagggagcctagccgaggccagggactctgcttctactactggggcctatttgatgggcatgcagggggcggagctgctgaaatggcctcacggctcctgcatcgccatatccgagagcagctaaaggacctggtagagatacttcaggacccttcgccaccacccctctgcctcccaaccactccggggaccccagattcctccgatccctctcacttgcttggccctcagtcctgctggtcttcacagaaggaagtgagccacgagagcctggtagtgggggccgttgagaatgccttccagctcatggatgagcagatggcccgggagcggcgtggccaccaagtggaggggggctgctgtgcactggttgtgatctacctgctaggcaaggtgtacgtggccaatgcaggcgatagcagggccatcattgtccggaatggtgaaatcattccaatgtcccgggagtttaccccggagactgagcgccagcgtcttcagctgcttggcttcctgaaaccagagctgctaggcagtgaattcacccaccttgagttcccccgcagagttctgcccaaggagctggggcagaggatgttgtaccgggaccagaacatgaccggctgggcctacaaaaagatcgagctggaggatctcaggtttcctctggtctgtggggagggcaaaaaggctcgggtgatggccaccattggggtgacccgaggcttgggagaccacagccttaaggtctgcagttccaccctgcccatcaagccctttctctcctgcttccctgaggtacgagtgtatgacctgacacaatatgagcactgcccagatgatgtgctagtcctgggaacagatggcctgtgggatgtcactactgactgtgaggtagctgccactgtggacagggtgctgtcggcctatgagcctaatgaccacagcaggtatacagctctggcccaagctctggtcctgggggcccggggtaccccccgagaccgtggctggcgtctccccaacaacaagctgggttccggggatgacatctctgtcttcgtcatccccctgggagggccaggcagttactcctgaggggctgaacaccatccctcccactagcctctccatacttactcctctcacagcccaaattctgaagttgtctccctgacccttctttagtggcaacttaactgaagaagggatgtccgctatatccaaaattacagctattggcaaataaacgagatggataaaggtg

SEQ ID NO: 171434 - DNA, 1001 bp, Homo sapiens
  Payload ID: 13717
  Gene Symbol: PPM1J
  Gene Name: protein phosphatase, Mg2+/Mn2+ dependent, 1J
  ENST ID: ENST00000482367
  CDS Start-End: 3-455
gcatgctaaaccgggtgcgctcggccgtggcgcacctggtgagctccgggggcgctccgcctccgcgccccaaatccccggacctgcccaacgccgcctcggcgccgcccgccgccgctccagaagcgcccaggagccctcccgcgaaggctgggagcgggagcgcgacgcccgcgaaggctgttgaggctcgagcgagcttctccagaccgacctttctgcagctgagccccggggggctgcgacgcgccgatgaccacgcgggccgggctgtgcaaagccccccggacacgggccgccgcctgccctggagcacaggctacgccgagaccctgttctgccccagagcccggagggcggagagcccggcgaaggatgagttggccagttccccgtcgcggcccggcagcttaaaggctaagggtcatcaatgctggcaagagtcggcacaatgaggaccaggcttgctgtgaagtggtgtatgtggaaggtcggaggagtgttacaggagtacctagggagcctagccgaggccagggactctgcttctactactggggcctatttgatgggcatgcagggggcggagctgctgaaatggcctcacggctcctgcatcgccatatccgagagcagctaaaggacctggtagagatacttcaggacccttcgccaccacccctctgcctcccaaccactccggggaccccagattcctccgatccctctcacttgcttggccctcagtcctgctggtcttcacagaaggaagtgagccacgagagcctggtagtgggggccgttgagaatgccttccagctcatggatgagcagatggcccgggagcggcgtggccaccaagtggaggggggctgctgtgcactggttgtgatctacctgctaggcaaggtgtacgtggccaatgcaggcgatagcagggccatcattgtccggaatggtgaaatcattccaatgtcccgggagtttaccccggagactga

SEQ ID NO: 171435 - DNA, 1496 bp, Homo sapiens
  Payload ID: 13717
  Gene Symbol: PPM1J
  Gene Name: protein phosphatase, Mg2+/Mn2+ dependent, 1J
  ENST ID: ENST00000471106
  CDS Start-End: 1-896
ggggcgctccgcctccgcgccccaaatccccggacctgcccaacgccgcctcggcgccgcccgccgccgctccagaagcgcccaggagccctcccgcgaaggctgggagcgggagcgcgacgcccgcgaaggctgttgaggctcgagcgagcttctccagaccgacctttctgcagctgagccccggggggctgcgacgcgccgatgaccacgcgggccgggctgtgcaaagccccccggacacgggccgccgcctgccctggagcacaggctacgccgaggtcatcaatgctggcaagagtcggcacaatgaggaccaggcttgctgtgaagtggtgtatgtggaaggtcggaggagtgttacaggagtacctagggagcctagccgaggccagggactctgcttctactactggggcctatttgatgggcatgcagggggcggagctgctgaaatggcctcacggctcctgcatcgccatatccgagagcagctaaaggacctggtagagatacttcaggacccttcgccaccacccctctgcctcccaaccactccggggaccccagattcctccgatccctctcacttgcttggccctcagtcctgctggtcttcacagaaggaagtgagccacgagagcctggtagtgggggccgttgagaatgccttccagctcatgcaggatgagcagatggcccgggagcggcgtggccaccaagtggaggggggctgctgtgcactggttgtgatctacctgctaggcaaggtgtacgtggccaatgcaggcgatagcagggccatcattgtccggaatggtgaaatcattccaatgtcccgggagtttaccccggagactgagcgccagcgtcttcagctgcttggtctgctgtagtcaacgtcatctgtgtgccaccgtgtgctgtgagcataatgccccctggctctctgttctgatcatccccaactccagggcttcctgaaaccagagctgctaggcagtgaattcacccaccttgagttcccccgcagagttctgcccaaggagctggggcagaggatgttgtaccgggaccagaacatgaccggctgggcctacaaaaagatcgagctggaggatctcaggtttcctctggtctgtggggagggcaaaaaggctcgggtgatggccaccattggggtgacccgaggcttgggagaccacagccttaaggtctgcagttccaccctgcccatcaagccctttctctcctgcttccctgaggtacgagtgtatgacctgacacaatatgagcactgcccagatgatgtgctagtcctgggaacagatggcctgtgggatgtcactactgactgtgaggtagctgccactgtggacagggtgctgtcggcctatgagcctaatgaccacagcagtggcaacttaactgaagaagggatgtccgctatatccaaaattacagctattggcaaataaacgagatggataaaggtg

SEQ ID NO: 171436 - DNA, 2474 bp, Homo sapiens
  Payload ID: 13717
  Gene Symbol: PPM1J
  Gene Name: protein phosphatase, Mg2+/Mn2+ dependent, 1J
  Uniprot ID: Q5JR12
  ENST ID: ENST00000464951
  CDS Start-End: 1410-2309
gggtgcgctcggccgtggcgcacctggtgagctccgggggcgctccgcctccgcgccccaaatccccggacctgcccaacgccgcctcggcgccgcccgccgccgctccagaagcgcccaggagccctcccgcgaaggctgggagcgggagcgcgacgcccgcgaaggctgttgaggctcgagcgagcttctccagaccgacctttctgcagctgagccccggggggctgcgacgcgccgatgaccacgcgggccgggctgtgcaaagccccccggacacgggccgccgcctgccctggagcacaggctacgccgagtgagcgccccctggggcacccaaaccaggatggggctcccacccctctccccagctccgcatccccggcgctaggacgcgttccccacgccgcgtccgggccaggagctcccttttccgtggacctttgctatcctctggtcttcgggccgcaccccctcccaacccattttccagtggggggcagcctgtgtcaccttcttcacgtccttcccgctcattgactgccctcgcccacgccgcctcaggaccctgttctgccccagagcccggagggcggagagcccggcgaaggatgagttggccagttccccgtcgcggcccggcagcttaaaggctaagggaaaaggggtttcacgaaggagcggggttctttttaataggggacatagcggttgggaagactcgctcacccgcttcccggctccagcgccccagttccctgtccctcttaccgtagttcccctccccctccacacccagaaatagcccgcgacaccaggaggccgccagcttccccaggagcggggagggggacgcccggggtagaggagggtcccatttagatgcccttcagcctgccaactcgtgctggcctggcaaagaagcggaccccctgcccggagcggccggctggcccccgggctgtgtgtattttaaatgcatctgccgggaacgcagagcaccgagggagatgggggcgctcagttcgctgaggaaggtggctggtggcccatggacccaccaccacctcccttagcctcctgtgtgggaggagtttatgggtatgtggctcctgcccagtccaggtgggctttcacttctactctatttcagttcctctttcccgatctgggctggagagcttcctcattgttaaggcagcagaaactttcgctggatggttttaggataaggggtcatcaatgctggcaagagtcggcacaatgaggaccaggcttgctgtgaagtggtgtatgtggaaggtcggaggagtgttacaggagtacctagggagcctagccgaggccagggactctgcttctactactggggcctatttgatgggcatgcagggggcggagctgctgaaatggcctcacggctcctgcatcgccatatccgagagcagctaaaggacctgaaggaagtgagccacgagagcctggtagtgggggccgttgagaatgccttccagctcatggatgagcagatggcccgggagcggcgtggccaccaagtggaggggggctgctgtgcactggttgtgatctacctgctaggcaaggtgtacgtggccaatgcaggcgatagcagggccatcattgtccggaatggtgaaatcattccaatgtcccgggagtttaccccggagactgagcgccagcgtcttcagctgcttggcttcctgaaaccagagctgctaggcagtgaattcacccaccttgagttcccccgcagagttctgcccaaggagctggggcagaggatgttgtaccgggaccagaacatgaccggctgggcctacaaaaagatcgagctggaggatctcaggtttcctctggtctgtggggagggcaaaaaggctcgggtgatggccaccattggggtgacccgaggcttgggagaccacagccttaaggtctgcagttccaccctgcccatcaagccctttctctcctgcttccctgaggtacgagtgtatgacctgacacaatatgagcactgcccagatgatgtgctagtcctgggaacagatggcctgtgggatgtcactactgactgtgaggtagctgccactgtggacagggtgctgtcggcctatgagcctaatgaccacagcaggtatacagctctggcccaagctctggtcctgggggcccggggtaccccccgagaccgtggctggcgtctccccaacaacaagctgggttccggggatgacatctctgtcttcgtcatccccctgggagggccaggcagttactcctgaggggctgaacaccatccctcccactagcctctccatacttactcctctcacagcccaaattctgaagttgtctccctgacccttctttagtggcaacttaactgaagaagggatgtccgctatatccaaaattacagctattggcaaataaacgagatggataaa

SEQ ID NO: 171437 - DNA, 1940 bp, Homo sapiens
  Payload ID: 13718
  Gene Symbol: PPM1K
  Gene Name: protein phosphatase, Mg2+/Mn2+ dependent, 1K
  ENST ID: ENST00000295908
  CDS Start-End: 233-1216
gcgggagaaaaattttcgagaatttccagcaggcaaggcagtggccgctttgactgcttgcttcggagatccgagacgacggagaaggcactcttatttaccgaccaagaaagctcctcccccgtcctccgttagctaattaaaacatttttcagggacgtagccatccagagacattccattattgttccattgacctttccctcatcactgagtcctttggagctgagttatgtcaacagctgccttaattactttggtcagaagtggtgggaaccaggtgagaaggagagtgctgctaagctcccgcctgctgcaggacgacaggcgggtgacacccacgtgccacagctccacttcagagcctaggtgttctcggtttgacccagatggtagtgggagtccagctacctgggacaattttgggatctgggataaccgcattgatgagccaattctgctgccacccagcattaagtatggcaagccaattcccaaaatcagcttggaaaatgtggggtgcgcctcacagattggcaaacggaaagagaatgaagatcggtttgacttcgctcagctgacagatgaggtcctgtactttgcagtgtatgatggacacggtggacctgcagcagctgatttctgtcatacccacatggagaaatgtattatggatttgcttcctaaggagaagaacttggaaactctgttgaccttggcttttctagaaatagataaagccttttcgagtcatgcccgcctgtctgctgatgcaactcttctgacctctgggactactgcaacagtagccctattgcgagatggtattgaactggttgtagccagtgttggggacagccgggctattttgtgtagaaaaggaaaacccatgaagctgaccattgaccatactccagaaagaaaagatgaaaaagaaaggatcaagaaatgtggtggttttgtagcttggaatagtttggggcagcctcacgtaaatggcaggcttgcaatgacaagaagtattggagatttggaccttaagaccagtggtgtcatagcagaacctgaaactaagaggattaaggcaatacagtacggtactgaggataacagtactgcagtagtagtgccttttggtgcctggggaaaatataagaactctgaaatcaacttctcattcagcagaagctttgcctccagtggacgatgggcctgattaccagctgggacttagagtttctgtgcaacagtttttcactgagcatgtcaagaaactgataagatcaaaaaggtctcctaactcactagatcagcgcacaagtcagtgtaaaccacttagatagtagttttttcataaatgctcatcatatttatgttccgctgtacatgttcagtataaatatatgtgtagtgaagctactgtgagtctttaaatggaaagagcaaatgagaagtggtttggatacacttgatgagagatgagagtgtcacattaataatttttaagactcttaggcagctatgggtttcttttgatcatttttgttctttattcatttgaacacgtttttgaagttcttcaaaactagtcagtttgaattttgacagctattcaatatgtgatctccaagtttaaaaaaatttttttccagacttccctaatcctaaaatgcgagtttttatttttaataactgtaccaaggaataagtatgaaaacagttctctgttaccatattttgtattctggaccacttactggtgaaagcaaccatgcaaaagaaattaatttggccaggcacagtggctcatgcctgtaatcccagcactttgagaggccaaggtgggtagatcatctgaggtcaggaattcaagaccagcctggccaacatggtgaaaccctgtctctagtaaaaatccaaaaaaaaaaaaaaaaaaaaaa

SEQ ID NO: 171438 - DNA, 923 bp, Homo sapiens
  Payload ID: 13718
  Gene Symbol: PPM1K
  Gene Name: protein phosphatase, Mg2+/Mn2+ dependent, 1K
  ENST ID: ENST00000508256
  CDS Start-End: 444-905
ggatctgctgtcagtcagcgggaacagacttctccctctccatctggtcaactgcgggagaaaaattttcgagaatttccagcaggcaaggcagtggccgctttgactgcttgcttcggagatccgagacgacggagaaggcactcttatttaccgaccaagaaagctcctcccccgtcctccgttagctaattaaaacatttttcagggacgtagccatccagagggatttgcttcctaaggagaagaacttggaaactctgttgaccttggcttttctagaaatagataaagccttttcgagtcatgcccgcctgtctgctgatgcaactcttctgacctctgggactactgcaacagtagccctattgcgagatggtattgaactggttgtagccagtgttggggacagccgggctattttgtgtagaaaaggaaaacccatgaagctgaccattgaccatactccagaaagaaaagatgaaaaagaaaggatcaagaaatgtggtggttttgtagcttggaatagtttggggcagcctcacgtaaatggcaggcttgcaatgacaagaagtattggagatttggaccttaagaccagtggtgtcatagcagaacctgaaactaagaggattaagttacatcatgctgatgacagcttcctggtcctcaccacagatggaattaacttcatggtgaatagtcaagagatttgtgactttgtcaatcagtgccatgatcccaacgaagcagcccatgcggtgactgaacaggcaatacagtacggtactgaggataacagtactgcagtagtagtgccttttggtgcctggggaaaatataagaactctgaaatcaacttctcattcagcagaagctttgcctccagtggacgatgggcctgattaccagctgggacttag

SEQ ID NO: 171439 - DNA, 572 bp, Homo sapiens
  Payload ID: 13718
  Gene Symbol: PPM1K
  Gene Name: protein phosphatase, Mg2+/Mn2+ dependent, 1K
  ENST ID: ENST00000510548
  CDS Start-End: 510-572
atctggtcaactgcgggagaaaaattttcgagaatttccagcaggcaaggcagtggccgctttgactgcttgcttcggagatccgagacgacggagaaggcactcttatttaccgaccaagaaagctcctcccccgtcctccgttagctaattaaaacatttttcagggacgtagccatccagagacattccattattgttccattgacctttccctcatcactgagtcctttggagctgagttatgtcaacagctgccttaattactttggtcagaagtggtgggaaccagggatttgcttcctaaggagaagaacttggaaactctgttgaccttggcttttctagaaatagataaagccttttcgagtcatgcccgcctgtctgctgatgcaactcttctgacctctgggactactgcaacagtagccctattgcgagatggtattgaactggttgtagccagtgttggggacagccgggctattttgtgtagaaaaggaaaacccatgaagctgaccattgaccatactccagaaagaaaagatgaaaaagaaaggatcaagaaatgt

SEQ ID NO: 171440 - DNA, 566 bp, Homo sapiens
  Payload ID: 13718
  Gene Symbol: PPM1K
  Gene Name: protein phosphatase, Mg2+/Mn2+ dependent, 1K
  ENST ID: ENST00000505022
  CDS Start-End: 176-566
agctatttgcgaggcttcgcaggcaggcgggcgtgtgttcttcccaccgtgtgtcaccctgaccacccgcctgtcagggccagcgagccgaggccaggatcctgagctgtacccagacattccattattgttccattgacctttccctcatcactgagtcctttggagctgagttatgtcaacagctgccttaattactttggtcagaagtggtgggaaccaggtgagaaggagagtgctgctaagctcccgcctgctgcaggacgacaggcgggtgacacccacgtgccacagctccacttcagagcctaggtgttctcggtttgacccagatggtagtgggagtccagctacctgggacaattttgggatctgggataaccgcattgatgagccaattctgctgccacccagcattaagtatggcaagccaattcccaaaatcagcttggaaaatgtggggtgcgcctcacagattggcaaacggaaagagaatgaagatcggtttgacttcgctcagctgacagatgaggtcctgtactttgcagtgtatgatggacacggtg

SEQ ID NO: 171441 - DNA, 563 bp, Homo sapiens
  Payload ID: 13718
  Gene Symbol: PPM1K
  Gene Name: protein phosphatase, Mg2+/Mn2+ dependent, 1K
  ENST ID: ENST00000509340
  CDS Start-End: 547-563
gagtcggcgcttggccggcggcctctcggagttctcagagcgtcgctttcttccctttggaggtcgtgagcagctcgtcggggtgaggcggggcccagctgggctgcctgcgccccgggcggcgggtttccagcccagactgcgctcggccttgaatgtggccgcaggctggagggccagcgcggcgcgaggcgggcagggtgggtgggctgggactggagacccttgcccgaggccccggaagcgaggatgctgcggggtgggtgccgcgttgcctcccgggcgagggaaacgtggcgacaacgggctcggtacgcccagagggaggttgggaggcggagacctggcggcagaaggtgccgagggagcccagctatttgcgaggcttcgcaggcaggcgggcgtgtgttcttcccaccgtgtgtcaccctgaccacccgcctgtcagggccagcgagccgaggccaggatcctgagctgtacccagacattccattattgttccattgacctttccctcatcactgagtcctttggagctgagttatgtcaacagctgcctt

SEQ ID NO: 171442 - DNA, 2962 bp, Homo sapiens
  Payload ID: 13718
  Gene Symbol: PPM1K
  Gene Name: protein phosphatase, Mg2+/Mn2+ dependent, 1K
  ENST ID: ENST00000514204
  CDS Start-End: 424-972
cgtcgctccgccgcgcagctggaagcctgcgaagtcaaatagcagccgcggggaggctcgttcccatcggcatctgtgactggctgcgatcgagggcccgggcggccggccagccgtctcgccgagtgcggactggccggatctgctgtcagtcagcgggaacagacttctccctctccatctggtcaactgcgggagaaaaattttcgagaatttccagcaggcaaggcagtggccgctttgactgcttgcttcggagatccgagacgacggagaaggcactcttatttaccgaccaagaaagctcctcccccgtcctccgttagctaattaaaacatttttcagggacgtagccatccagagacattccattattgttccattgacctttccctcatcactgagtcctttggagctgagttatgtcaacagctgccttaattactttggtcagaagtggtgggaaccaggtgagaaggagagtgctgctaagctcccgcctgctgcaggacgacaggcgggtgacacccacgtgccacagctccacttcagagcctaggtgttctcggtttgacccagatggtagtgggagtccagctacctgggacaattttgggatctgggataaccgcattgatgagccaattctgctgccacccagcattaagtatggcaagccaattcccaaaatcagcttggaaaatgtggggtgcgcctcacagattggcaaacggaaagagaatgaagatcggtttgacttcgctcagctgacagatgaggtcctgtactttgcagtgtatgatggacacggtggacctgcagcagctgatttctgtcatacccacatggagaaatgtattatggatttgcttcctaaggagaagaacttggaaactctgttgaccttggcttttctagaaatagataaagccttttcgagtcatgcccgcctgtctgctgatggtatgtaaaactatcacattccttggatcctagggagtacatggggtgggggaggagtaaaaaggaaacactttaagtcctttgggggaggggattttaatggacaattgtttgtaaggatttatgtagaaatgagtttatatgaagaatcacattaaatgctgttgggaactccaattaatgttaatacctcacttttaaatgaaatatattggagaatttttcagaaagagaagccccgaaacagttctgatgttgtactttagtttttaaaagattttaaaaatgtttaatctgtttgcttattttatggacaaaatgtccatactatgagttttgttttgggtttttggttttttttttagatggatctggtgaccaagtgctgaaatacactacagggtaatcacatctagcgaggacagtcattgtccaacaagaaaaaaattgcaaataggtcctaaatagaaaaagacaatggttaatatgcactaatttgtataactagaaggaaaatatttttctgtcacttcttaaaaagctcaatcttgcagcttttctctggtaactagtgatattttcagcataaggtcatgctagctgaatttaaaattttgtgtactgtatgtccttaaattttgaaagtgaaatgtttctggttttgactaaatttatcaaaaccatttcacgaaaattcagcaaacgttttctagttagctagtcccaaatcttttgctgttaaagttaaccctgaaaatttctgtaccagccaaatgaatgtgtgcatgtaaccttgtaaatgatttgaaaatgaatcatgcaataatcttgatctgtatttggttcatccttttcttaaaaaaaagaaagaaaccaagtgcaccacagaaatgtcatttgcacagtcttcagttggaatacataaggatagagattgtttgcatttcacagcgaaggaactgaagattagagtggtaaaggtcagttcagagttagggctgggattttcctgaccaccagcattatctctcttctctcatgaggagaggagaaggtaactctgcgatggctctatttaccatcttgagattttttcctgagctttttttgagaaccttactatcacactcctcaggaaagcattacagtccactctcttcagggatatgttttccagtttgtagatcatttaggcccattttcttttctttcattcctttggaatttttctttttcctttcaactggacccttacctttaagaagacagaagctgaaagaggtaaactttatgcataagacttagctcttgttccaaatagttaaaacacatgaaggaaaagaggaaatgaaatattttcttatggttttatttttattacttcctgaattttggtatgctcttatttcatagtaactgagttggctgtgcatctggctatgtctcacaccacaatgtttgttgactgtagtgtcggtggtgtgccccagctgttctgtaaatagctgcagcttactgggcaaggtttttggatgagaatgtccaaatttatcccaggcatgtgaccaccaaccaaaaacattggccttctcaatgccatcagcctcttttaaaagtatctagtcaatgtagatgcttaaaccaatcggtgattgacttgatgtaaaatatgacaggactccttttattattgaatgaagtataactcaacagaattttgaacttaaagaatttaattaacttgcctatcttaaaagaaactttctaaagatacctttgtcacaaaaacattaaacagttgtataaagaaattaatcacaaaaatgtaattcatatgctaacttcagcagcacatacactaaaattggaatgatacagagatcagcatggtccttgtgcaaggatggcacacaaatgcatgaagagttccatattttttattcttactaaaatcaattcatttgtaataaagaaattaaaatgcattatttaatttaa

SEQ ID NO: 171443 - DNA, 6484 bp, Homo sapiens
  Payload ID: 13718
  Gene Symbol: PPM1K
  Gene Name: protein phosphatase, Mg2+/Mn2+ dependent, 1K
  Uniprot ID: Q8N3J5
  ENST ID: ENST00000608933
  CDS Start-End: 391-1509
gtcaaatagcagccgcggggaggctcgttcccatcggcatctgtgactggctgcgatcgagggcccgggcggccggccagccgtctcgccgagtgcggactggccggatctgctgtcagtcagcgggaacagacttctccctctccatctggtcaactgcgggagaaaaattttcgagaatttccagcaggcaaggcagtggccgctttgactgcttgcttcggagatccgagacgacggagaaggcactcttatttaccgaccaagaaagctcctcccccgtcctccgttagctaattaaaacatttttcagggacgtagccatccagagacattccattattgttccattgacctttccctcatcactgagtcctttggagctgagttatgtcaacagctgccttaattactttggtcagaagtggtgggaaccaggtgagaaggagagtgctgctaagctcccgcctgctgcaggacgacaggcgggtgacacccacgtgccacagctccacttcagagcctaggtgttctcggtttgacccagatggtagtgggagtccagctacctgggacaattttgggatctgggataaccgcattgatgagccaattctgctgccacccagcattaagtatggcaagccaattcccaaaatcagcttggaaaatgtggggtgcgcctcacagattggcaaacggaaagagaatgaagatcggtttgacttcgctcagctgacagatgaggtcctgtactttgcagtgtatgatggacacggtggacctgcagcagctgatttctgtcatacccacatggagaaatgtattatggatttgcttcctaaggagaagaacttggaaactctgttgaccttggcttttctagaaatagataaagccttttcgagtcatgcccgcctgtctgctgatgcaactcttctgacctctgggactactgcaacagtagccctattgcgagatggtattgaactggttgtagccagtgttggggacagccgggctattttgtgtagaaaaggaaaacccatgaagctgaccattgaccatactccagaaagaaaagatgaaaaagaaaggatcaagaaatgtggtggttttgtagcttggaatagtttggggcagcctcacgtaaatggcaggcttgcaatgacaagaagtattggagatttggaccttaagaccagtggtgtcatagcagaacctgaaactaagaggattaagttacatcatgctgatgacagcttcctggtcctcaccacagatggaattaacttcatggtgaatagtcaagagatttgtgactttgtcaatcagtgccatgatcccaacgaagcagcccatgcggtgactgaacaggcaatacagtacggtactgaggataacagtactgcagtagtagtgccttttggtgcctggggaaaatataagaactctgaaatcaacttctcattcagcagaagctttgcctccagtggacgatgggcctgattaccagctgggacttagagtttctgtgcaacagtttttcactgagcatgtcaagaaactgataagatcaaaaaggtctcctaactcactagatcagcgcacaagtcagtgtaaaccacttagatagtagttttttcataaatgctcatcatatttatgttccgctgtacatgttcagtataaatatatgtgtagtgaagctactgtgagtctttaaatggaaagagcaaatgagaagtggtttggatacacttgatgagagatgagagtgtcacattaataatttttaagactcttaggcagctatgggtttcttttgatcatttttgttctttattcatttgaacacgtttttgaagttcttcaaaactagtcagtttgaattttgacagctattcaatatgtgatctccaagtttaaaaaaatttttttccagacttccctaatcctaaaatgcgagtttttatttttaataactgtaccaaggaataagtatgaaaacagttctctgttaccatattttgtattctggaccacttactggtgaaagcaaccatgcaaaagaaattaatttggccaggcacagtggctcatgcctgtaatcccagcactttgagaggccaaggtgggtagatcatctgaggtcaggaattcaagaccagcctggccaacatggtgaaaccctgtctctagtaaaaatccaaaaaaaaaaaaaaaaaaaaaaaaaaaattggctgggcgtggtggcagacacctgtaatcccagctactcgggaggctgaggaaagaggaatcacttgaacccaggagatgggggttgcagtgagctgagatcatgccattgcactccagcctgggcagcaagagcgaaaaactccatctcaaaaaaaaaaaaaaaaagaaagaaaagaaattaattcagatgatgtgacattactaaattgtatacatatttataaatgtgtatttcagctgtctcatcagccctcccctccatttattcctatttttctgtagttaagaatactgtaaaaatgtgactattccttaatatcagaaaagaatgcacaggctgagtcttccggtcaaaagttaaatactgatggaatcaagtattttgtatgaagttctcatttgttatctctaacgctattttgtgttttgcatatagtattatagtatgtgtatatcactttttgtatagagtaagcaattgaataatttgttaataaaaataataccacattgactgatactgctatagacatagcttgagttttatgtctcctttttgctcattttctaagacttaggagaaagaataaatctaaaatgaccattaaaacattctccatttcagcttgctgtgtaacttaggaagtataaaactatacttctctttatctgcatgtaagtttgctgttaaaatgtgaatttctaaatgtgtatttggaattatttccgtagtttatttctgcaaactatgtaaatttgttatatgtgtgagtatgtgtacatatgtatattttagagtaatataaaattaaagggaacaatcttgcatagctctttcaccagttttaaattattgatacgttatttttaaggactcttgacaaactaggggcaattttcttatagtggagacccagtgattatcagcagatgaggaaataggttaaaaattgctatatggcaatttgtatataaagtaataggatgtgagaaaaatactgaatcttaagaatgacatggaattctgtggcagaaacaaaagaaaaagttgatgtagtatataccttcaactgtgttttgagttgacttttttttttttctttaagctttgggtaaaaatgtatgaggagggagagggcccaatataaatatttacatcttcttacctttttggaaatggaagaagataaatcttgagtttttctgcctatattaatcaggaattgccctttgaaaaaagtgctaaataaatattttgattttttttttcaagggaagttaggtgaaagaaggaaaaacatcacaggaaagactgttaacattctgtttgttgtctgagaggtgaggaaccaaagggaggcaactaaagcgggaaaccatcttgctttttctaatcagttcttggaacagaaatgtggaagctacctttaggaacatggagaatttccaaaccaacaggcaaaggaaaactaacgcacaaaaatgacattctgaagatgcaggtttcagccaggcgcggtggctcaagcctgtaatcctagcactttgggaggccaaggcaggtggatcacctgaggtcaagagttagagaccagcctggccaacatggtgaaacctcatcttgaccaaaaaatgcaaaaattagccaggcgtggtggtgggtgcctgtaatcccagctactggggaggctgaggaaggagaattgcttgaacctgggaggcggaggttgcagtgagtcgagatcgcgccattgcactccagcctggacagcagagcaaaaactccatctcagataaataaataaacaaatatgcaggtttcatttttgttttgaatgctttacattactattcctatcttttactttaaaaactaagatgaggagtgatgttgtcaagttcaaaggcatgagggtgattgatggattgaggtagatagccaagtttgtctgtttttgttttttatagttacagagtctcactttgttgtccaggctgaagtgcagtggtgcaatcatagctcactgagattgccaggttcgacaaagaggaatttataggatggggatatagggtagacttgactctgctttatccgggaaagcttttaaaactctgagccagttaactttgagtaagcataaaacatactgtattggtgtttgtatttttcatgccacaatattaaaatggaattttaaatgtagattattataatctataaaagataagtatgcatgtattaggatactggaaaatatgcaaatcatagtaaaaaaaaagggactgctctagtttttcagttataactgaatttgccatgtgggtataggcatagtgtaaattacattaatgtagtaaaacatcaattgtggttcggtttgtctttcatttatgtgtagtatagaaatcacctttctaatatgtgttgccaaactatttgccaccatctatttggtgaaatattcattgtcattgtgattttccacaagtataagttcttaagtactttatagattcagaagtaaatgctgtcctgttctccatcagctgttcgtttgttacagattttgtatttctttttttttttttttgagatggagtctcactctgtcacacaggctggagtacagtggtgcggtctcggctccctgcaacctctgcctcccgggttcaaacgattcttctgcctcagcctcctgagtagctgggactacaggcgcgtgccaccacccctggctaatttttgtatttttttttcttttttttttttgagaaggagtctctctctgtcacccaggctggagtgcagtggcacgatctcggctcactgcaagctgcgcctcctgggttcacgccattctcctgcctcagcctcccgagtagctggaattacaggcgtccgccaccgtgcccggctaatttttttgtatttttagtagagatggggttttgccatattggccaggctggtctcgaactcctgacctcaagtgatccacccacctcggcctcccaaagtgctgggattacaggcatgagccaccgcacctggccagatctttgtatgtcttaagtgtttcaaagttataagcatttttctggggggatgtccattttggagggatccattttgatcctttgtactctataatgtgaactttcccctgttccaacacttaaaagagaattattagcacataatctaaaagatggaattttttttttttcttgagacagagtctcgctctgtcgccaggctggagtgcagtggcgcgatcttggctcactgcaacctctgcctcctgggtttaagcgattctcctgcctcagcctctggagtagctgggactactcgtgcatgccaccacgcccggctaatttttgtatttttagtagagacagggtttcaccatattggccaggatggtctcgatctcttgacctcgtgatccacctgcctcggcctcccaaattgctgggattacagcactgtgccctcctaggaaattattttttaagtgaaattttatttttattttttttaggattttggtagagaatgagtaggcctactcatcaatatcaaacaggacatttagtttctttccttagaacagacataaatttaatttcatggtaatatgataataagaaaatgcttctatttttctttagcacctccatggttctcatatacccatgtctgtaaaaagtgacatgagaattttgttgggttacattttattgtatttattagattcgcttatatagatgacttaggcagaaataaagtcatgtctttagaaggtgaacaagccaacttgtgatggcctgccttttgcttttggcagttgggatgagaacaattgactctcccattggttgttagatagttgaaatggtgcgttggtggtcatacttagtgttctaggctgtgaaatcatggagttcttccacttccaagaatgactcatttgctgttggattctagtacagaatttagcagcctgatgtgtccccaaactgatttaatttctactgaagtgcccttgtgtacatttgttttgtaatttaccaaagtactacctgagtgtataatgactcctgcagtgagttaatgtaattgctgctttgaccattgttttaaatctgtgtactagagtaactgtgagcagaatgaaatcacattatctcagtgttcaaaatatcattctaataaagtacatgcattaaacaa

SEQ ID NO: 171444 - DNA, 1449 bp, Homo sapiens
  Payload ID: 13719
  Gene Symbol: PPM1L
  Gene Name: protein phosphatase, Mg2+/Mn2+ dependent, 1L
  Uniprot ID: Q5SGD2
  ENST ID: ENST00000295839
  CDS Start-End: 49-750
gggtaggagggatgctggtgccattagcagagagggctagaccagaacatgcctgctttttcaacaactgcagctgaatatgtaaaatctcgactcccagaggcccttaaacagcatcttcaggactacgagaaagacaaagaaaatagtgtattatcttaccagaccatccttgaacagcagattttgtcaattgaccgagaaatgctagaaaaattgactgtatcctatgatgaagcaggcacaacgtgtttgattgctctgctatcagataaagacctcactgtggccaacgtgggtgactcgcgcggggtcctgtgtgacaaagatgggaacgctattcctttgtctcatgatcacaagccttaccagttgaaggaaagaaagaggataaagagagcaggtggtttcatcagtttcaatggctcctggagggtccagggaatcctggccatgtctcggtccctgggggattatccgctgaaaaatctcaacgtggtcatcccagacccagacatcctgacctttgacctggacaagcttcagcctgagttcatgatcttggcatcagatggtctctgggatgctttcagcaatgaagaagcagttcgattcatcaaggagcgcttggatgaacctcactttggggccaagagcatagttttacagtcattttacagaggctgccctgacaatataacagtcatggtggtgaagttcagaaatagcagcaaaacagaagagcagtgaacccttcaggggtctcagctgccttagactaaaggactttcaacacactggtctcttttaatttagtgaaaagtgtgggagttgtaattaggatcatccaccccagacatggaatcccccctccctggtggtcttaggtctataatcagtgacgaacagagggtgcccttggccaatgtagttaagaaactggaaaatggtttcttcatgttttcccaactctttcatccagtgtccaaaatatataagtaaatagctgtagagtcacatatatgaagtgaatagcatatgtgtcatttagtctccctgaagattcttttcaagatcctgttcagggtcctccaggcatcagctgttgtgtcctctctttgtaacagtggacaggacagaccacccagtgctgcaggagacaggccactgcgtcacctgtgagtggtcaggggctgatgtggcaacaccctctgccaagagacagagctgtcctgagaatgctttgtccttctgagcccatgttttctgctcagtagcagcttggaagcagatttggaatggtttactattttggctgctcttggggactgcgagaagcagagagaatgagagaccagtggcaactgcctgcacagcagagataaccctcttcccttgcttcctttaatagttaaatagactttgtataccacctgaccagcctttgtg

SEQ ID NO: 171445 - DNA, 10934 bp, Homo sapiens
  Payload ID: 13719
  Gene Symbol: PPM1L
  Gene Name: protein phosphatase, Mg2+/Mn2+ dependent, 1L
  Uniprot ID: Q5SGD2
  ENST ID: ENST00000498165
  CDS Start-End: 102-1184
ctccgcctccctcccggcgggctgtccccgcagtgctcccggacccggcgagccttcggggcgcgcgtcgctggtggtggttgaggctctagcgataataaatgatagaggatacaatgactttgctgtctctgctgggtcgcatcatgcgctacttcttgctgagacccgagacgcttttcctgctgtgcatcagcttggctctatggagttacttcttccacaccgacgaggtgaagaccatcgtgaagtccagccgggacgccgtgaagatggtgaagggcaaggtagccgagatcatgcagaacgatcgactcggggggcttgatgtgctcgaggccgagttttccaagacctgggagttcaagaaccacaacgtggcggtgtactccatccagggccggagagaccacatggaggaccgcttcgaagttctcacggatctggccaacaagacgcacccgtccatcttcgggatcttcgacgggcacgggggagagactgcagctgaatatgtaaaatctcgactcccagaggcccttaaacagcatcttcaggactacgagaaagacaaagaaaatagtgtattatcttaccagaccatccttgaacagcagattttgtcaattgaccgagaaatgctagaaaaattgactgtatcctatgatgaagcaggcacaacgtgtttgattgctctgctatcagataaagacctcactgtggccaacgtgggtgactcgcgcggggtcctgtgtgacaaagatgggaacgctattcctttgtctcatgatcacaagccttaccagttgaaggaaagaaagaggataaagagagcaggtggtttcatcagtttcaatggctcctggagggtccagggaatcctggccatgtctcggtccctgggggattatccgctgaaaaatctcaacgtggtcatcccagacccagacatcctgacctttgacctggacaagcttcagcctgagttcatgatcttggcatcagatggtctctgggatgctttcagcaatgaagaagcagttcgattcatcaaggagcgcttggatgaacctcactttggggccaagagcatagttttacagtcattttacagaggctgccctgacaatataacagtcatggtggtgaagttcagaaatagcagcaaaacagaagagcagtgaacccttcaggggtctcagctgccttagactaaaggactttcaacacactggtctcttttaatttagtgaaaagtgtgggagttgtaattaggatcatccaccccagacatggaatcccccctccctggtggtcttaggtctataatcagtgacgaacagagggtgcccttggccaatgtagttaagaaactggaaaatggtttcttcatgttttcccaactctttcatccagtgtccaaaatatataagtaaatagctgtagagtcacatatatgaagtgaatagcatatgtgtcatttagtctccctgaagattcttttcaagatcctgttcagggtcctccaggcatcagctgttgtgtcctctctttgtaacagtggacaggacagaccacccagtgctgcaggagacaggccactgcgtcacctgtgagtggtcaggggctgatgtggcaacaccctctgccaagagacagagctgtcctgagaatgctttgtccttctgagcccatgttttctgctcagtagcagcttggaagcagatttggaatggtttactattttggctgctcttggggactgcgagaagcagagagaatgagagaccagtggcaactgcctgcacagcagagataaccctcttcccttgcttcctttaatagttaaatagactttgtataccacctgaccagcctttgtgcatttatcctaatcatgcatgaccgttaaccttttgcttagtccttaccatatgtaataggcagctgttaaattcaccaacagataccctgatttttcatcttacgtgaccaagaaaccacgttaggggaaatgaaaaaagcaagccacaataccatgattccttccattttcaacagtagatgaaggaaatgatactgaatgagtcacagtgttccctggcaagtaagctgtttgcattgagaaaggagtgagctggtgaggttaccaccctgaattgagctccagctgccagtttttgtgtttttccttgcccctttccaagtggttttcaagtgtcaggcagtgttctgagaagcagcagcctataactgtatgtgtgttccttgaagccaggtgcagagttcccagctactgcagcttgggatttggtgggaaactactgggataagcttctccttgacaatggaaaggcagcagtcttcaacatttggttgcaaatctccatccacatcagggagctttccccaggcaaatacaaaccgccccgtggcctgcaggcctgcaggggaggcagcaaagggacctggcagttgcaacacagtaagtcaggaattcaagcgtgaacccatattgataagtgggccagaattatttaggggcctggcttgctgctctccatttcctgtatcgctaatttatcatttttccaaccttggtattttatattatttagagaaaatgctgggtcactctctttgcctaaggtgactcaaacagccaaacgaaacttccgttgcctcccagccctctgtatccacctggttttgttctttccctgtgagcatttgtggttatagcttcccatatgccacattcaccggccacctcctcgccgtggaaccctgccctctcccctcctgctgctgtagagttttcccaaagcagtgtccaggagagaatttgagagagtgaagaaattgccttgtagatgtggagggctgcaatctgtcttgatttctccaagcacttaactttctttgactgcactgagaattgctaatgatttcccatgagatttgcttacttttgtatactgtattttccagcattacagaaccttggttattgttttttagccatagaatcttctagtaaaaaatatctgccaccattttagatttaagcatttgcctatggggagacactgaatatgtggatgtgtgtattaatatttggggtggggacagggaagggaatgtggaaaacaaatgctggctgtgagcagtgctgagatggccaggccaggcggctgagtttgcttggaaattcaggacattctgactcctaagagttgcccccacccaccatcaaactgaaatcagcaccaatggtgtcagcactttacagcccatagccaactttctttatttttaacgtagcacaaaaatgtataatagcaaggaaaagacatttttaaattccggttatttttattgtctaaaatgaaagcaacagtgttttgataaagatgaaaaagaaaagctactaaattagtaaatcagtggttacgtgccctgcagaatttcttaacagatggtgctgagtgcacgagttacataactttctctctaattgaggttcacaaggcgtcttctaaattttgctttgtacaattaattcatttctgatgttaaccaaatagagtgtatatatcctactcccattactgcctctttcccccctactatggcttgtagattttcaaaagatagaagttctaggcaaaactgtagcagtttcattaatagttgttaggatagttatatctaaaatcagagtattttgttcccttccttctggagctctctctccctagcccttttccagctgttggggatgtgcagacatcactcctgggggtgccctatggtacactggctgctccccagggacctgggaatgctgaatctagccattagggaaattgatttgagatgtttgcatgtgaagcttccctaagcagcactgccaaagctttggaattgtcacccaaggcttcctagactccctagctagctcgagttcgaattgccaatagtccccatggtgccaaattttgggatggttttacagtcttttagaaatgaagacaggaatggccatgtgcttctgagaccccagcacgatgccaggcccaggtctccattaatgcagtgctctgctgctgctccactggcaatttgtactcttaacataggttgggggagggacagctagggaaattttttttaattaattgtatctaaaattctttcatcataggaataaacaacacatatagaaagctccaaagctgttcccaagacctgtattatttattttatatgaccaacttgccccaaggcaattaactctgaattgctgttctaatgtgacatatctgtgtacatatgtacatagtactggtaaccagtggctgcattttattccttgctgtggactgaggtattggcttcttgaatcttgtatatgtcataagaatattatacagagagtgttatagtgaaggatgtaagctggataatttaaaacagaccttatttcatacaagtgtaattattacatcattttgggtaaatggcaaacaggattgcatgagagtgatggcatcatcatttcaattgaatctgaagtgattctaggaaattgattccactgttggattctaggaaattgagtccactgttttcctttgcgtttaatttcctttgtgtttaatttgaccacagaaacttttttgagtagcacctagtaacattgcaaggaacttgtgtatcaaggtgtatcttgattatcctgattttttttgttctctaagttgttgccagatctctcttgcaactgtgtcaatgaaaggtctgtgtttagaaaaggcagcatatcattgtatatttgaaactataggaatatatactttgtataaaacttttccaatgatttcagaaattcttttttcctccttttgacccacaactagactgttcataccctaatagttccccaaaattgccttagcatgtcacaccagcatttgtcatccagctctggagaaatgacatgactgttagatactatgcctgtttaattgcctctggattaagtcattgatagctagacttttgagctagttagctgtagaaataatagaatccagtgtttcccaaagtgtgttccaaagaacacaagttccaaagatgctcttctaaatataggattctaggatgaaataagtttggaaaacacataccatcttagaaagttagtgaacatgagcacatcaaaggctctaatttaaatgtcctgtgaggagagaaaaacacaacaaatatctactgtcagttagcccagtgttttccagattaatttgaccacagaaacttttttgagtggcacctagtaacactgcaaggaacttgtgttctaaagaacaccctttgggaaattctggtatattgaaatattgctgtgttttcattcacgatgactcttagtagcagtacaatttgcaacttagaagcatgagcctttcatatatgaagctgacttgttaataaaagcagtgttaagaagtagtatgacttaatatgaccaacagcagcctcatattgatagcagaacaatcctacttaaagctctaaacatcatccccccctttttttttttaacggaatctcgctctgtcacccaggctggaatgccgtggcgcaatgtcaggtcactgcaagctccgcctcccaggttcacaccattctcctgcctcagcctcctgagcagctgggactacaggcggcctccaccacacctggctaattttttgtatttttagtagagacggggtttcaccatgttagccaggatggtcttgatatcctgaccttgtaatccaccagccttggcctcccaaagtgctgggattacaggtgtgagccactgcacccggccatccctttcttttatatgaataatgagcaagagccctgccatagctaaatatgtctcaaattcattccaagatctttccattgcttttttgcagttacctttgctttttgggttgaatcaaaatgaatatttttatatttcattactatatgatatttaaaaatatacagaaaatcacagaaaaggaaaaacagaaatttgattttaattcacttttgaaattttaacgatttttaaaactaatgatctgttatataataactgaaatgtaaactattaacagttatttactttctttcctttattgtcctctctggattcagtgaaataatttgaaatcaattagagctcataccttctaaaactcctgtcccatatcatcccacctttcatgttttatgtacatagttaagtttggcatgttatctcttgcctaaaatgtgaggccttcctgtagttccacagtagttactcttggctgcagaaataggtttgggaagctatgagagattaccccaaagtcatggatgaaacaaatctagtcgaaaacatggtacagagtgaattaaggcaaaagtcattaacttaaaattacatccaatatttaggaatagctcatcctctgcacattatccaaaatattttaaaaaactaaaagtaagatctcttaggctaggtggcggattgcaaagggcagggggcagttgataccatgaagcttccaatagatgcatttctaaacattttttctaatatgtaaatttgctgatccttagtaatgttaatgctttgtctatttgttatttttaccactgttgaacagcaaactgttgaggctagggttgattattgataatttttatgtgtttagtaataaccacagcatcatacgtacaactgctttaataaatccaagttaaggactttgaggagagcatgtagcaagtattcattttaacaaatcatcacagacagtttccctgttcaaagctccaccaaaaagcaagcatgcagcaaaggcatagactgtatttagagatgtggtttcatttattcttgaagtcctataaccttgcattatttaaacacaaaatcccacctaacatttgccaaatccaagttaatctcaaaaacctccgaggacattgagcacaagcagattactgtaagggcactggtggcagattgtggtggagagagggctgagtgacccagagcaaagcctgcccgggttactcgctgccacttcaggagagggattgtatcagctctcattaccttttgtcatgaggcagttcataaattaaatatgatatcatgcattatctcaaaatatttctatattaattagataattcacgatgtaaaacgtgttcatgcagaagcaaaggcggatgtaatagtcaagtatcagggaaaaacccctttaggatacccagacattaaaaatgtaaaaagtagcttataagaaatgtggattatcagatttttactatatataggttgtgtttaatagtaatttctgacacctgcacatagatgaagaaaaggcagttgttaccacttttcaccattcaaaaaatgggcttgtctcttagagtattggttaatgctttgcttatttgttaatgaagacagcattttaattttaaagcttccttttgtaggactgatggcacgggcagaatcacatttaagaaaaatggtttggaacactttttaataaaaaattgtaaaatcagtttccagtgtggtcaaaattagaatgtaaaggaaagcatttttaagaaaatacagaagcccaaatcaagggagagtaatataaaaggaaatattttaaattaagaaaaggaggtgttatagtttattacatcatgaattatgctttctgtacttacgctcttagtgaaggagataacattgaagtgagaaaatgaacattctcagttatttgcgaagttagtaaaattgcagtccctattccatttttttctgatgaaaatggatacatgagatctcatttattgctctcctcaacacctttactgtcccagattccattcacgttccaaatcgtggacagtaaaactgaagtcagataaacacagtcacaggtacaactgggagcgagttttaacatagtggtaattttgcaaatgccaacatgaatactagtgagtactcaatttacgacagacaatttcacaaaaaccaaccacagagtgatttgatattcttgcttcttagagagttttctaatccatataatgcaatgggtcaggttgctcatatgattaaaaaaattaatcctgtagaaatgatgtattagacatctctaacccaagaaaaagatgtcttttgtataacttttaaattcccatttgtctatcttaggacaaatgatgacttcttcgtgtagtaatgaaaacgtctaaatcctgctctgtggagaaaagctagaaccatgggacattaagcaagaatactcctctgatttaggctcccagactacaactaacagtctttatgtatttatcatcttggttattgttttatctcaagcatatacagtgtgcagaaagtagaataatgaataaaatatgaccatggagaaaacccataacttttgcttctattatagaaagcagtgtttgttctttttaatttattacatgttcacattgaaacattaacatctacaatattgtctttcagtttactcttcaattactaaagcaaatgattttgatttatagcacttacacaactgcagttcaggtcacagaattgaaatctatttgataatgtctcagcattctcatgggcagccaggaaaaaaaaaaagagagagaaagacaaatagaaattttagtgggttcagataaatgattattctgacaaacctggaaaatagtaattaaacagttcattccaaaagaccccaatgtaaactctgctcacatacataatttgtataaggaaaatgtatgagtttttttcttaaaaataaatagaagcatcattgcatttataacagattgatcaatcttatgaacagattacattgggaaagtcactattattgctgtgtgtttgtatattttattctttccttttttgtgtgagcatctactatgtgccaggcagtgactgtgtctgagtgaatgtatccatggtgagcactcaggcgccatcactgccttcttggggcttacaccctattggggtgtcagagatattataacactcaatattgacccaatgggatgaaaattgttatcttcatgatttcttccaatgggcttagatttgttgggacagggcagaattagaataattatttctcacatataagagtaagtgatatgagattgggaatttcttgccaacactcaagcaaactgcagaagataattactccattttactagctcacctagtttctgaaggatggggtggggagtgagacatggagcctctggggacaaggataggggggtgggactgtcccagtggagggtgccactggaagcctccacccaagtgggccagcagctgtgcaagggtgcagcagtaggctggtgaaagccaggttgtccagatctttctaggggaagagaaggattatagaaaaggagaaaagggaggagcaagaacatctctccatggcctatttttatttttgttcccaagagactagtgtaataaccttatgcccccaaagacagcccagaactgagtatcttcagtgttcctgagtgtaaatcagtgaatctgttatatagaaagttaacatttcaggagcacaattatttcctgatttcaaatatgaacagaagactaaatgtcatttttttaaatcataaatttggtatccatagttactttacacattccagagtctaagcatggaatttaagttttgtattttgaacaaaaatagcaacatctgttttctgtatggcaaagaaaaactaaatcccagacttttatttttaaccacagaaaccatcacttctttctaaattatttgcttgcctgctcatttcccctaaacatctctgtttatgccaatggctttttaaatccaaataatactagttattgccaaattgcattagaatcctattgaattagaataattcatatacttcatatactaggcagtaaatggttagagacggtaaagatctgattgtgatcaaaagtagggtttttgttttgtttttaatcatgagcacatataaaaggaaattcaaatgaaaccaagccaatttctgatttagtaagattaaaaccatagatggagctcagttattaaggatggaaaggaggaaagcacagagtgaggagagaaaaaggggaaggaaaaaaagtagtgtttttttggggaacagtataatgtctcagaagttcttctctcttatcctgctgatgttgagacagtggctttgtataagcttttatttatacctatttcaacatcatgaaaatttttccatcagcattttcttgcaactttaaaaatcacaagggattatttgtttataaagagatacaggatctataatttattggcaatactttattttaggaatcttcaaattgtacttaataaataaatcacaggtcaaaatgactgtaaaatcaatcaggctttctcgtaagttatttcctgaaaaccatccatgataaatacaacaaggcttggcgaaacctcattactcttggaagtcttcagaggttattatacctactgatctgtatttgtctctaagagacatttgaaacacagttacaatgtcaatttggtgtaacattacctgtagtagagctcagagtatatggcagtgcacggtcactcaagatgcatggcgtgtcatttgggtcgctttgatgggtgctcgggtagaattagccttgtagagactaatgtgttcatgctatctctgatcctgtggtgttgtataaaaatgaacagctaaaaatttacccatgacaagattaaagcaaaaataaacacaaagttgttagactttaaacatga

SEQ ID NO: 171446 - DNA, 1589 bp, Homo sapiens
  Payload ID: 13719
  Gene Symbol: PPM1L
  Gene Name: protein phosphatase, Mg2+/Mn2+ dependent, 1L
  Uniprot ID: Q5SGD2
  ENST ID: ENST00000497343
  CDS Start-End: 708-1292
ccgggaggtgcctgggagaggcaggcagagcccagccggccgcctgcggctcagtaccgaccgtgccgcgtcgccgggctctgcgtacccctgtctctgcccaggctcccgcaaaacttttattctctggggcccccggggtgtgtgaaggaattggaaccttccgccatctccgcgctccccttcggcggcgaccgaggggacctgcgtccctcgtccgccgggctctggagccctgcgcctcacctgctgatcgctctccggagtctcgagggggcacccccggagggaccgcgcgggcgccggcgcccctgaactctcccgctcaccgcggcagacccgcccagcgcaactttaacttgattcttcttgcccaaccggggcaccagcggctgctgctgcggcggctgctgctaccgccgccgccgcggtctcacaaaggggctcagggaagggaggcggcgcgggcggcagggacgggcctccgggccgccgaggcggggagacaaaagggaagctgcctctgctcgcgctgcctgctcggagccgcttgctcggctgcctctggctgggctccgcgatcctctcccccaccctcgggcactgctccgcctccctcccggcgggctgtccccgcagtgctcccggacccggcgagccttcggggcgcgcgtcgctggtggtggttgaggctctagcgataataaatgatagaggatacaatgactttgctgtctctgctgggtcgcatcatgcgctacttcttgctgagacccgagacgcttttcctgctgtgcatcagcttggctctatggagttacttcttccacaccgacgaggtgaagaccatcgtgaagtccagccgggacgccgtgaagatggtgaagggcaaggtagccgagatcatgcagaacgatcgactcggggggcttgatgtgctcgaggccgagttttccaagacctgggagttcaagaaccacaacgtggcggtgtactccatccagggccggagagaccacatggaggaccgcttcgaagttctcacggatctggccaacaagacgcacccgtccatcttcgggatcttcgacgggcacgggggagagactgcagctgaatatgtaaaatctcgactcccagaggcccttaaacagcatcttcaggactacgagaaagacaaagaaaatagtgtattatcttaccagaccatccttgaacagcagattttgtcaattgaccgagaaatgctagaaaaattgactgtatcctatgatgaagcagttactttttgaatgactgcttggagactgcaagtaacaccttagcttcaaaatatctagttcatattaattctaaactaatttcgattttaaacaaagactttgctttaatataccactattccctccccattctctgtgctgttgtcaaccaaattatatgcttatacattataatgtcatcaataatttcataattatttctttatgcatttattttttaaattagaagaaaaaagttaacaaataagatcaaattagaacaaaatataattctttttaaattaaaatcctgcttctgtaaaaaaa

SEQ ID NO: 171447 - DNA, 2735 bp, Homo sapiens
  Payload ID: 13719
  Gene Symbol: PPM1L
  Gene Name: protein phosphatase, Mg2+/Mn2+ dependent, 1L
  Uniprot ID: Q5SGD2
  ENST ID: ENST00000464260
  CDS Start-End: 319-864
atgcaggtggaagagggtaggagggatgctggtgccattagcagagagggctagaccagaacatgcctgctttttcaacacatgtaagaagtgcctttcatctcctgccatgattctgaggcctccccagccatgtggaactggaaatccaattaaacctctttttcttcccagtctcagactgcagctgaatatgtaaaatctcgactcccagaggcccttaaacagcatcttcaggactacgagaaagacaaagaaaatagtgtattatcttaccagaccatccttgaacagcagattttgtcaattgaccgagaaatgctagaaaaattgactgtatcctatgatgaagcaggcacaacgtgtttgattgctctgctatcagataaagacctcactgtggccaacgtgggtgactcgcgcggggtcctgtgtgacaaagatgggaacgctattcctttgtctcatgatcacaagccttaccagttgaaggaaagaaagaggataaagagagcaggtggtttcatcagtttcaatggctcctggagggtccagggaatcctggccatgtctcggtccctgggggattatccgctgaaaaatctcaacgtggtcatcccagacccagacatcctgacctttgacctggacaagcttcagcctgagttcatgatcttggcatcagatggtctctgggatgctttcagcaatgaagaagcagttcgattcatcaaggagcgcttggatgaacctcactttggggccaagagcatagttttacagtcattttacagaggctgccctgacaatataacagtcatggtggtgaagttcagaaatagcagcaaaacagaagagcagtgaacccttcaggggtctcagctgccttagactaaaggactttcaacacactggtctcttttaatttagtgaaaagtgtgggagttgtaattaggatcatccaccccagacatggaatcccccctccctggtggtcttaggtctataatcagtgacgaacagagggtgcccttggccaatgtagttaagaaactggaaaatggtttcttcatgttttcccaactctttcatccagtgtccaaaatatataagtaaatagctgtagagtcacatatatgaagtgaatagcatatgtgtcatttagtctccctgaagattcttttcaagatcctgttcagggtcctccaggcatcagctgttgtgtcctctctttgtaacagtggacaggacagaccacccagtgctgcaggagacaggccactgcgtcacctgtgagtggtcaggggctgatgtggcaacaccctctgccaagagacagagctgtcctgagaatgctttgtccttctgagcccatgttttctgctcagtagcagcttggaagcagatttggaatggtttactattttggctgctcttggggactgcgagaagcagagagaatgagagaccagtggcaactgcctgcacagcagagataaccctcttcccttgcttcctttaatagttaaatagactttgtataccacctgaccagcctttgtgcatttatcctaatcatgcatgaccgttaaccttttgcttagtccttaccatatgtaataggcagctgttaaattcaccaacagataccctgatttttcatcttacgtgaccaagaaaccacgttaggggaaatgaaaaaagcaagccacaataccatgattccttccattttcaacagtagatgaaggaaatgatactgaatgagtcacagtgttccctggcaagtaagctgtttgcattgagaaaggagtgagctggtgaggttaccaccctgaattgagctccagctgccagtttttgtgtttttccttgcccctttccaagtggttttcaagtgtcaggcagtgttctgagaagcagcagcctataactgtatgtgtgttccttgaagccaggtgcagagttcccagctactgcagcttgggatttggtgggaaactactgggataagcttctccttgacaatggaaaggcagcagtcttcaacatttggttgcaaatctccatccacatcagggagctttccccaggcaaatacaaaccgccccgtggcctgcaggcctgcaggggaggcagcaaagggacctggcagttgcaacacagtaagtcaggaattcaagcgtgaacccatattgataagtgggccagaattatttaggggcctggcttgctgctctccatttcctgtatcgctaatttatcatttttccaaccttggtattttatattatttagagaaaatgctgggtcactctctttgcctaaggtgactcaaacagccaaacgaaacttccgttgcctcccagccctctgtatccacctggttttgttctttccctgtgagcatttgtggttatagcttcccatatgccacattcaccggccacctcctcgccgtggaaccctgccctctcccctcctgctgctgtagagttttcccaaagcagtgtccaggagagaatttgagagagtgaagaaattgccttgtagatgtggagggctgcaatctgtcttgatttctccaagcacttaactttctttgactgcactgagaattgctaatgatttcccatgagatttgcttacttttgtatactgtattttccagcattacagaaccttggttattgttttttagccatagaatcttctagtaaaaaatatctgccacc

SEQ ID NO: 171448 - DNA, 2429 bp, Homo sapiens
  Payload ID: 13720
  Gene Symbol: PPM1M
  Gene Name: protein phosphatase, Mg2+/Mn2+ dependent, 1M
  Uniprot ID: Q96MI6
  ENST ID: ENST00000296487
  CDS Start-End: 405-1217
cttgccctcacctccgaatcctgacaacttcccggtcatcccgacccagcgttttccttgggattccgacctccccctcagagaagacaggaggtcgggaaggacctgcagcccaggggcttccaagatgaggcccagagactcggattatcaatgcagagaaatctgaattcaatgaggatcaagccgcctgtgggaagctgtgcatccggagatgtgagtttggggctgaagaagagtggctgaccctgtgcccagaggagttcctgacaggccattactgggcactgttcgatgggcacggcggtcctgcagcagccatcttggctgccaacaccctgcactcctgcttgcgccggcagctggaggccgtggtggaaggcttggtggccactcagccccccatgcacctcaatggccgctgcatctgccccagtgaccctcagtttgtggaggaaaagggcatcagggcagaagacttggtgatcggggcattggagagtgcctttcaggaatgtgatgaggtgatcgggcgggagctggaggcctcaggccagatgggcggctgcacagccctggtggctgtgtccctgcagggaaagctgtacatggccaatgctggggatagcagggccatcttggtgcggagagatgagatacggccactgagcttcgagttcaccccagagactgagcggcagcggatccagcagctggcctttgtctatcctgagcttctggctggtgagttcacccgactggagttccctcggcggctgaagggggatgacttgggacagaaggttttgttcagggatcaccacatgagtggctggagctacaaacgtgtggagaaatcggatctcaagtacccactgatccatggacagggtaggcaggctcggttactaggaacactggctgtctcccggggcctgggagaccatcagctcagagtcctggacacaaacatccagctcaagcccttcttgctctctgtgccacaggtgactgtgctggatgtggaccagctggagctacaggaggatgatgtggttgtcatggcaactgatggactctgggatgtactgtccaacgagcaggtggcatggctggtgcggagcttcctccctgggaaccaagaggacccacacaggtactgtagctgctggggacctgcctgggcctgggttggtgccagcagcaagcccaagtagttatggctgagaagacagagcactgacaatgagctggcagctggccaggatcagggctgtctcaagcttcttggaggaggcagggagaccgtgggttccgaaaatccctggatttagactctcatggtccagcccgtggccctcccagacttgctgcttgcttggtccacagtcggactgcattgcttgggtccccatgtccagccttgtgcagtgagttctcctaaggtctggccttgcccctttgctctgcccctgaagtctatctgcaggatggtcttcacaggttctcaaagctggcccagatgctgatacacagcacacagggaaaggaagacagtctcacagaggaagggcaggtgtcctacgatgacgtctctgtgttcgtgattcccttgcacagtcagggccaagagagcagtgaccactgaggattcagacactgtatcccagaactgctctagtgcccgggtgtggtctgggcatccctccagtgtgaccaagagcaaatcctgcctgccctatccctagccaccgcccagtgctctcactatccacctcaacacacatccatctcaagaggaacatttataccaggcagtcagagctggaagtgtatggagagcccagcccaccaggtcctgccttttgcggtgataaccttctctggcagagtgactttacaacttaactaggaaacccatgtgaggctcctcagacaggatcttgaacagcccaaagtatcattctcagataggggcacccaagctaagggtattagccaaagatgccaggatgggtagctagcccatgtttagatccaggtctccaattcatggttatcagggcatgtgttcaacaacccccaaagtccacgcaggtggcttgtagaaacctttgggcagcctcatgtctgctaaaacagccatcttcaagacagcccctgaaaagagaccagttcaggtcctgccctgctgttctttgctggagatgaggaacaggtgctggggctaaagtttggggtagagcacaagggacaagaggaactcttggagttggctgggtgagagggctctccatttgctacctgtagtagcctgcctcttaactggttgcttctccctagttccagccctgccctggtctgatgccccaacactgcccttgctttgttttccctgtcacctccctattattaaatgttttctacag

SEQ ID NO: 171449 - DNA, 2193 bp, Homo sapiens
  Payload ID: 13720
  Gene Symbol: PPM1M
  Gene Name: protein phosphatase, Mg2+/Mn2+ dependent, 1M
  ENST ID: ENST00000323588
  CDS Start-End: 33-1412
gcgctccgcgggcagccccctgccgccgcgccatgtccgccggctggttccggcgccgcttcctgcctggggagccgctccccgcgccgcggccgcctgggccgcatgccagccccgtgccctaccgacggccccgcttccttcgcggctccagctccagccccggggcggccgacgcctcgcgccgcccagactcccggcccgtgcgcagccccgcacgaggacgcacgctaccctggaatgcaggctacgccgagattatcaatgcagagaaatctgaattcaatgaggatcaagccgcctgtgggaagctgtgcatccggagatgtgagtttggggctgaagaagagtggctgaccctgtgcccagaggagttcctgacaggccattactgggcactgttcgatgggcacggcggtcctgcagcagccatcttggctgccaacaccctgcactcctgcttgcgccggcagctggaggccgtggtggaaggcttggtggccactcagccccccatgcacctcaatggccgctgcatctgccccagtgaccctcagtttgtggaggaaaagggcatcagggcagaagacttggtgatcggggcattggagagtgcctttcaggaatgtgatgaggtgatcgggcgggagctggaggcctcaggccagatgggcggctgcacagccctggtggctgtgtccctgcagggaaagctgtacatggccaatgctggggatagcagggccatcttggtgcggagagatgagatacggccactgagcttcgagttcaccccagagactgagcggcagcggatccagcagctggcctttgtctatcctgagcttctggctggtgagttcacccgactggagttccctcggcggctgaagggggatgacttgggacagaaggttttgttcagggatcaccacatgagtggctggagctacaaacgtgtggagaaatcggatctcaagtacccactgatccatggacagggtaggcaggctcggttactaggaacactggctgtctcccggggcctgggagaccatcagctcagagtcctggacacaaacatccagctcaagcccttcttgctctctgtgccacaggtgactgtgctggatgtggaccagctggagctacaggaggatgatgtggttgtcatggcaactgatggactctgggatgtactgtccaacgagcaggtggcatggctggtgcggagcttcctccctgggaaccaagaggacccacacaggttctcaaagctggcccagatgctgatacacagcacacagggaaaggaagacagtctcacagaggaagggcaggtgtcctacgatgacgtctctgtgttcgtgattcccttgcacagtcagggccaagagagcagtgaccactgaggattcagacactgtatcccagaactgctctagtgcccgggtgtggtctgggcatccctccagtgtgaccaagagcaaatcctgcctgccctatccctagccaccgcccagtgctctcactatccacctcaacacacatccatctcaagaggaacatttataccaggcagtcagagctggaagtgtatggagagcccagcccaccaggtcctgccttttgcggtgataaccttctctggcagagtgactttacaacttaactaggaaacccatgtgaggctcctcagacaggatcttgaacagcccaaagtatcattctcagataggggcacccaagctaagggtattagccaaagatgccaggatgggtagctagcccatgtttagatccaggtctccaattcatggttatcagggcatgtgttcaacaacccccaaagtccacgcaggtggcttgtagaaacctttgggcagcctcatgtctgctaaaacagccatcttcaagacagcccctgaaaagagaccagttcaggtcctgccctgctgttctttgctggagatgaggaacaggtgctggggctaaagtttggggtagagcacaagggacaagaggaactcttggagttggctgggtgagagggctctccatttgctacctgtagtagcctgcctcttaactggttgcttctccctagttccagccctgccctggtctgatgccccaacactgcccttgctttgttttccctgtcacctccctattattaaatgttttctacag

SEQ ID NO: 171450 - DNA, 1790 bp, Homo sapiens
  Payload ID: 13720
  Gene Symbol: PPM1M
  Gene Name: protein phosphatase, Mg2+/Mn2+ dependent, 1M
  Uniprot ID: Q96MI6
  ENST ID: ENST00000409502
  CDS Start-End: 264-1007
cccgacccagcgttttccttgggattccgacctccccctcagagaagacaggaggtcgggaaggacctgcagcccaggggcttccaagatgaggcccagagactcggattatcaatgcagagaaatctgaattcaatgaggatcaagccgcctgtgggaagctgtgcatccggagatgtgagtttggggctgaagaagagtggctgaccctgtgcccagaggaggatgaggtgatcgggcgggagctggaggcctcaggccagatgggcggctgcacagccctggtggctgtgtccctgcagggaaagctgtacatggccaatgctggggatagcagggccatcttggtgcggagagatgagatacggccactgagcttcgagttcaccccagagactgagcggcagcggatccagcagctggcctttgtctatcctgagcttctggctggtgagttcacccgactggagttccctcggcggctgaagggggatgacttgggacagaaggttttgttcagggatcaccacatgagtggctggagctacaaacgtgtggagaaatcggatctcaagtacccactgatccatggacagggtaggcaggctcggttactaggaacactggctgtctcccggggcctgggagaccatcagctcagagtcctggacacaaacatccagctcaagcccttcttgctctctgtgccacaggtgactgtgctggatgtggaccagctggagctacaggaggatgatgtggttgtcatggcaactgatggactctgggatgtactgtccaacgagcaggtggcatggctggtgcggagcttcctccctgggaaccaagaggacccacacaggttctcaaagctggcccagatgctgatacacagcacacagggaaaggaagacagtctcacagaggaagggcaggtgtcctacgatgacgtctctgtgttcgtgattcccttgcacagtcagggccaagagagcagtgaccactgaggattcagacactgtatcccagaactgctctagtgcccgggtgtggtctgggcatccctccagtgtgaccaagagcaaatcctgcctgccctatccctagccaccgcccagtgctctcactatccacctcaacacacatccatctcaagaggaacatttataccaggcagtcagagctggaagtgtatggagagcccagcccaccaggtcctgccttttgcggtgataaccttctctggcagagtgactttacaacttaactaggaaacccatgtgaggctcctcagacaggatcttgaacagcccaaagtatcattctcagataggggcacccaagctaagggtattagccaaagatgccaggatgggtagctagcccatgtttagatccaggtctccaattcatggttatcagggcatgtgttcaacaacccccaaagtccacgcaggtggcttgtagaaacctttgggcagcctcatgtctgctaaaacagccatcttcaagacagcccctgaaaagagaccagttcaggtcctgccctgctgttctttgctggagatgaggaacaggtgctggggctaaagtttggggtagagcacaagggacaagaggaactcttggagttggctgggtgagagggctctccatttgctacctgtagtagcctgcctcttaactggttgcttctccctagttccagccctgccctggtctgatgccccaacactgcccttgctttgttttccctgtcacctccctattattaaatgttttctacagaa

SEQ ID NO: 171451 - DNA, 398 bp, Homo sapiens
  Payload ID: 13720
  Gene Symbol: PPM1M
  Gene Name: protein phosphatase, Mg2+/Mn2+ dependent, 1M
  ENST ID: ENST00000443681
  CDS Start-End: 1-364
gttactaggaacactggctgtctcccggggcctgggagaccatcagctcagagtcctggacacaaacatccagctcaagcccttcttgctctctgtgccacaggtgactgtgctggatgtggaccagctggagctacaggaggatgatgtggttgtcatggcaactgatggactctgggatgtactgtccaacgagcaggtggcatggctggtgcggagcttcctccctgggaaccaagaggacccacacagtctatctgcaggatggtcttcacaggttctcaaagctggcccagatgctgatacacagcacacagggaaaggaagacagtctcacagaggaagggcaggtgtcctacgatgacgtctctgtgttcgtgattcccttgcacagtcag

SEQ ID NO: 171452 - DNA, 770 bp, Homo sapiens
  Payload ID: 13720
  Gene Symbol: PPM1M
  Gene Name: protein phosphatase, Mg2+/Mn2+ dependent, 1M
  ENST ID: ENST00000457454
  CDS Start-End: 1-770
cgcctgggccgcatgccagccccgtgccctaccgacggccccgcttccttcgcggctccagctccagccccggggcggccgacgcctcgcgccgcccagactcccggcccgtgcgcagccccgcacgaggacgcacgctaccctggaatgcaggctacgccgagattatcaatgcagagaaatctgaattcaatgaggatcaagccgcctgtgggaagctgtgcatccggagatgtgagtttggggctgaagaagagtggctgaccctgtgcccagaggaggatgaggtgatcgggcgggagctggaggcctcaggccagatgggcggctgcacagccctggtggctgtgtccctgcagggaaagctgtacatggccaatgctggggatagcagggccatcttggtgcggagagatgagatacggccactgagcttcgagttcaccccagagactgagcggcagcggatccagcagctggcctttgtctatcctgagcttctggctggtgagttcacccgactggagttccctcggcggctgaagggggatgacttgggacagaaggttttgttcagggatcaccacatgagtggctggagctacaaacgtgtggagaaatcggatctcaagtacccactgatccatggacagggtaggcaggctcggttactaggaacactggctgtctcccggggcctgggagaccatcagctcagagtcctggacacaaacatccagctcaagcccttcttgctctctgtgccacag

SEQ ID NO: 171453 - DNA, 895 bp, Homo sapiens
  Payload ID: 13721
  Gene Symbol: PPM1N
  Gene Name: protein phosphatase, Mg2+/Mn2+ dependent, 1N (putative)
  Uniprot ID: Q8N819
  ENST ID: ENST00000396735
  CDS Start-End: 132-470
gggagagttagtggaagggacttaagagaaagggcgtggtcttttggaaaggggcgattctgggtcgtaggagccgggccggaagtattgattagtgctggaaggtggaagagcagggcagcctggacaacatgacctgcatcctggtctgcttccctggggcccctaggccttctgaggaggcgatcaggagggagctagcactggacgcagccctgggctgcagaatcgctgaactgtgtgcctctgctcagaagccccccagcctgaacacagttttcaggactctggcctcagaggacatcccagatttacctcctgggggagggctggactgcaaggccactgtcattgctgaagtttattctcagatctgccaggtctcagaagagtgcggagagaaggggcaggatggggctgggaagtccaaccccacgcatttgggctcagccttggacatggaggcctgacagctgttgtcctttggggatcctttgcttctctggggcctcaacagaactaaagaagaaaaccgaccctttccccaactacatgtaccagcggaaggaaggaaggccaatgtaggaacccaaaatgcttatttcttcttctcttacttccctctcacagaaaagtcttacgaatggggaaattccaccaacatccagaccaaaaagaaaaaagcccaaatcgaaaaaaaaaaaaaaaaaaaaaaaaaacaaaaaaacccaaccaaatgtttttgaaatattcagagccgaacagattctgagagataacccagtccaataacctctttccttcttattactcatctgtttttgaggggaagtagagttttgattattaaactttatttacataagtgattccaaatacattttcttgtaaaaaa

SEQ ID NO: 171454 - DNA, 527 bp, Homo sapiens
  Payload ID: 13721
  Gene Symbol: PPM1N
  Gene Name: protein phosphatase, Mg2+/Mn2+ dependent, 1N (putative)
  ENST ID: ENST00000396736
  CDS Start-End: 4-417
aacatgacctgcatcctggtctgcttccctggggcccctaggccttctgaggaggcgatcaggagggagctagcactggacgcagccctgggctgcagaatcgctgaactgtgtgcctctgctcagaagccccccagcctgaacacagttttcaggactctggcctcagaggacatcccagatttacctcctgggggagggctggactgcaagtctcagaagagtgcggagagaaggggcaggatggggctgggaagtccaaccccacgcatttgggctcagccttggacatggaggcctgacagctgttgtcctttggggatcctttgcttctctggggcctcaacagaactaaagaagaaaaccgaccctttccccaactacatgtaccagcggaaggaaggaaggccaatgtaggaacccaaaatgcttatttcttcttctcttacttccctctcacagaaaagtcttacgaatggggaaattccaccaacatccagaccaaaaagaaaaaagcccaaatcgaa

SEQ ID NO: 171455 - DNA, 872 bp, Homo sapiens
  Payload ID: 13721
  Gene Symbol: PPM1N
  Gene Name: protein phosphatase, Mg2+/Mn2+ dependent, 1N (putative)
  Uniprot ID: Q8N819
  ENST ID: ENST00000396737
  CDS Start-End: 109-447
gggaagagggaaggaggcctggagtctggcgagggacttgggagaggatggtgaacgagccacggcagagaggatgagagcgtggatccctggggcagcctggacaacatgacctgcatcctggtctgcttccctggggcccctaggccttctgaggaggcgatcaggagggagctagcactggacgcagccctgggctgcagaatcgctgaactgtgtgcctctgctcagaagccccccagcctgaacacagttttcaggactctggcctcagaggacatcccagatttacctcctgggggagggctggactgcaaggccactgtcattgctgaagtttattctcagatctgccaggtctcagaagagtgcggagagaaggggcaggatggggctgggaagtccaaccccacgcatttgggctcagccttggacatggaggcctgacagctgttgtcctttggggatcctttgcttctctggggcctcaacagaactaaagaagaaaaccgaccctttccccaactacatgtaccagcggaaggaaggaaggccaatgtaggaacccaaaatgcttatttcttcttctcttacttccctctcacagaaaagtcttacgaatggggaaattccaccaacatccagaccaaaaagaaaaaagcccaaatcgaaaaaaaaaaaaaaaaaaaaaaaaaacaaaaaaacccaaccaaatgtttttgaaatattcagagccgaacagattctgagagataacccagtccaataacctctttccttcttattactcatctgtttttgaggggaagtagagttttgattattaaactttatttacataagtgattccaaatacattttcttgtaaaaaa

SEQ ID NO: 171456 - DNA, 771 bp, Homo sapiens
  Payload ID: 13721
  Gene Symbol: PPM1N
  Gene Name: protein phosphatase, Mg2+/Mn2+ dependent, 1N (putative)
  Uniprot ID: Q8N819
  ENST ID: ENST00000401705
  CDS Start-End: 219-557
tcgccctcccaccccctagccatgcagaggtgaatgggggaacccaggaggggctgagagctccaggccaccttgagggaatccacgaggtcttctaccaggaagaagtgccgcagctgcgtggccgccgagaccacgcgggaggtgatctggtgggacaaacgttccgtctgctcccgagtcagggtgaggtccacatccagggcagcctggacaacatgacctgcatcctggtctgcttccctggggcccctaggccttctgaggaggcgatcaggagggagctagcactggacgcagccctgggctgcagaatcgctgaactgtgtgcctctgctcagaagccccccagcctgaacacagttttcaggactctggcctcagaggacatcccagatttacctcctgggggagggctggactgcaaggccactgtcattgctgaagtttattctcagatctgccaggtctcagaagagtgcggagagaaggggcaggatggggctgggaagtccaaccccacgcatttgggctcagccttggacatggaggcctgacagctgttgtcctttggggatcctttgcttctctggggcctcaacagaactaaagaagaaaaccgaccctttccccaactacatgtaccagcggaaggaaggaaggccaatgtaggaacccaaaatgcttatttcttcttctcttacttccctctcacagaaaagtcttacgaatggggaaattccaccaacatccagaccaaaaagaaaaaag

SEQ ID NO: 171457 - DNA, 548 bp, Homo sapiens
  Payload ID: 13721
  Gene Symbol: PPM1N
  Gene Name: protein phosphatase, Mg2+/Mn2+ dependent, 1N (putative)
  ENST ID: ENST00000401593
  CDS Start-End: 16-438
ggcagcctggacaacatgacctgcatcctggtctgcttccctggggcccctaggccttctgaggaggcgatcaggagggagctagcactggacgcagccctgggctgcagaatcgctgaactgtgtgcctctgctcagaagccccccagcctgaacacagttttcaggactctggcctcagaggacatcccagatttacctcctgggggagggctggactgcaaatctgccaggtctcagaagagtgcggagagaaggggcaggatggggctgggaagtccaaccccacgcatttgggctcagccttggacatggaggcctgacagctgttgtcctttggggatcctttgcttctctggggcctcaacagaactaaagaagaaaaccgaccctttccccaactacatgtaccagcggaaggaaggaaggccaatgtaggaacccaaaatgcttatttcttcttctcttacttccctctcacagaaaagtcttacgaatggggaaattccaccaacatccagaccaaaaagaaaaaagcccaaatcgaa

SEQ ID NO: 171458 - DNA, 618 bp, Homo sapiens
  Payload ID: 13721
  Gene Symbol: PPM1N
  Gene Name: protein phosphatase, Mg2+/Mn2+ dependent, 1N (putative)
  ENST ID: ENST00000456399
  CDS Start-End: 124-516
gcagagggcgcagcctttaggggaagagggaaggaggcctggagtctggcgagggacttgggagaggatggtgaacgagccacggcagagaggatgagagcgtggatccctggcctggacaacatgacctgcatcctggtctgcttccctggggcccctaggccttctgaggaggcgatcaggagggagctagcactggacgcagccctgggctgcagaatcgctgaactgtgtgcctctgctcagaagccccccagcctgaacacagttttcaggactctggcctcagaggacatcccagatttacctcctgggggagggctggactgcaaaaggggcaggatggggctgggaagtccaaccccacgcatttgggctcagccttggacatggaggcctgacagctgttgtcctttggggatcctttgcttctctggggcctcaacagaactaaagaagaaaaccgaccctttccccaactacatgtaccagcggaaggaaggaaggccaatgtaggaacccaaaatgcttatttcttcttctcttacttccctctcacagaaaagtcttacgaatggggaaattccaccaacatccagaccaaaaagaaaaaagccc

SEQ ID NO: 171459 - DNA, 1293 bp, Homo sapiens
  Payload ID: 13721
  Gene Symbol: PPM1N
  Gene Name: protein phosphatase, Mg2+/Mn2+ dependent, 1N (putative)
  Uniprot ID: Q8N819
  ENST ID: ENST00000451287
  CDS Start-End: 1-1293
atggcggtcctggcccgccagctgcagcgtctcctctggaccgcttgcaagaaaaaggagagggagaaggaggggagggaggaagaggaggaggaggaggcggggcgcagggcccccgaagggcctcggtctctgttgacagcgccgcgccgcgcccagcggccgcacgggggtgccgaggcgtctgggggcctgcgcttcggggcgagcgcagcgcaaggctggcgcgcgcgcatggaggatgctcactgcacttggctttcgttacctggtctgcccccgggctgggccttgtttgccgtcctcgacggccacggtggggctcgagctgcccgcttcggtgcacgccatttgccaggccatgtgctccaggagctgggcccggagcctagcgagcccgagggcgtgcgcgaggcgctgcgccgagccttcttgagcgccgacgagcgcctgcgctccctctggccccgcgtggaaacgggcggctgcacggccgtggtgttgctggtctccccgcggtttctgtacctggcgcactgcggtgactcccgcgcggtgctgagccgcgctggcgccgtggccttcagcacagaggaccaccggccccttcgaccccgggaacgcgagcgcatccacgccgctggcggcaccatccgccgccgccgcgtcgagggctctctggccgtgtcgcgagcgttgggcgactttacctacaaggaggctccggggaggccccccgagctacagctcgtttctgcggagccagaggtggccgcactggcacgccaggctgaggacgagttcatgctcctggcctctgatggcgtctgggacactgtgtctggtgctgccctggcgggactggtggcttcacgcctccgcttgggcctggccccagagcttctctgcgcgcagctgttggacacgtgtctgtgcaagggcagcctggacaacatgacctgcatcctggtctgcttccctggggcccctaggccttctgaggaggcgatcaggagggagctagcactggacgcagccctgggctgcagaatcgctgaactgtgtgcctctgctcagaagccccccagcctgaacacagttttcaggactctggcctcagaggacatcccagatttacctcctgggggagggctggactgcaaggccactgtcattgctgaagtttattctcagatctgccaggtctcagaagagtgcggagagaaggggcaggatggggctgggaagtccaaccccacgcatttgggctcagccttggacatggaggcctga

SEQ ID NO: 171460 - DNA, 1953 bp, Homo sapiens
  Payload ID: 13721
  Gene Symbol: PPM1N
  Gene Name: protein phosphatase, Mg2+/Mn2+ dependent, 1N (putative)
  ENST ID: ENST00000415077
  CDS Start-End: 1-1123
gttgacagcgccgcgccgcgcccagcggccgcacgggggtgccgaggcgtctgggggcctgcgcttcggggcgagcgcagcgcaaggctggcgcgcgcgcatggaggatgctcactgcacttggctttcgttacctggtctgcccccgggctgggccttgtttgccgtcctcgacggccacggtggggctcgagctgcccgcttcggtgcacgccatttgccaggccatgtgctccaggagctgggcccggagcctagcgagcccgagggcgtgcgcgaggcgctgcgccgagccttcttgagcgccgacgagcgcctgcgctccctctggccccgcgtggaaacgggcggctgcacggccgtggtgttgctggtctccccgcggtttctgtacctggcgcactgcggtgactcccgcgcggtgctgagccgcgctggcgccgtggccttcagcacagaggaccaccggccccttcgaccccgggaacgcgagcgcatccacgccgctggcggcaccatccgccgccgccgcgtcgagggctctctggccgtgtcgcgagcgttgggcgactttacctacaaggaggctccggggaggccccccgagctacagctcgtttctgcggagccagaggtggccgcactggcacgccaggctgaggacgagttcatgctcctggcctctgatggcgtctgggacactgtgtctggtgctgccctggcgggactggtggcttcacgcctccgcttgggcctggccccagagcttctctgcgcgcagctgttggacacgtgtctgtgcaaggtcctgggggcgtggcgtggtacctttggggcttggtgcagcagagggagagagcctcggggttttggggaggagggctttgatagagaggcaagagtaaagctagcaaaggaggggataggactcaagcgaagggcgtggcctgaagtgggcagggccaaaatacaggggcggagcctgagggatgctttgaggcacgggagagttagtggaagggacttaagagaaagggcgtggtcttttggaaaggggcgattctgggtcgtaggagccgggccggaagtattgattagtgctggaaggtggaagagcaggtaaacatcagagcgggcggagctttagggaaaaggcattgttctctcaattgggagcgcctaggaccgggtttggtcccagtaagagaggattggcaggtgggtgggacgcgaaagaaatgggcataagtagaatgaagtgggggacttgaacctggggattgttgggaagctctgccttggactctcccccaccgggctcctttttctccaccggcttcagggcagcctggacaacatgacctgcatcctggtctgcttccctggggcccctaggccttctgaggaggcgatcaggagggagctagcactggacgcagccctgggctgcagaatcgctgaactgtgtgcctctgctcagaagccccccagcctgaacacagttttcaggactctggcctcagaggacatcccagatttacctcctgggggagggctggactgcaaggccactgtcattgctgaagtttattctcagatctgccaggtctcagaagagtgcggagagaaggggcaggatggggctgggaagtccaaccccacgcatttgggctcagccttggacatggaggcctgacagctgttgtcctttggggatcctttgcttctctggggcctcaacagaactaaagaagaaaaccgaccctttccccaactacatgtaccagcggaaggaaggaaggccaatgtaggaacccaaaatgcttatttcttcttctcttacttccctctcacagaaaagtcttacgaatggggaaattccaccaacatccagaccaaaaagaaaaaagcccaaatcgaaaaaaaaaaaaaaaaaaaaaaaaaacaaaaaaa

SEQ ID NO: 171461 - DNA, 1417 bp, Homo sapiens
  Payload ID: 13722
  Gene Symbol: PTAR1
  Gene Name: protein prenyltransferase alpha subunit repeat containing 1
  Uniprot ID: Q7Z6K3
  ENST ID: ENST00000340434
  CDS Start-End: 5-1213
caacatggccgagaccagcgaggaggtggcggtgctggtgcagcgggttgtgaaggacatcactaacgccttcaggaggaacccacacatagatgaaattggcctgatcccatgtcctgaagctaggtataaccggagtcccatagtcctggttgaaaacaaactgggtgtggagagctggtgtgtcaagttccttttaccatatgtccacaacaagctccttttgtacagaacaagaaagcaatggctgaacagagatgaattgatagatgtcacatgtaccctgctgcttctaaacccagactttaccactgcatggaacgtgaggaaagagctgatcctctctggcactttaaatccaattaaggatttacatctgggaaaactcgccttaaccaagtttccaaagagtccagaaacatggattcacaggcgatgggtgctacaacagctaattcaggaaacctccttgccttcctttgtgaccaaaggaaacttgggaacaattcccacagaaagggcacagcgactcatacaagaagagatggaggtctgtggtgaagcagcagggagatacccaagcaactataatgcttggtcccatcgcatctgggttttacagcacttggccaagctagatgtcaagattcttcttgatgaactatcttctactaaacattgggcatctatgcacgtttcagaccacagtggatttcactaccgccagtttttgcttaagtctttgattagccaaactgtgatagacagttctgtgatggagcaaaatcctttgagaagtgagccagccctagttcctccaaaagatgaagaagcagcagtttcaacagaagaaccaaggattaatcttccccatcttctagaagaagaagttgaattcagcactgatcttattgattcctacccaggacatgaaaccctttggtgtcataggcggcatattttctaccttcagcatcacttaaatgcaggctcccagctgtctcaagcaatggaagtagatggactgaatgactctagcaagcaaggctattcccaggaaaccaaacgcctgaagcggacgccagttccagactccctaggcctagaaatggagcacaggttcattgatcaagtattgtccacctgtcggaacgtggagcaagccaggtttgccagtgcatacaggaaatggctggttactttgagtcaatgaaagaggtgaattagtcctacaaggttccccttttagtgcaatattgctttcttttattatttacatagttgcatgaactgtttactattattggctaaccatatgttcttcgtctttaggttgaaagtccatagtaaatctttcattttatttattttgttaataactggcattcctgtggggataaaataatcgtatagttcc

SEQ ID NO: 171462 - DNA, 9876 bp, Homo sapiens
  Payload ID: 13722
  Gene Symbol: PTAR1
  Gene Name: protein prenyltransferase alpha subunit repeat containing 1
  ENST ID: ENST00000377200
  CDS Start-End: 4-1056
aacatggccgagaccagcgaggaggtggcggtgctggtgcagcgggttgtgaaggacatcactaacgccttcaggaggaacccacacatgaaagagctgatcctctctggcactttaaatccaattaaggatttacatctgggaaaactcgccttaaccaagtttccaaagagtccagaaacatggattcacaggcgatgggtgctacaacagctaattcaggaaacctccttgccttcctttgtgaccaaaggaaacttgggaacaattcccacagaaagggcacagcgactcatacaagaagagatggaggtctgtggtgaagcagcagggagatacccaagcaactataatgcttggtcccatcgcatctgggttttacagcacttggccaagctagatgtcaagattcttcttgatgaactatcttctactaaacattgggcatctatgcacgtttcagaccacagtggatttcactaccgccagtttttgcttaagtctttgattagccaaactgtgatagacagttctgtgatggagcaaaatcctttgagaagtgagccagccctagttcctccaaaagatgaagaagcagcagtttcaacagaagaaccaaggattaatcttccccatcttctagaagaagaagttgaattcagcactgatcttattgattcctacccaggacatgaaaccctttggtgtcataggcggcatattttctaccttcagcatcacttaaatggtaggtttcctcacagcatgacccagttgtcacctgcagacagccctggggggactttgagtgacttgcaccttatcccagcaggctcccagctgtctcaagcaatggaagtagatggactgaatgactctagcaagcaaggctattcccaggaaaccaaacgcctgaagcggacgccagttccagactccctaggcctagaaatggagcacaggttcattgatcaagtattgtccacctgtcggaacgtggagcaagccaggtttgccagtgcatacaggaaatggctggttactttgagtcaatgaaagaggtgaattagtcctacaaggttccccttttagtgcaatattgctttcttttattatttacatagttgcatgaactgtttactattattggctaaccatatgttcttcgtctttaggttgaaagtccatagtaaatctttcattttatttattttgttaataactggcattcctgtggggataaaataatcgtatagttccttcctgctgaacagcgagtcttaaattttctgtttaacttctcaccctttgtatttctatatgtggggcttctcatttggttttcctgattggttcacacacacacacctctacccccctcagtccaattgctgcataggcaaattcttttaaaaattaaaaatttaaggcctaggcaggaggattgcctgagcccaggactttgagaccaacctgggccacatagcaagacccgatttctacaaaaagtaaaacaaaatagctaggcatggtgctatgcaactgtgttcctagctatgcaggaagctgaggcagaaggattgcttgagccccaggtgtttgtggctgtagtgagccatgattgcaccactgtactcagcctgggcaatagagttgagaccctgtctctaaaacaaattgaaaataaacatttatgttgcagttcaactgaagaatgttggtatgaatgccgaataacttgatgtaattgttttgagaatcaaatggctagatgggcgaatgtttaaaaatgtaaactagttctctttctctagcatgttctacccaattaccaaagtcagaagtattggaatttatatgaaaaaaatgcttccaatgtaatccattttttaaatggttatttaagaaaaaactaacttaagagtttatgtaattgcagtaaaggaaaattatttttattgctagttttgatagattatttttacctcaaatttggtatatgccaaaacacatcagtccttataaaattgatttttttttcctgaaaacctggaatgccatttttagctattactactttttaatttcaaattcacttatgacaaatgggagaaatatataaagaaatagatccataaaaatattcctttttaaaaatctaaattattgaggatacactatggaaactataaaattatcatgaagtgactgttaaagtttactggcaaatgccaagggaaggaatagtatgtgcaaaacaaaacactttgatactgaacttaatcagggatgaggtaccaaagtatccacattatagccgtatcttatgtttccaataacaagggctgagtttttcaggtaggtgggatgagggtggggaatgggccatgtaatgtctgctttcttatatttgcccttttgtaagtggtctgtttcttcttttcatatactttgttttgccaatccattacgtattttttgtcacttttgtgtgtcatttttgtatacctttcctttcttacttcaggggtgtgtcttcaagatttctaccccctatttgcaatgaatttcatacctcatctaaaatacattcatataccagaaatatgaagagtggcccttctaaaagtttccctaatgatggaagctgtcagttgtcctatctgtgcagaatgtgagtaatagtggcagaaataagtgtgacaacaatgctttgcctgttgttctttttacttgctaggtaatttgtaaagtggggataaagatgtagggaaagtaaacctctctctcactgttacggaaagcctggacttgagttaggtagactgccttaaagaagaagaaatatgtccttttctttggcatcatggttttgttgagtggcagactgttgaagtgagttgagacttaagaacgccagaaaagttgtctagcctggccccagtagacagaatttgttcttctctcaagtaaaaaattacctttttatagcttttatattatttagatgaaaaaataccattatgaacataattccatggccctttgtgtacaaagcatattttgaattaaatacctcaaggtccacctagacctctatggataaaatcataagtttatgatttttagctcctgtgagtgtttgggggcaaactacacagagaagacatgggtggttcagcccattccactaaaatatgttgccagattctggcctaactcagtattaccttttttcctaaaaatcatttttcacattttgagtaatagggcttatgctttgatgtgaaaaaatgtcaggaaatgagtgtagacaataccctataaaacactagctaagttttatagtgctccatgcctttgtgtaccttccactgattatcttgcctatctttggtgtgtaaactattttcatatcttctaaggctcttaacccactcttttctgaagccgcacagtcctttaatatgtcttgtttccttcctaaaagtttaaagtagagagcaaaaatgcaaatacccaaaggatactgttagtatgtaacttttgtgtgctgctttatttctagagtttgcattttttaattgttcattcacagaaaatcctaatattgccctatatggttggtttttttcctaagtggttaatatttaaacccgctagctgtagcatgataatgtctttgactgagcttatgtagtagaaaggatgtgtctgttttctgggacttttagtcttcacttatttttctataacaatctaattgttaaaaggaaaagatggcttattgacacatatttcattaaactttcactggaagaacagtgggtcatcctactgtggattaagaatactactgacaagcaaaaagcattaagctctgtaactgtctccaacaccaccttcaccccgcctttagtgtaccttagtgtactttagtgtacctattttggcagtacggtgttttccagattctacttgtgccctgcacattgtgaggactcattaaatatttattaaattaatgaatgactaacaggaagagaaagattgtttgtgagtgttaagaatgagtgatgattgagaaattgatggattagtgcaatggattgggaatgaatgatgctttctagtttcgtaatacttgggaagagctattgcatatagagtaagttgatttagactttttttttcttcatttcattaccttgtttaaacttgttaaatcccagccaagaaatgcagctctgtaattgtcaattaactgtattataatatatattaaaaatttgtagagctaaagaacccacttgcattaagaacaccactttctgttcatttgtgatactagaggacagatcctgcatacagagccgaaactgcttttaatcatctgaagaaattctttgatttcagtgacttactgatctgtacctgtgcacatatcattttatgcttctccttttttccccgcaacttgaactgtgactctttcagatatttcttaaatctgtatgagtcattttttaagcttagggatttgatatgtattaatgtcccctttgtcttctgtagattttagcattttattacctcttaagaaactctgggcccagactttcagtcatatttcttattcctatggtacagttctcacttaaaggcttaattattagtagggttaaatatatacaggttatctctaaaagtacttaaatttttaaataagggcttatgtgatacaagatacggaaacaaaagtttttggatttttatgcagtagtttgcaggaaagcaaatacatagtagatcgtatgccacttaggtatgttcaggtcatgccagtttattcttgttgggccacacacacatgtatgtgtgtgtaaaaggaatttttagtattgaagcaaacaaattgtcagtttaataattttctcttacatagcacaagatggcagataccacctactgtacaacaatctaataatccctaccttagttcccctgagttatagaagatgctaaagatttagttgtaaagggaagtaacatgattttttttttctaaaaagctgttttaagctaactattattttgctactggaaaattatattttaaaacttacagatatttaaagtatgctagaaaatttgaacctgataacaactgaaccttttgtcttgaataaatttctcaaatagaactgtgcaaaccctagcactttatgtgttgctgcctccccatacctaggtatgctctgtaataagctcccatttaatggagagatgtgtggaggcactgagaagttaatgaagaaaaatcaaccctaagaattccttattgtcacatagtgtcttttaaaaaataactgtagagactgtgttaattcgagtgcctttcttacttttttgggagcaagattatatttaatgtttaagaaaacaggatggaagttttatcaaacagttgattgtggcccattgttttatttattcccatcgctaggcatggccccgtagggtattttatccttcagtgagagactgatataagcaggcaggatgctttgattattccattagttatcattttaagcaccctaccaagatttagttctttctttctggcaactaacgttttgggggttggaggcatcccatttagaggatggtgtgtgcacaaatagattagcctgaaacctgcgtccaaagggaaacagtggcactctgccctaaaataaaggccagaacgttgtcctaaatgaatcctttgccttactttaggaccttccttccctctcaaattcaggcataatgtaatatagttgaaagggggaaaacagtacttgctttctctcaggtattggaggaaaagaagtaaatgcgtagatgaaattttaaatgtatcattttatctgtttgtatatggagaagggagggataggaattccatatttcaagatagcaaatataatttcatagaaatatatagctaaagattccaaagtgcttttacagagaactgttgaataatatattcctaaagggcagcaatatgccatgttcatggtgaagacagaaaaccaatgaatcagttgtggatctcaggtgggagaggaaacctcaggctcccaactttgacttctctactctcaccaggccatgttaacactgtaaaaccaaactctttgctaagaacaatacagggcagtagtttagtctgctgatgaaaccttgtgcttccaagaatattagctatatataatttgtgctttctggatgattctattgtccagaaagctaaccctgacgttacttttattagtctgttgttattcctcagggtgtagaagatttagtaaattcaggacaaattttatattcagtggcaaaaagaaaaggcaaaaatatgctaaatatattattagctcttaaattttagtatagatcgtattttttataaactattaccagtacagtagctagtagatattctgtgactgcctcattgtttatcttgctgctttggtccctatggctctagtatgaacattctcgtgtcttctgtggaaatgatttctgtgttatagttccatctttggtagaggtggggatgattgtattttgttttagttgacatcattctcaacttttagaaatactgttgaggaaaatgattaccgttggttttcaaattgacaactattttgcttccaaagacttcagtttccctttgttttatgtgtagacctcatatatgttcaacacattgcatactgccttgcacattgtaggaattcaacaagtcaagagttgataaaagctagaaagataaaactagcttagctatcatatcatcattgtccatattcttagctttgggaaaaatataccattttgcataaaatacataatcagtttcaaatgcataaggcaaagatatacagttgcacaacattgcaagtgaaatttacaaaggatttttatttttgtgtatgctaaaagtgctcctacttaaagcagttttctttattagaccaacaccttccagcaaagttagaaaccaaacacaagtgctcatttgcccaaattaaccagatagttatgtaaactgttcatattaagtctttagtggtttacaaacaataacattctggcttttcttccataccttttaggaatcagccttaattttaagtatagcagtcactttcctcaaggtactatgcagcatactttagattgcttatttatcattataaggtgataggtaataaatttgaggtttacttgtcatataatttcatatggcagatattgattcaaggagcattctattagaaaaagttgataaattatcctcccttacaaatatcatcttgcatttggagcaggtatttttttcttattagttaaagactgggtacagttatagtagatgctcaataaatgcttagtcagtgattgatctaacatcaaactaacagctttcagaaaggagactgttgacatcttttcaccaaggagtatatttgtagagtaatatatgtgtggaattttgaaattatatcatttgacatgatttatgaggcttatttaagctggagttagtaacgtaatagaagtattatttatacagaacatagttgaaagataggagatgtgaaagattaagtagtattttcttgtgcaaggcatattaataaatgtaattaaatgtcttaataagcagctggctgaactctagagagaactgctgtagtcttctgcaatcagtctctgtattggtatatccagtactatcgggtttaggttctttttatttttccttaaatcttacttgtttctagcgtcttaagagtggtaatggtaaaatgtgaagttacaataaacttctgcttgttttctcagaacatctttggcatgaggaagaactttttgtgaatgatacagtagtctcagcatctgttaatttgtggttttcaaagcatttttgacagagtttacctaatgtaaaaagattaaacagttttataaaacacaaataaacattcctacctgaactgtgaggaacagagtgtatagtacaaatgtaattaggcattgcctcctggcgaggttcttgatgcatgacttcgatgctggctgctgactgaggtgaccactgtcagtattgtactttggcatatgttgtttttaggaaaataatggaatgcattcttagattaacttactgtttttgagttggaaaaaataaaagatgaggtattataagtatgccaaatatttatacactacaaaagattaaaaaaggagagggagaaaaaaaaaggccagttatgattttaatagcgtctaatttttttttgactcgaattttgtggacactagtcaattgcataatttaacatggaggagctttcatttaaaagaagttctcagctactatattctgccattaaaattaaccatgcctgttaattttacattgcttgaagatataagtaagctgccgtcaatattgttttaagattttcttatagtttatgtttaaatggaaaagttacatatataatctatggtgcagggtcaggcattggccattaaagataagtttggctaactattttactgaagagactaatggtcttccctctgttgtactgctatgtttcttgatctgtttttccccaatgtaacagtctacattgaagtcctttagctctctccatatactaattgacatttgttaaggattcaatattttgtgaattctttttacccttaaaatgcatatctttcagagagataagaatgaattttgcaataatttatatgcagagtgtgcttatgggtttctgggagttcaagttagtaccccagagtgcttaaaagtatgatgctaaattctaaggctaatgtaatgactgtagattatctatgtccacattgttcaacagaaatataatgtgaaccacaacataatttttaattttctagtagccatattaaaaaagaaacaagcaaaattaattttaataacagtttatgtaacccagtatattaaaaatatcatttcaacatgtaatcaatataaaagattattaatgaaacaccttatcttctttttcttccatactaagtcttagatttgagtgtattttgcactcacagcacatctcaattctgactggccacattttaagtgctcagtagtcacatatggctaagggctactatactggacagtacagattcatagagtataaaatatgactttaactttggagatggtgaggtaggcctgtaattatggtactttaaaaattcagaatatttagaaaagcatctaatagaattatccacttgttttccttcatcttcattttaatatgttctagaagtaggatcagcctgttccaatttgccaagcattattaaggaggaataattccataccatgtaaaataccatgatatgctgattatactacattaacaaatttttaagttgcgttcactaaattctgtcctgtttcttcaaaataatatagcttaaattgcatgttaattgtatatcttacctattttgtttttatattattcttacaatataatcatgtatattaacaaacagccctgggattctaatcttcctctgcaactgtcttccaggacttactggcacttattacactgtgataagtggcagaaaagtagaatgaaatattctttttccattagatttgttcttatgtgaccatgtaccaagccagctataaagtattgtatttctgtagaatatggaaaatagtatttgtcttacctttgctaaatgtttgcaatttctaagtaaaccttttatctcctaaaatga

SEQ ID NO: 171463 - DNA, 826 bp, Homo sapiens
  Payload ID: 13722
  Gene Symbol: PTAR1
  Gene Name: protein prenyltransferase alpha subunit repeat containing 1
  ENST ID: ENST00000415701
  CDS Start-End: 1-505
cagtggatttcactaccgccagtttttgcttaagtctttgattagccaaactgtgatagacagttctgtgatggagcaaaatcctttgagaagtgagccagccctagttcctccaaaagatgaagaagcagcagtttcaacagaagaaccaaggattaatcttccccatcttctagaagaagaagttgaattcagcactgatcttattgattcctacccaggacatgaaaccctttggtgtcataggcggcatattttctaccttcagcatcacttaaatggctcccagctgtctcaagcaatggaagtagatggactgaatgactctagcaagcaaggctattcccaggaaaccaaacgcctgaagcggacgccagttccagactccctaggcctagaaatggagcacaggttcattgatcaagtattgtccacctgtcggaacgtggagcaagccaggtttgccagtgcatacaggaaatggctggttactttgagtcaatgaaagaggtgaattagtcctacaaggttccccttttagtgcaatattgctttcttttattatttacatagttgcatgaactgtttactattattggctaaccatatgttcttcgtctttaggttgaaagtccatagtaaatctttcattttatttattttgttaataactggcattcctgtggggataaaataatcgtatagttccttcctgctgaacagcgagtcttaaattttctgtttaacttctcaccctttgtatttctatatgtggggcttctcatttggttttcctgattggttcacacacacacacctctacccc

SEQ ID NO: 171464 - DNA, 1689 bp, Homo sapiens
  Payload ID: 13722
  Gene Symbol: PTAR1
  Gene Name: protein prenyltransferase alpha subunit repeat containing 1
  ENST ID: ENST00000472967
  CDS Start-End: 22-111
actgtcgcggccgccgccaacatggccgagaccagcgaggaggtggcggtgctggtgcagcgggttgtgaaggacatcactaacgccttcaggaggaacccacacatgtgatgattgtaaaacagttaagaagccgttggatgttttgctcccttgtggcacacaattggagacgtgcaactgtgccacattaaaaacaaaacactgctggcctcaaaacacacctgccacctctgacagcatccacttccctcccccttatgactgctgcctttttcaaaatgagagtgtttggaatgatttcctggcagtatccatagtggttgctgagccttctaaagaatgctttgatgccttgctgtatatcagtctttcgatttctttttgagaatgggagccttagtgcaagtaagagacgacctcaaaaaaaaaaaaagttggacaaatgaagagtgtattttctcatcactggtatttttctagaagaaattacagcagagattagaaatctaatacaaaatgtcgtaatcatcttatgttctcttctttgaggtagactaaaagagcatcattatatttgaagaaaccaagattgaatgttcattggcttggcagtttttaacacagtgcagtttggaacatgtcccagttcttgtggatcacatttatggaaactcttaaaggactttaatgcccctccctaatcctttttctactgtaaaacctcattaatatatcctcaatgtataatttattagtaataaggatttgggtcattcgagatttaaaactttgagataagttggatattcggaataatgtaatgatttgtaatataggtcttaaacatttaaatagcttaactcattgtttaagactagtcatcagctatatttgaatacatattccccacagtaaaactattttcaataatattactatgcatctttgtaagtgccttataatttgggcttttaaaaattgcctgcgctttcttcccttaatttagcccatttactcccaaaataaagaggctgtgtttctttttttttttttaaggcattgtttatctgtaacgtttgtatctaactttactgtatctaattacactttcagtattatacaaaaatttttttgtttttcttgtccaaacttaagatcggttgtaattttattggccaacatctacttcattaaatacattgactttgtttatgtagaaatatttagccagaaggagttgaggatgcagtggtgagatgtggattttgttactgtatgatgtgaataggtaccttctctcagcctcagtttcctcttgatcttgtgaggctgatgaaaacaggaaaatcacctcacacagtggtacttagttgccactcaataaatattagaccttccctgaatctctgtgttcctcaccaaaaatatattggacaaatgattggtgaatatgaagcactttataaacctggataatactatataaatgctgtttgtatggttgagtattagataatcatattggattctctaaaactgaaaacttgacctagggatagtctttaacttagtgtatggaccctgtgctaatgtagaagacaacagtttataatgtaaacagtcacgttaaaattaatcttatccagcaagttattgttttttctattaaatattgaactcactgtt

SEQ ID NO: 171465 - DNA, 2030 bp, Homo sapiens
  Payload ID: 13723
  Gene Symbol:
  Gene Name: Protein RCC2  [Source:UniProtKB/Swiss-Prot
  Acc:Q9P258]
  Uniprot ID: Q9P258
  ENST ID: ENST00000628984
  CDS Start-End: 48-1616
cccgtccattgtgcgccgctgccccgtgtctccctccagccgcgaccatgcccaggaagaaggcggcggcggcggcctgggaggagccgagctcgggcaacggcactgcccgcgccgggcccaggaaacgcggcggcccggcgggcaggaagcgcgagcggcccgagcgctgcagtagcagcagcggcggcggcagcagcggcgacgaggacggcctggagctcgacggggcccccggcgggggcaagcgcgcggcgcggccggcgacagcaggcaaggcgggcggcgcggccgtggtcatcaccgaacccgagcacaccaaggagcgcgtcaaacttgaagggtcaaagtgcaaagggcagcttttgatttttggggcaaccaactgggacttgattggtcgaaaagaagtgcctaaacagcaagctgcttaccgcaatctcggtcagaatttgtgggggccccacagatatgggtgcctggcgggggtccgggtgcggacagtggtctcgggctcgtgtgctgcacacagcctcctcatcaccacggaagggaagctgtggagctggggtcgaaatgagaaggggcagctgggacatggtgacaccaagagagtagaagcccctagactcatcgagggtcttagccacgaagtgattgtgtctgcagcatgtgggcggaaccacaccttggccttgacggaaacgggctccgtgtttgcgtttggggaaaacaagatggggcagctgggccttggcaaccagacagacgctgttcccagccccgcgcagataatgtacaacggccagccaattaccaaaatggcctgtggggctgaattcagtatgataatggactgcaaaggaaacctctattcctttgggtgccctgaatatggtcagctgggacacaactcagatgggaagttcatcgcccgggcacagcggatagagtacgactgtgaactagttccccggcgagtggccatcttcattgagaagacgaaagatggacagattctgcctgtaccaaacgtggttgtacgagacgtggcctgtggcgctaaccacacgctggtcctggactcccagaagcgagtcttctcctggggctttggtggctatggccggctgggccacgcagagcagaaggatgagatggtcccccgcctggtgaagctgtttgacttccctgggcgtggggcttcccagatctatgctggttacacctgctcctttgctgtcagtgaagtgggtggtctgtttttctggggggccaccaacacctcccgtgaatctaccatgtacccaaaagcagtgcaggacctctgcggctggagaatccggagcctggcttgtgggaagagcagcatcattgtggccgccgatgagagcaccatcagctggggtccgtcaccgacctttggggaactgggctacggggaccacaagcccaagtcttccactgcagcccaggaggtaaagactctggatggcattttctcagagcaggtcgccatgggctactcacactccttggtgatagcaagagatgaaagtgagactgagaaagagaagatcaagaaactgccagaatacaacccccgaaccctctgatgctcccggagactcctccgactccacacctctcgcggcagctgtcatttccatgtgcactgggacgggaagtcaaacgaggaatttaaaaaagcaaaagttgaccgaaggtgcatttttgtttagactccctgaggttccgttttacacatgatccaacgttaactacctttttttctgtatgctttccaaagtccttttttttcccttaatgttgaattaaaatacttgctcatagttgatttaccattcctacaaaagaggcagaaactttgagcaatctaggttttttttttttttaagttttttctttcttcctctcctgaatacactccccaaaacacccctttccagttacaattagcatcgtgatccaagcagatgccacatggaagaggaatcgccatttactca

SEQ ID NO: 171466 - DNA, 4087 bp, Homo sapiens
  Payload ID: 13723
  Gene Symbol:
  Gene Name: Protein RCC2  [Source:UniProtKB/Swiss-Prot
  Acc:Q9P258]
  Uniprot ID: Q9P258
  ENST ID: ENST00000631021
  CDS Start-End: 189-1757
cgcacatgtgtttctgttttgtgttgtagcatttgttctggaagctcgtatttacattttaagtgtatctggtgagtgggctggagccctcgtctgggccggaaaaaaaaaagccctccgatccgtcttttagttgcttctcttccttttttctctccggtttctcatcactccaaccagccgcgaccatgcccaggaagaaggcggcggcggcggcctgggaggagccgagctcgggcaacggcactgcccgcgccgggcccaggaaacgcggcggcccggcgggcaggaagcgcgagcggcccgagcgctgcagtagcagcagcggcggcggcagcagcggcgacgaggacggcctggagctcgacggggcccccggcgggggcaagcgcgcggcgcggccggcgacagcaggcaaggcgggcggcgcggccgtggtcatcaccgaacccgagcacaccaaggagcgcgtcaaacttgaagggtcaaagtgcaaagggcagcttttgatttttggggcaaccaactgggacttgattggtcgaaaagaagtgcctaaacagcaagctgcttaccgcaatctcggtcagaatttgtgggggccccacagatatgggtgcctggcgggggtccgggtgcggacagtggtctcgggctcgtgtgctgcacacagcctcctcatcaccacggaagggaagctgtggagctggggtcgaaatgagaaggggcagctgggacatggtgacaccaagagagtagaagcccctagactcatcgagggtcttagccacgaagtgattgtgtctgcagcatgtgggcggaaccacaccttggccttgacggaaacgggctccgtgtttgcgtttggggaaaacaagatggggcagctgggccttggcaaccagacagacgctgttcccagccccgcgcagataatgtacaacggccagccaattaccaaaatggcctgtggggctgaattcagtatgataatggactgcaaaggaaacctctattcctttgggtgccctgaatatggtcagctgggacacaactcagatgggaagttcatcgcccgggcacagcggatagagtacgactgtgaactagttccccggcgagtggccatcttcattgagaagacgaaagatggacagattctgcctgtaccaaacgtggttgtacgagacgtggcctgtggcgctaaccacacgctggtcctggactcccagaagcgagtcttctcctggggctttggtggctatggccggctgggccacgcagagcagaaggatgagatggtcccccgcctggtgaagctgtttgacttccctgggcgtggggcttcccagatctatgctggttacacctgctcctttgctgtcagtgaagtgggtggtctgtttttctggggggccaccaacacctcccgtgaatctaccatgtacccaaaagcagtgcaggacctctgcggctggagaatccggagcctggcttgtgggaagagcagcatcattgtggccgccgatgagagcaccatcagctggggtccgtcaccgacctttggggaactgggctacggggaccacaagcccaagtcttccactgcagcccaggaggtaaagactctggatggcattttctcagagcaggtcgccatgggctactcacactccttggtgatagcaagagatgaaagtgagactgagaaagagaagatcaagaaactgccagaatacaacccccgaaccctctgatgctcccggagactcctccgactccacacctctcgcggcagctgtcatttccatgtgcactgggacgggaagtcaaacgaggaatttaaaaaagcaaaagttgaccgaaggtgcatttttgtttagactccctgaggttccgttttacacatgatccaacgttaactacctttttttctgtatgctttccaaagtccttttttttcccttaatgttgaattaaaatacttgctcatagttgatttaccattcctacaaaagaggcagaaactttgagcaatctaggttttttttttttttaagttttttctttcttcctctcctgaatacactccccaaaacacccctttccagttacaattagcatcgtgatccaagcagatgccacatggaagaggaatcgccatttactcagaaaaaatgtcccttacaggaaccggcagcagctaggcagtcaccggcccgcctccatccaaaatcacgctcgcgtgcttcggaagcatccgggtcactccttctccgctttttcttgcagatgggcctaggccggtgtcggttctgtttctccccttggctgcctgtacgcccacagccttctggctgcgacattatagaatcggccgtgtcccccctggtgggggattggggatctgtgtttagccatttatatctactttagctgttaaagaggtccaaatgaaaatcaggtgattgtggaaccatggggacttgggggtggggcagaggtgggaacatttgtatcagttgagtcagcttggtggctccctgtggagccagggctgagccttgtcacgcgcactcgccaattaagagatggaccagccagcagtcaagtgcattctccagtccttgcaagaaggatcagccctttctgtgccagcctcgatcgccttgtgctttggtctctttttctcccccccgcctggatcctgcctcgcgcgggccgtcctgttgctgagactcggggtaccgttctgctgacccagctccctttagtcacgtttgcttggctctggtaccaaatagttgggattaccgaagagtccccttccttgcgtgtcagcacggatgctgtgactgccacctgcgtcctcgtcaagtgcccgagctcgccgccgtgtgtgctgcgctgagtgagttatgaggtgcctttcccggaaccctcctctcgcctggacccaagagaggcgacagctgtggctggggctcttggtttccagagggtctggactggtttgggtgctttaaaatagatatttagttcagtggtgcttatgggggagatgggactagaacttaagtgtgagacttgggtggatgggaaagttaaatattggtctcttcaagttttttttttcttttgctttgttaccacttgtcactgtctccatgttaaaatgccaaaaatgatgtagttgttgttgcttttttccctattttccaccccagtcgctccttaccgtgactcctgcccttggagggcatgtagcagtgtctgtcctgccagtcccaaggccctgtgggaggagactggcctgcatctctctaagacttagtctgacgccacgcgcatctcttgttctgtgttcaatcagtagtccaggggagaagcttctgctacttcagagctttgctaaactaacctaatttgtccaaatcaccccaaaaccaccatctctgacgtaagcttccatgcgacagcctgatccgtttccctggacaggtctctttcctggaatgcagcccaggcacctgtgctcctggcacccttgaggtctctcctttgagccgtggtcaccgagagggttgaggacgcagcacccgaggtcccagcctttgcaggagcctccctgggcttagctggacttagatcttcggtggcctcatgtaaacgtggcagccagcctcttctagaaccctagcccagggactggagcaggaaagggaccttcaaagtgaagactgccttgtcccgcagctccttctggcttagattgaaaaatgggcttcctaatgggttaaatcctttaaaacaaggagttgtgggggaagggtgtcgtgcactcctagagaaaggtacacagttgcccggttgggaatgtgcttggcgctgaccctgcgggcatctgactggtcttccagctcaggaaaaagaatttgaaagaggcttagcgtgaaggggaatcaaagaggaggttgtgatttggtcgaaggtgcctggtttagtgctgtaattgtcttattattttttttatatatatatttcttggagtaaacattttaaataaacaacaacattgtctactgtc

SEQ ID NO: 171467 - DNA, 4087 bp, Homo sapiens
  Payload ID: 13724
  Gene Symbol: PRC1
  Gene Name: protein regulator of cytokinesis 1
  Uniprot ID: O43663
  ENST ID: ENST00000361188
  CDS Start-End: 1213-3033
tgccagtattattattttacctacaaaatgagcaaagatgtttagaagtacaatagaattcagccctgctgagggtaacaaaaggagggtacttttccggtgaggctttgtgcagaaggcaaattaataaagggagcattcagtaattacacctctaggaatcagccgtacgaaaatgcaggatgcatttataaatacatacatacacaaagatttatgtatgaagatattcagcccagccttatcttttaaattatcatctaaatatcaatagcagaatgggcgagatatctacacaccaggattcatgccaccatgccaccatgaatcactgggaaaaaacggtgatatataagcatttagggatgtaacatgttcatcgaggaaaggaggctacaaaagtaatgtctattttgagttttaaatttttcatgtaacgatttagaaactcatctaatttgataacgtgacttaggcaaatcattcaaatctttttgcgtttcctctgcaatggcgattgtggaggttaaatgggataactggcgttgaaacgttccaggcccatgagcaggactcaatgttccttcccttcccctttagtgtatggcttcttacatctggggaagagtcccaccaaagatcgattccaagcttcgcttcttggatgagcgagggaaactaggcgctaacttacctattcacccccgcgcccgttcccggcagccgggactcagggaagccaggtagccgcggtgctctcaactccctccccgcccgcgcacttcgaatccaaactgcgcggggcgaggcggggcggcgctccgatgaggtagctggcttgggagaggagtcccttgaggctgccgccaagccagggaagcgggaggcgcaggccacgcccggccactcacagacagtgacgtcatcccccgccgccactccggcgcttcccaggccctgctcgcgagtccccaccccgattgcgcacccgcgacttcagcccgaggggcggggattttcttggagcgacgggacgcgacgccaatcgcgacgaggcttcgccccgtggcgcggtttgaaattttgcggggctcaacggctcgcggagcggctacgcggagtgacatcgccggtgtttgcgggtggttgttgctctcggggccgtgtggagtaggtctggacctggactcacggctgcttggagcgtccgccatgaggagaagtgaggtgctggcggaggagtccatagtatgtctgcagaaagccctaaatcaccttcgggaaatatgggagctaattgggattccagaggaccagcggttacaaagaactgaggtggtaaagaagcatatcaaggaactcctggatatgatgattgctgaagaggaaagcctgaaggaaagactcatcaaaagcatatccgtctgtcagaaagagctgaacactctgtgcagcgagttacatgttgagccatttcaggaagaaggagagacgaccatcttgcaactagaaaaagatttgcgcacccaagtggaattgatgcgaaaacagaaaaaggagagaaaacaggaactgaagctacttcaagagcaagatcaagaactgtgcgaaattctttgtatgccccactatgatattgacagtgcctcagtgcccagcttagaagagctgaaccagttcaggcaacatgtgacaactttgagggaaacaaaggcttctaggcgtgaggagtttgtcagtataaagagacagatcatactgtgtatggaagcattagaccacaccccagacacaagctttgaaagagatgtggtgtgtgaagacgaagatgccttttgtttgtctttggagaatattgcaacactacaaaagttgctacggcagctggaaatgcagaaatcacaaaatgaagcagtgtgtgaggggctgcgtactcaaatccgagagctctgggacaggttgcaaatacctgaagaagaaagagaagctgtggccaccattatgtctgggtcaaaggccaaggtccggaaagcgctgcaattagaagtggatcggttggaagaactgaaaatgcaaaacatgaagaaagtgattgaggcaattcgagtggagctggttcagtactgggaccagtgcttttatagccaggagcagagacaagcttttgcccctttctgtgctgaggactacacagaaagtctgctccagctccacgatgctgagattgtgcggttaaaaaactactatgaagttcacaaggaactctttgaaggtgtccagaagtgggaagaaacctggaggcttttcttagagtttgagagaaaagcttcagatccaaatcgatttacaaaccgaggaggaaatcttctaaaagaagaaaaacaacgagccaagctccagaaaatgctgcccaagctggaagaagagttgaaggcacgaattgaattgtgggaacaggaacattcaaaggcatttatggtgaatgggcagaaattcatggagtatgtggcagaacaatgggagatgcatcgattggagaaagagagagccaagcaggaaagacaactgaagaacaaaaaacagacagagacagagatgctgtatggcagcgctcctcgaacacctagcaagcggcgaggactggctcccaatacaccgggcaaagcacgtaagctgaacactaccaccatgtccaatgctacggccaatagtagcattcggcctatctttggagggacagtctaccactcccccgtgtctcgacttcctccttctggcagcaagccagtcgctgcttccacctgttcagggaagaaaacaccccgtactggcaggcatggagccaacaaggagaacctggagctcaacggcagcatcctgagtggtgggtaccctggctcggcccccctccagcgcaacttcagcattaattctgttgccagcacctattctgagtttgcgcgagaactttcaaaggcttccaaatctgatgctacttctggaatcctcaattcaaccaacatccagtcctgagaagccctgatcagtcaaccagctgtggcttcctgtgcctagactggacctaattatatgggggtgactttagtttttcttcagcttaggcgtgcttgaaaccttggccaggttccatgaccatgggcctaacttaaagatgtgaatgagtgttacagttgaaagcccatcataggtttagtggtcctaggagacttggttttgacttatatacatgaaaagtttatggcaagaagtgcaaattttagcatatggggcctgacttctctaccacataattctacttgctgaagcatgatcaaagcttgttttatttcaccactgtaggaaaatgattgactatgcccatccctgggggtaattttggcatgtatacctgtaactagtaattaacatcttttttgtttaggcatgttcaattaatgctgtagctatcatagctttgctcttacctgaagccttgtccccaccacacaggacagccttcctcctgaagagaatgtctttgtgtgtccgaagttgagatggcctgccctactgccaaagaggtgacaggaaggctgggagcagctttgttaaattgtgttcagttctgttacacagtgcattgccctttgttgggggtatgcatgtatgaacacacatgcttgtcggaacgctttctcggcgtttgtcccttggctctcatctcccccattcctgtgcctactttgcctgagttcttctacccccgcagttgccagccacattgggagtctgtttgttccaatgggttgagctgtctttgtcgtggagatctggaactttgcacatgtcactactggggaggtgttcctgctctagcttccacgatgaggcgccctctttacctatcctctcaatcactactcttcttgaagcactattatttattcttccgctgtctgcctgcagcagtactactgtcaacatagtgtaaatggttctcaaaagcttaccagtgtggacttggtgttagccacgctgtttactcatacagtacgtgtcctgtttttaaaatatacaattattctta

SEQ ID NO: 171468 - DNA, 3034 bp, Homo sapiens
  Payload ID: 13724
  Gene Symbol: PRC1
  Gene Name: protein regulator of cytokinesis 1
  Uniprot ID: O43663
  ENST ID: ENST00000394249
  CDS Start-End: 79-1941
gtttgcgggtggttgttgctctcggggccgtgtggagtaggtctggacctggactcacggctgcttggagcgtccgccatgaggagaagtgaggtgctggcggaggagtccatagtatgtctgcagaaagccctaaatcaccttcgggaaatatgggagctaattgggattccagaggaccagcggttacaaagaactgaggtggtaaagaagcatatcaaggaactcctggatatgatgattgctgaagaggaaagcctgaaggaaagactcatcaaaagcatatccgtctgtcagaaagagctgaacactctgtgcagcgagttacatgttgagccatttcaggaagaaggagagacgaccatcttgcaactagaaaaagatttgcgcacccaagtggaattgatgcgaaaacagaaaaaggagagaaaacaggaactgaagctacttcaagagcaagatcaagaactgtgcgaaattctttgtatgccccactatgatattgacagtgcctcagtgcccagcttagaagagctgaaccagttcaggcaacatgtgacaactttgagggaaacaaaggcttctaggcgtgaggagtttgtcagtataaagagacagatcatactgtgtatggaagcattagaccacaccccagacacaagctttgaaagagatgtggtgtgtgaagacgaagatgccttttgtttgtctttggagaatattgcaacactacaaaagttgctacggcagctggaaatgcagaaatcacaaaatgaagcagtgtgtgaggggctgcgtactcaaatccgagagctctgggacaggttgcaaatacctgaagaagaaagagaagctgtggccaccattatgtctgggtcaaaggccaaggtccggaaagcgctgcaattagaagtggatcggttggaagaactgaaaatgcaaaacatgaagaaagtgattgaggcaattcgagtggagctggttcagtactgggaccagtgcttttatagccaggagcagagacaagcttttgcccctttctgtgctgaggactacacagaaagtctgctccagctccacgatgctgagattgtgcggttaaaaaactactatgaagttcacaaggaactctttgaaggtgtccagaagtgggaagaaacctggaggcttttcttagagtttgagagaaaagcttcagatccaaatcgatttacaaaccgaggaggaaatcttctaaaagaagaaaaacaacgagccaagctccagaaaatgctgcccaagctggaagaagagttgaaggcacgaattgaattgtgggaacaggaacattcaaaggcatttatggtgaatgggcagaaattcatggagtatgtggcagaacaatgggagatgcatcgattggagaaagagagagccaagcaggaaagacaactgaagaacaaaaaacagacagagacagagatgctgtatggcagcgctcctcgaacacctagcaagcggcgaggactggctcccaatacaccgggcaaagcacgtaagctgaacactaccaccatgtccaatgctacggccaatagtagcattcggcctatctttggagggacagtctaccactcccccgtgtctcgacttcctccttctggcagcaagccagtcgctgcttccacctgttcagggaagaaaacaccccgtactggcaggcatggagccaacaaggagaacctggagctcaacggcagcatcctgagtggtgggtaccctggctcggcccccctccagcgcaacttcagcattaattctgttgccagcacctattctgagtttgcgaaggatccgtccctctctgacagttccactgttgggcttcagcgagaactttcaaaggcttccaaatctgatgctacttctggaatcctcaattcaaccaacatccagtcctgagaagccctgatcagtcaaccagctgtggcttcctgtgcctagactggacctaattatatgggggtgactttagtttttcttcagcttaggcgtgcttgaaaccttggccaggttccatgaccatgggcctaacttaaagatgtgaatgagtgttacagttgaaagcccatcataggtttagtggtcctaggagacttggttttgacttatatacatgaaaagtttatggcaagaagtgcaaattttagcatatggggcctgacttctctaccacataattctacttgctgaagcatgatcaaagcttgttttatttcaccactgtaggaaaatgattgactatgcccatccctgggggtaattttggcatgtatacctgtaactagtaattaacatcttttttgtttaggcatgttcaattaatgctgtagctatcatagctttgctcttacctgaagccttgtccccaccacacaggacagccttcctcctgaagagaatgtctttgtgtgtccgaagttgagatggcctgccctactgccaaagaggtgacaggaaggctgggagcagctttgttaaattgtgttcagttctgttacacagtgcattgccctttgttgggggtatgcatgtatgaacacacatgcttgtcggaacgctttctcggcgtttgtcccttggctctcatctcccccattcctgtgcctactttgcctgagttcttctacccccgcagttgccagccacattgggagtctgtttgttccaatgggttgagctgtctttgtcgtggagatctggaactttgcacatgtcactactggggaggtgttcctgctctagcttccacgatgaggcgccctctttacctatcctctcaatcactactcttcttgaagcactattatttattcttccgctgtctgcctgcagcagtactactgtcaacatagtgtaaatggttctcaaaagcttaccagtgtggacttggtgttagccacgctgtttactcatacagtacgtgtcctgtttttaaaatatacaattattcttaaaaataaattaaaatctgtatacttacatttcaaaaaga

SEQ ID NO: 171469 - DNA, 2060 bp, Homo sapiens
  Payload ID: 13724
  Gene Symbol: PRC1
  Gene Name: protein regulator of cytokinesis 1
  Uniprot ID: O43663
  ENST ID: ENST00000442656
  CDS Start-End: 109-1686
ggagcggctacgcggagtgacatcgccggtgtttgcgggtggttgttgctctcggggccgtgtggagtaggtctggacctggactcacggctgcttggagcgtccgccatgaggagaagtgaggtgctggcggaggagtccatagtatgtctgcagaaagccctaaatcaccttcgggaaatatgggagctaattgggattccagaggaccagcggttacaaagaactgaggtggtaaagaagcatatcaaggaagaaggagagacgaccatcttgcaactagaaaaagatttgcgcacccaagtggaattgatgcgaaaacagaaaaaggagagaaaacaggaactgaagctacttcaagagcaagatcaagaactgtgcgaaattctttgtatgccccactatgatattgacagtgcctcagtgcccagcttagaagagctgaaccagttcaggcaacatgtgacaactttgagggaaacaaaggcttctaggcgtgaggagtttgtcagtataaagagacagatcatactgtgtatggaagcattagaccacaccccagacacaagctttgaaagagatgtggtgtgtgaagacgaagatgccttttgtttgtctttggagaatattgcaacactacaaaagttgctacggcagctggaaatgcagaaatcacaaaatgaagcagtgtgtgaggggctgcgtactcaaatccgagagctctgggacaggttgcaaatacctgaagaagaaagagaagctgtggccaccattatgtctgggtcaaaggccaaggtccggaaagcgctgcaattagaagtggatcggttggaagaactgaaaatgcaaaacatgaagaaagtgattgaggcaattcgagtggagctggttcagtactgggaccagtgcttttatagccaggagcagagacaagcttttgcccctttctgtgctgaggactacacagaaagtctgctccagctccacgatgctgagattgtgcggttaaaaaactactatgaagttcacaaggaactctttgaaggtgtccagaagtgggaagaaacctggaggcttttcttagagtttgagagaaaagcttcagatccaaatcgatttacaaaccgaggaggaaatcttctaaaagaagaaaaacaacgagccaagctccagaaaatgctgcccaagctggaagaagagttgaaggcacgaattgaattgtgggaacaggaacattcaaaggcatttatggtgaatgggcagaaattcatggagtatgtggcagaacaatgggagatgcatcgattggagaaagagagagccaagcaggaaagacaactgaagaacaaaaaacagacagagacagagatgctgtatggcagcgctcctcgaacacctagcaagcggcgaggactggctcccaatacaccgggcaaagcacgtaagctgaacactaccaccatgtccaatgctacggccaatagtagcattcggcctatctttggagggacagtctaccactcccccgtgtctcgacttcctccttctggcagcaagccagtcgctgcttccacctgttcagggaagaaaacaccccgtactggcaggcatggagccaacaaggagaacctggagctcaacggcagcatcctgagtgcgagaactttcaaaggcttccaaatctgatgctacttctggaatcctcaattcaaccaacatccagtcctgagaagccctgatcagtcaaccagctgtggcttcctgtgcctagactggacctaattatatgggggtgactttagtttttcttcagcttaggcgtgcttgaaaccttggccaggttccatgaccatgggcctaacttaaagatgtgaatgagtgttacagttgaaagcccatcataggtttagtggtcctaggagacttggttttgacttatatacatgaaaagtttatggcaagaagtgcaaattttagcatatggggcctgacttctctaccacataattctacttgctgaagcatgatcaaagcttgttttatttcaccactgtaggaaa

SEQ ID NO: 171470 - DNA, 830 bp, Homo sapiens
  Payload ID: 13724
  Gene Symbol: PRC1
  Gene Name: protein regulator of cytokinesis 1
  ENST ID: ENST00000555455
  CDS Start-End: 1-716
atcttctaaaagaagaaaaacaacgagccaagctccagaaaatgctgcccaagctggaagaagagttgaaggcacgaattgaattgtgggaacaggaacattcaaaggcatttatggtgaatgggcagaaattcatggagtatgtggcagaacaatgggagatgcatcgattggagaaagagagagccaagcaggaaagacaactgaagaacaaaaaacagacagagacagagatgctgtatggcagcgctcctcgaacacctagcaagcggcgaggactggctcccaatacaccgggcaaagcacgtaagctgaacactaccaccatgtccaatgctacggccaatagtagcattcggcctatctttggagggacagtctaccactcccccgtgtctcgacttcctccttctggcagcaagccagtcgctgcttccacctgttcagggaagaaaacaccccgtactggcaggcatggagccaacaaggagaacctggagctcaacggcagcatcctgagtggtgggtaccctggctcggcccccctccagcgcaacttcagcattaattctgttgccagcacctattctgagtttgcgaaggatccgtccctctctgacagttccactgttgggcttcaggacagccttcctcctgaagagaatgtctttgtgtgtccgaagttgagatggcctgccctactgccaaagaggtgacaggaaggctgggagcagctttgttaaattgtgttcagttctgttacacagtgcattgccctttgttgggggtatgcatgtatgaacacacatgcttgtcggaacgctttctcg

SEQ ID NO: 171471 - DNA, 584 bp, Homo sapiens
  Payload ID: 13724
  Gene Symbol: PRC1
  Gene Name: protein regulator of cytokinesis 1
  ENST ID: ENST00000559828
  CDS Start-End: 1-584
tttatagccaggagcagagacaagcttttgcccctttctgtgctgaggactacacagaaagtctgctccagctccacgatgctgagattgtgcggttaaaaaactactatgaagttcacaaggaactctttgaaggtgtccagaagtgggaagaaacctggaggcttttcttagagtttgagagaaaagcttcagatccaaatcgatttacaaaccgaggaggaaatcttctaaaagaagaaaaacaacgagccaagctccagaaaatgctgcccaagctggaagaagagttgaaggcacgaattgaattgtgggaacaggaacattcaaaggcatttatggtgaatgggcagaaattcatggagtatgtggcagaacaatgggagatgcatcgattggagaaagagagagccaagcaggaaagacaactgaagaacaaaaaacagacagagacagagatgctgtatggcagcgctcctcgaacacctagcaagcggcgaggactggctcccaatacaccgggcaaagcacgtaagccagtcgctgcttccacctgttcagggaagaaaacaccccgtactggc

SEQ ID NO: 171472 - DNA, 414 bp, Homo sapiens
  Payload ID: 13724
  Gene Symbol: PRC1
  Gene Name: protein regulator of cytokinesis 1
  ENST ID: ENST00000559811
  CDS Start-End: 84-414
ccggtgtttgcgggtggttgttgctctcggggccgtgtggagtaggtctggacctggactcacggctgcttggagcgtccgccatgaggagaagtgaggtgctggcggaggagtccatagtatgtctgcagaaagccctaaatcaccttcgggaaatatgggagctaattgggattccagaggaccagcggttacaaagaactgaggtggtaaagaagcatatcaaggaactcctggatatgatgattgctgaagaggaaagcctgaaggaaagactcatcaaaagcatatccgtctgtcagaaagagctgaacactctgtgcagcgagttacatgttgagccatttcaggaattcacttggaatcttataacagtggtacgttgtcttattcaggaagaaggagagacgacca

SEQ ID NO: 171473 - DNA, 571 bp, Homo sapiens
  Payload ID: 13724
  Gene Symbol: PRC1
  Gene Name: protein regulator of cytokinesis 1
  ENST ID: ENST00000557905
  CDS Start-End: 109-571
ggagcggctacgcggagtgacatcgccggtgtttgcgggtggttgttgctctcggggccgtgtggagtaggtctggacctggactcacggctgcttggagcgtccgccatgaggagaagtgaggtgctggcggaggagtccatagtatgtctgcagaaagccctaaatcaccttcgggaaatatgggagctaattgggattccagaggaccagcggttacaaagaactgaggtggtaaagaagcatatcaaggaagaaggagagacgaccatcttgcaactagaaaaagatttgcgcacccaagtggaattgatgcgaaaacagaaaaaggagagaaaacaggaactgaagctacttcaagagcaagatcaagaactgtgcgaaattctttgtatgccccactatgatattgacagtgcctcagtgcccagcttagaagagctgaaccagttcaggcaacatgtgacaactttgagggaaacaaaggcttctaggcgtgaggagtttgtcagtataaagagacagatcatactgtgtatggaagcattagaccacaccccagacacaagct

SEQ ID NO: 171474 - DNA, 755 bp, Homo sapiens
  Payload ID: 13724
  Gene Symbol: PRC1
  Gene Name: protein regulator of cytokinesis 1
  ENST ID: ENST00000560423
  CDS Start-End: 1-194
gtagcattcggcctatctttggagggacagtctaccactcccccgtgtctcgacttcctccttctggcagcaagccagtcgctgcttccacctgttcagggaagaaaacaccccgtactggcaggcatggagccaacaaggagaacctggagctcaacggcagcatcctgagtgaaggatccgtccctctctgacagttccactgttgggcttcagcgagaactttcaaaggcttccaaatctgatgctacttctggaatcctcaattcaaccaacatccagtcctgagaagccctgatcagtcaaccagctgtggcttcctgtgcctagactggacctaattatatgggggtgactttagtttttcttcagcttaggcgtgcttgaaaccttggccaggttccatgaccatgggcctaacttaaagatgtgaatgagtgttacagttgaaagcccatcataggtttagtggtcctaggagacttggttttgacttatatacatgaaaagtttatggcaagaagtgcaaattttagcatatggggcctgacttctctaccacataattctacttgctgaagcatgatcaaagcttgttttatttcaccactgtaggaaaatgattgactatgcccatccctgggggtaattttggcatgtatacctgtaactagtaattaacatcttttttgtttaggcatgttcaattaatgctgtagctatcatagctttgctcttacctgaagccttgtccc

SEQ ID NO: 171475 - DNA, 728 bp, Homo sapiens
  Payload ID: 13724
  Gene Symbol: PRC1
  Gene Name: protein regulator of cytokinesis 1
  ENST ID: ENST00000556972
  CDS Start-End: 1-141
cgacttcctccttctggcagcaagccagtcgctgcttccacctgttcagggaagaaaacaccccgtactggcaggcatggagccaacaaggagaacctggagctcaacggcagcatcctgagtggacagccttcctcctgaagagaatgtctttgtgtgtccgaagttgagatggcctgccctactgccaaagaggtgacaggaaggctgggagcagctttgttaaattgtgttcagttctgttacacagtgcattgccctttgttgggggtatgcatgtatgaacacacatgcttgtcggaacgctttctcggcgtttgtcccttggctctcatctcccccattcctgtgcctactttgcctgagttcttctacccccgcagttgccagccacattgggagtctgtttgttccaatgggttgagctgtctttgtcgtggagatctggaactttgcacatgtcactactggggaggtgttcctgctctagcttccacgatgaggcgccctctttacctatcctctcaatcactactcttcttgaagcactattatttattcttccgctgtctgcctgcagcagtactactgtcaacatagtgtaaatggttctcaaaagcttaccagtgtggacttggtgttagccacgctgtttactcatacagtacgtgtcctgtttttaaaatatacaattattcttaaaaataaattaaaatctgtatacttac

SEQ ID NO: 171476 - DNA, 806 bp, Homo sapiens
  Payload ID: 13725
  Gene Symbol: PROS1
  Gene Name: protein S (alpha)
  ENST ID: ENST00000348974
  CDS Start-End: 114-806
cgcgcagcacggctcagaccgaggcgcacaggctcgcagctccgcggcgcctagcgctccggtccccgccgcgacgcgccaccgtccctgccggcgcctccgcgcgcttcgaaatgagggtcctgggtgggcgctgcggggcgctgctggcgtgtctcctcctagtgcttcccgtctcagaggcaaacttttgtttatattttagaaatgattttatatacaaccgtgcatgcatttctgtattggtcggcttatctggatgcaattttttctattctatatgctttttgtcaaagcaacaggcttcacaagtcctggttaggaagcgtcgtgcaaattctttacttgaagaaaccaaacagggtaatcttgaaagagaatgcatcgaagaactgtgcaataaagaagaagccagggaggtctttgaaaatgacccggaaacggattatttttatccaaaatacttagtttgtcttcgctcttttcaaactgggttattcactgctgcacgtcagtcaactaatgcttatcctgacctaagaagctgtgtcaatgccattccagaccagtgtagtcctctgccatgcaatgaagatggatatatgagctgcaaagatggaaaagcttcttttacttgcacttgtaaaccaggttggcaaggagaaaagtgtgaatttgacataaatgaatgcaaagatccctcaaatataaatggaggttgcagtcaaatttgtgataatacacctggaagttaccactgttcctgtaaaaatggttttgttatgctttcaaataagaaagattgt

SEQ ID NO: 171477 - DNA, 3560 bp, Homo sapiens
  Payload ID: 13725
  Gene Symbol: PROS1
  Gene Name: protein S (alpha)
  Uniprot ID: P07225
  ENST ID: ENST00000394236
  CDS Start-End: 318-2348
aaaagcagcaactagggagctggtgaagaaggatgtctcagcagtgtttactaggcctccaacactagagcccatcccccagctccgaaaagcttcctggaaatgtccttgttatcacttcccctctcgggctgggcgctgggagcgggcggtctcctccgcccccggctgttccgccgaggctcgctgggtcgctggcgccgccgcgcagcacggctcagaccgaggcgcacaggctcgcagctccgcggcgcctagcgctccggtccccgccgcgacgcgccaccgtccctgccggcgcctccgcgcgcttcgaaatgagggtcctgggtgggcgctgcggggcgctgctggcgtgtctcctcctagtgcttcccgtctcagaggcaaactttttgtcaaagcaacaggcttcacaagtcctggttaggaagcgtcgtgcaaattctttacttgaagaaaccaaacagggtaatcttgaaagagaatgcatcgaagaactgtgcaataaagaagaagccagggaggtctttgaaaatgacccggaaacggattatttttatccaaaatacttagtttgtcttcgctcttttcaaactgggttattcactgctgcacgtcagtcaactaatgcttatcctgacctaagaagctgtgtcaatgccattccagaccagtgtagtcctctgccatgcaatgaagatggatatatgagctgcaaagatggaaaagcttcttttacttgcacttgtaaaccaggttggcaaggagaaaagtgtgaatttgacataaatgaatgcaaagatccctcaaatataaatggaggttgcagtcaaatttgtgataatacacctggaagttaccactgttcctgtaaaaatggttttgttatgctttcaaataagaaagattgtaaagatgtggatgaatgctctttgaagccaagcatttgtggcacagctgtgtgcaagaacatcccaggagattttgaatgtgaatgccccgaaggctacagatataatctcaaatcaaagtcttgtgaagatatagatgaatgctctgagaacatgtgtgctcagctttgtgtcaattaccctggaggttacacttgctattgtgatgggaagaaaggattcaaacttgcccaagatcagaagagttgtgaggttgtttcagtgtgccttcccttgaaccttgacacaaagtatgaattactttacttggcggagcagtttgcaggggttgttttatatttaaaatttcgtttgccagaaatcagcagattttcagcagaatttgatttccggacatatgattcagaaggcgtgatactgtacgcagaatctatcgatcactcagcgtggctcctgattgcacttcgtggtggaaagattgaagttcagcttaagaatgaacatacatccaaaatcacaactggaggtgatgttattaataatggtctatggaatatggtgtctgtggaagaattagaacatagtattagcattaaaatagctaaagaagctgtgatggatataaataaacctggacccctttttaagccggaaaatggattgctggaaaccaaagtatactttgcaggattccctcggaaagtggaaagtgaactcattaaaccgattaaccctcgtctagatggatgtatacgaagctggaatttgatgaagcaaggagcttctggaataaaggaaattattcaagaaaaacaaaataagcattgcctggttactgtggagaagggctcctactatcctggttctggaattgctcaatttcacatagattataataatgtatccagtgctgagggttggcatgtaaatgtgaccttgaatattcgtccatccacgggcactggtgttatgcttgccttggtttctggtaacaacacagtgccctttgctgtgtccttggtggactccacctctgaaaaatcacaggatattctgttatctgttgaaaatactgtaatatatcggatacaggccctaagtctatgttccgatcaacaatctcatctggaatttagagtcaacagaaacaatctggagttgtcgacaccacttaaaatagaaaccatctcccatgaagaccttcaaagacaacttgccgtcttggacaaagcaatgaaagcaaaagtggccacatacctgggtggccttccagatgttccattcagtgccacaccagtgaatgccttttataatggctgcatggaagtgaatattaatggtgtacagttggatctggatgaagccatttctaaacataatgatattagagctcactcatgtccatcagtttggaaaaagacaaagaattcttaaggcatcttttctctgcttataataccttttccttgtgtgtaattatacttatgtttcaataacagctgaagggttttatttacaatgtgcagtctttgattattttgtggtcctttcctgggatttttaaaaggtcctttgtcaaggaaaaaaattctgttgtgatataaatcacagtaaagaaattcttacttctcttgctatctaagaatagtgaaaaataacaattttaaatttgaatttttttcctacaaatgacagtttcaatttttgtttgtaaaactaaattttaattttatcatcatgaactagtgtctaaatacctatgtttttttcagaaagcaaggaagtaaactcaaacaaaagtgcgtgtaattaaatactattaatcataggcagatactattttgtttatgtttttgtttttttcctgatgaaggcagaagagatggtggtctattaaatatgaattgaatggagggtcctaatgccttatttcaaaacaattcctcagggggaacagctttggcttcatctttctcttgtgtggcttcacatttaaaccagtatctttattgaattagaaaacaagtgggacatattttcctgagagcagcacaggaatcttcttcttggcagctgcagtctgtcaggatgagatatcagattaggttggataggtggggaaatctgaagtgggtacattttttaaattttgctgtgtgggtcacacaaggtctacattacaaaagacagaattcagggatggaaaggagaatgaacaaatgtgggagttcatagttttccttgaatccaacttttaattaccagagtaagttgccaaaatgtgattgttgaagtacaaaaggaactatgaaaaccagaacaaattttaacaaaaggacaaccacagagggatatagtgaatatcgtatcattgtaatcaaagaagtaaggaggtaagattgccacgtgcctgctggtactgtgatgcatttcaagtggcagttttatcacgtttgaatctaccattcatagccagatgtgtatcagatgtttcactgacagtttttaacaataaattcttttcactgtattttatatcacttataataaatcggtgtataattttaaaatgcatgtgaatatctttattatatcaactgtttgaataaaacaaaattacataatagacatttaactcttcataca

SEQ ID NO: 171478 - DNA, 3335 bp, Homo sapiens
  Payload ID: 13725
  Gene Symbol: PROS1
  Gene Name: protein S (alpha)
  ENST ID: ENST00000407433
  CDS Start-End: 562-2199
gaatgaggaagacgcaaaagcagaaacccctgataaaaccatcagacttcatgagacttattcaccaccatgagaacagtatgggggaaaccaccccagtgattcaattttctcccaccagttgcctcccacaacatgtggcaattatgggagttcaattaaagatgagatttggatggggacacagagccaaaccatatcaagtacaaagaaaagagtctcataagatgcaagtgaggaagagttttgtcaaagcaacaggcttcacaagtcctggttaggaagcgtcgtgcaaattctttacttgaagaaaccaaacagggtaatcttgaaagagaatgcatcgaagaactgtgcaataaagaagaagccagggaggtctttgaaaatgacccggaaacggattatttttatccaaaatacttagtttgtcttcgctcttttcaaactgggttattcactgctgcacgtcagtcaactaatgcttatcctgacctaagaagctgtgtcaatgccattccagaccagtgtagtcctctgccatgcaatgaagatggatatatgagctgcaaagatggaaaagcttcttttacttgcacttgtaaaccaggttggcaaggagaaaagtgtgaatttgacataaatgaatgcaaagatccctcaaatataaatggaggttgcagtcaaatttgtgataatacacctggaagttaccactgttcctgtaaaaatggttttgttatgctttcaaataagaaagattgtaaagatgtggatgaatgctctttgaagccaagcatttgtggcacagctgtgtgcaagaacatcccaggagattttgaatgtgaatgccccgaaggctacagatataatctcaaatcaaagtcttgtgaagatatagatgaatgctctgagaacatgtgtgctcagctttgtgtcaattaccctggaggttacacttgctattgtgatgggaagaaaggattcaaacttgcccaagatcagaagagttgtgaggttgtttcagtgtgccttcccttgaaccttgacacaaagtatgaattactttacttggcggagcagtttgcaggggttgttttatatttaaaatttcgtttgccagaaatcagcagattttcagcagaatttgatttccggacatatgattcagaaggcgtgatactgtacgcagaatctatcgatcactcagcgtggctcctgattgcacttcgtggtggaaagattgaagttcagcttaagaatgaacatacatccaaaatcacaactggaggtgatgttattaataatggtctatggaatatggtgtctgtggaagaattagaacatagtattagcattaaaatagctaaagaagctgtgatggatataaataaacctggacccctttttaagccggaaaatggattgctggaaaccaaagtatactttgcaggattccctcggaaagtggaaagtgaactcattaaaccgattaaccctcgtctagatggatgtatacgaagctggaatttgatgaagcaaggagcttctggaataaaggaaattattcaagaaaaacaaaataagcattgcctggttactgtggagaagggctcctactatcctggttctggaattgctcaatttcacatagattataataatgtatccagtgctgagggttggcatgtaaatgtgaccttgaatattcgtccatccacgggcactggtgttatgcttgccttggtttctggtaacaacacagtgccctttgctgtgtccttggtggactccacctctgaaaaatcacaggatattctgttatctgttgaaaatactgtaatatatcggatacaggccctaagtctatgttccgatcaacaatctcatctggaatttagagtcaacagaaacaatctggagttgtcgacaccacttaaaatagaaaccatctcccatgaagaccttcaaagacaacttgccgtcttggacaaagcaatgaaagcaaaagtggccacatacctgggtggccttccagatgttccattcagtgccacaccagtgaatgccttttataatggctgcatggaagtgaatattaatggtgtacagttggatctggatgaagccatttctaaacataatgatattagagctcactcatgtccatcagtttggaaaaagacaaagaattcttaaggcatcttttctctgcttataataccttttccttgtgtgtaattatacttatgtttcaataacagctgaagggttttatttacaatgtgcagtctttgattattttgtggtcctttcctgggatttttaaaaggtcctttgtcaaggaaaaaaattctgttgtgatataaatcacagtaaagaaattcttacttctcttgctatctaagaatagtgaaaaataacaattttaaatttgaatttttttcctacaaatgacagtttcaatttttgtttgtaaaactaaattttaattttatcatcatgaactagtgtctaaatacctatgtttttttcagaaagcaaggaagtaaactcaaacaaaagtgcgtgtaattaaatactattaatcataggcagatactattttgtttatgtttttgtttttttcctgatgaaggcagaagagatggtggtctattaaatatgaattgaatggagggtcctaatgccttatttcaaaacaattcctcagggggaacagctttggcttcatctttctcttgtgtggcttcacatttaaaccagtatctttattgaattagaaaacaagtgggacatattttcctgagagcagcacaggaatcttcttcttggcagctgcagtctgtcaggatgagatatcagattaggttggataggtggggaaatctgaagtgggtacattttttaaattttgctgtgtgggtcacacaaggtctacattacaaaagacagaattcagggatggaaaggagaatgaacaaatgtgggagttcatagttttccttgaatccaacttttaattaccagagtaagttgccaaaatgtgattgttgaagtacaaaaggaactatgaaaaccagaacaaattttaacaaaaggacaaccacagagggatatagtgaatatcgtatcattgtaatcaaagaagtaaggaggtaagattgccacgtgcctgctggtactgtgatgcatttcaagtggcagttttatcacgtttgaatctaccattcatagccagatgtgtatcagatgtttcactgacagtttttaacaataaattcttttcactgtattttatatcacttataataaatcggtgtataattttaaaa

SEQ ID NO: 171479 - DNA, 562 bp, Homo sapiens
  Payload ID: 13725
  Gene Symbol: PROS1
  Gene Name: protein S (alpha)
  ENST ID: ENST00000472684
  CDS Start-End: 395-562
agcattgtcgactgaactgcgtgccctggttggtaggattttcttctctagagctgcagcctcctagaaagtttccattttgtcaaagcaacaggcttcacaagtcctggttaggaagcgtcgtgcaaattctttacttgaagaaaccaaacagggtaatcttgaaagagaatgcatcgaagaactgtgcaataaagaagaagccagggaggtctttgaaaatgacccggaaacggattatttttatccaaaatacttagtttgtcttcgctcttttcaaactgggttattcactgctgcacgtcagtcaactaatgcttatcctgacctaagaagctgtgtcaatgccattccagaccagtgtagtcctctgccatgcaatgaagatggatatatgagctgcaaagatggaaaagcttcttttacttgcacttgtaaaccaggttggcaaggagaaaagtgtgaatttgacataaatgaatgcaaagatccctcaaatataaatggaggttgcagtcaaatttgtgataatacacctggaagttaccactgttcctgtaaa

SEQ ID NO: 171480 - DNA, 3481 bp, Homo sapiens
  Payload ID: 13726
  Gene Symbol: PSKH1
  Gene Name: protein serine kinase H1
  Uniprot ID: P11801
  ENST ID: ENST00000291041
  CDS Start-End: 171-1445
gagaatggcggcggcggcggcggcggcggcggccgctgccattgcccggagatggccggcagagccgccgagacgccgaagagcccgccgcccgcgcgaggtgtagacggggcactgccttcagagcaggtcctgccagcctcgctggagaggatgccctcgtgtccgtgatgggctgtgggacaagcaaggtccttcccgagccacccaaggatgtccagctggatctggtcaagaaggtggagcccttcagtggcactaagagtgacgtgtacaagcacttcatcacagaggtggacagtgttggccctgtcaaagccgggttcccagcagcaagtcagtatgcacacccctgccccggtcccccgactgctggccacacggagcctccctcagaaccaccacgcagggccagggtagctaagtacagggccaagtttgacccacgtgttacagctaagtatgacatcaaggccctaattggccgaggcagcttcagccgagtggtacgtgtagagcaccgggcaacccggcagccgtatgccatcaagatgattgagaccaagtaccgggaggggcgggaggtgtgtgagtcggagctgcgtgtgctgcgtcgggtgcgtcatgccaacatcatccagctggtggaggtgttcgagacacaggagcgggtgtacatggtgatggagctggccactggtggagagctctttgaccgcatcattgccaagggctccttcaccgagcgtgacgccacgcgggtgctgcagatggtgctggatggcgtccggtatctgcatgcactgggcatcacacaccgagacctcaaacctgagaatctgctctactaccatccgggcactgactccaagatcatcatcaccgacttcggcctggccagtgctcgcaagaagggtgatgactgcttgatgaagaccacctgtggcacgcctgagtacattgccccagaagtcctggtccgcaagccatacaccaactcagtggacatgtgggcgctgggcgtcattgcctacatcctactcagtggcaccatgccgtttgaggatgacaaccgtacccggctgtaccggcagatcctcaggggcaagtacagttactctggggagccctggcctagtgtgtccaacctggccaaggacttcattgaccgcctgctgacagtggaccctggagcccgtatgactgcactgcaggccctgaggcacccgtgggtggtgagcatggctgcctcttcatccatgaagaacctgcaccgctccatatcccagaacctccttaaacgtgcctcctcgcgctgccagagcaccaaatctgcccagtccacgcgttccagccgctccacacgctccaataagtcacgccgtgtgcgggaacgggagctgcgggagctcaacctgcgctaccagcagcaatacaatggctgagccgcctggctgtgcacacatgcagcacgacccagcctggccacacactgtggtgccatctgggtccgatgccctctctggagataggcctatgtggcccacagtaggtgaagaatgtctggctccagccctttctctgtgccttcagcagcccctgtcctcaccatgggcctgggccaggtgtgacagagtagaggtagcacagggggctgtgactccccctgaactgggagcctggcctggcactgatacccctcttggtgggcagctgctctggtggagttgggaagggataggacctggccttcactgtctcccttgccctttgacttttccccaatcaaagggaactgcagtgctgggtggagtgtcctgtggcctcaggaccctttgggacagttacttctgggaccccctttcctccacagagcccttctccctggtttcacacattcccatgcatcctgatccttaagattatgctccagtgggagaccctggtaggcacaaagcttgtgccttgactggacccgtagcccctggctaggtcgaaacagccctccacctcccagccaagatctgtcttccttcatggtgcctccagggagccttcctggtcccaggacctctggtggagggccatggcgtggaccttcacccttctggactgtgtggccatgctggtcatcggcttgcccaggctccagcctctccagattctgaggggtctcagcccaccgcccttggtgccttctttgtagagcccaccgctacctccctctccccgttggatgtccattccattccccaggtgcctccttcccaactgggggtggttaaagggagccccactgctgctacctggggaatggggcacctgggggccaaggcagagggaagggggtcctcccgattagggtcgagtgtcagcctgggttctatcctttggtgcagccccattgccttttcccttcaggctctgttgctccctcctctgcagctgcacgaaggcgccatctggtgtctgcatgggtgttggcagcctgggagtgatcactgcacgcccatcgtgcacacctgcccatcgtgcacacccacccatggtgcacacctgtagtcctccatgaggacatgggaaggtaggagttgccgccctgggggagggtcccgggctgctcacctctccccttctgctgagcttctgcgcacccctccctggaacttagccatactgtgtgacctgcctctgaaaccagggtgccaggggcactgccttctcacagctggccttgccccgtccaccctgtgctgcttcccttcacagcattaaccttccagtctgggtcccactgagcctcaagctggaaggagcccctgcgggaggtgggtggggttgggtggctgctttcccagaggcctgagccagaaccatccccatttcttttgtggtatctccccctaccacaaaccaggctggaacccaagccccttcctccacagctgccttcagtgggtagaatggggccagggcccagctttggccttagcttgacggcagggcccctgccattgcaggagggtttggttcccactcagcttctgccggtcggcagcctgggccaggcccttttcctgcatgtgccacctccagtgggaaacaaaactaaagagaccactctgtgccaagtcgactatgccttagacacatcctcctaccgtccccaatgccccctgggcaggaggcagtggagaaccaagccccatggcctcagaatttccccccagttccccaagtgtctctggggacctgaagccctggggcttacgttctctcttgcccagggtgggcctggtcctgagggcaggacagggggtttggagatgtgggcctttgatagacccacttgggccttcatgccatggcctgtggatggagaatgtgcagttatttattatgcgtattcagtttgtaaacgtatcctctgtattcagtaaacaggctgcctctccagggagggctgccattcattccaaca

SEQ ID NO: 171481 - DNA, 1509 bp, Homo sapiens
  Payload ID: 13726
  Gene Symbol: PSKH1
  Gene Name: protein serine kinase H1
  ENST ID: ENST00000570631
  CDS Start-End: 171-1232
gagaatggcggcggcggcggcggcggcggcggccgctgccattgcccggagatggccggcagagccgccgagacgccgaagagcccgccgcccgcgcgaggtgtagacggggcactgccttcagagcaggtcctgccagcctcgctggagaggatgccctcgtgtccgtgatgggctgtgggacaagcaaggtccttcccgagccacccaaggatgtccagctggatctggtcaagaaggtggagcccttcagtggcactaagagtgacgtgtacaagcacttcatcacagaggtggacagtgttggccctgtcaaagccgggttcccagcagcaagtcagtatgcacacccctgccccggtcccccgactgctggccacacggagcctccctcagaaccaccacgcagggccagggtagctaagtacagggccaagtttgacccacgtgttacagctaagtatgacatcaaggccctaattggccgaggcagcttcagccgagtggtacgtgtagagcaccgggcaacccggcagccgtatgccatcaagatgattgagaccaagtaccgggaggggcgggaggtgtgtgagtcggagctgcgtgtgctgcgtcgggtgcgtcatgccaacatcatccagctggtggaggtgttcgagacacaggagcgggtgtacatggtgatggagctggccactggtggagagctctttgaccgcatcattgccaagggctccttcaccgagcgtgacgccacgcgggtgctgcagatggtgctggatggcgtccggtatctgcatgcactgggcatcacacaccgagacctcaaacctgagaatctgctctactaccatccgggcactgactccaagatcatcatcaccgacttcggcctggccagtgctcgcaagaagggtgatgactgcttgatgaagaccacctgtggcacgcctgagtacattgccccagaagtcctggtccgcaagccatacaccaactcagtggacatgtgggcgctgggcgtcattgcctacatcctactcagtggcaccatgccgtttgaggatgacaaccgtacccggctgtaccggcagatcctcaggggcaagtacagttactctggggaggtgagtctgtcctgcccctgtcctggatgttggggaggcacctgcgggggcaggtatatcctgcagctctcagtcagaggtatgtcctcagggccatgctcgtgagggccaggcaggtcatataaaagggacaaagtgagactatcagaatgtagtttgggttccctcaaggtgagccctgagacaaggacttgggagcagatagtttatttgggatgtgatttgagtaactaaaagtgaaggagtgggaaaagtgaggcaggaagggagaaagtcagtagagtatattgagaaatggactgccactgtgggccactgggaaccttggtaataaccatgtggaatgtgcctcatagttgtaccaccaaagagcaggaacgtg

SEQ ID NO: 171482 - DNA, 1322 bp, Homo sapiens
  Payload ID: 13727
  Gene Symbol: PSKH2
  Gene Name: protein serine kinase H2
  Uniprot ID: Q96QS6
  ENST ID: ENST00000276616
  CDS Start-End: 76-1233
tgataaagggcggaggaacggggctggctgcttcccgagtccccaggtcccgcgagcggcgggcgtgttgcgggtatggggtgcggcgccagcaggaaggtggtcccggggccaccagcgctggcttgggccaagcacgaaggtcaaaaccaagccggcgtcggaggcgcggggcctgggcccgaggcggcggcccaggcggcgcagaggatacaggtggctcgcttccgagccaagttcgacccccgggtccttgccagatatgacatcaaagctcttattgggacaggcagtttcagcagggttgtcagggtagagcagaagaccaccaagaaaccttttgcaataaaagtgatggaaaccagagagagggaaggtagagaagcgtgcgtgtctgagctgagcgtcctgcggcgggttagccatcgttacattgtccagctcatggagatctttgagactgaggatcaagtttacatggtaatggagctggctaccggaggggagctctttgatcgactcattgctcagggatcctttacagagcgggatgccgtcaggatcctccagatggttgctgatgggattaggtatttgcatgcgctgcagataactcataggaatctaaagcctgaaaacctcttatactatcatccaggtgaagagtcgaaaattttaattacagattttggtttggcatactccgggaaaaaaagtggtgactggacaatgaagacactctgtgggaccccagagtacatagctcctgaggttttgctaaggaagccttataccagtgcagtggacatgtgggctcttggtgtgatcacatatgctttacttagcggattcctgccttttgatgatgaaagccagacaaggctttacaggaagattctgaaaggcaaatataattatacaggagagccttggccaagcatttcccacttggcgaaggactttatagacaaactactgattttggaggctggtcatcgcatgtcagctggccaggccctggaccatccctgggtgatcaccatggctgcagggtcttccatgaagaatctccagagggccatatcccgaaacctcatgcagagggcctctccccactctcagagtcctggatctgcacagtcttctaagtcacattattctcacaaatccaggcatatgtggagcaagagaaacttaaggatagtagaatcgccactgtctgcgcttttgtaagcagatgacctctaaaactatttttgcctattttaggaccatttcatcatgattagggcaccctcaagctccaaagacacgggactcca

SEQ ID NO: 171483 - DNA, 11464 bp, Homo sapiens
  Payload ID: 13728
  Gene Symbol:
  Gene Name: Protein SOGA3  [Source:UniProtKB/Swiss-Prot
  Acc:Q5TF21]
  Uniprot ID: Q5TF21
  ENST ID: ENST00000481848
  CDS Start-End: 512-3355
ctctttggttacttctaccctatcgtcccttgcaatcccgccttctctcctgcccagttcggtgaggtcagctcatgaacatctctgcacttcctggggagcgtctggcccagcttggtacctcgcgtgttagcctgctgagagctgcagctccagcccagccgcggaccgccgggaagtcacccgctctgggggcagctgaatcttgacgttaccgccattgtttggagaaatcgagtgggtgtggaactgcggcgagcgagcccaaagtcatgctcagccggaaagtcgcatacaataatatgaagttgaactttcctcggcgcagaaaggcacaataataaaccctgagatccccggaatatcagaaggaaagtgctgttgatttgttcagctacttggaaacctcgcctctgctgagaacttaggaaggaaggttggcggcggtgaagagggaagaggatgatctagtaatgggctcttccaaatcgcatctggtaggttcatagccatgagtcagccaccaatcgggggcgctgcccctgccacagcagcagcttctcccgccgctgcagccactgaggctcgtctgcacccggagggcagcagcagaaagcagcagcgagctcagtcacccgctagaccgagggacagttcgctgcgacagacaatcgcggccacccggtccccagtgggggccggcactaaactcaattctgttcggcagcagcagctgcagcagcagcaacagcagggtaacaagaccgggagccgcacggggccgcccgccagcatccgaggaggcggaggtggggccgagaaggcgacgcccctggcgcccaaaggggccgctccgggagctgtccagcctgtggctggtgctgaagcggcccccgccgcgaccctggccgctttgggcggcaggaggcccggaccgcccgaggagccgcctcgggagctagagtccgtgccctcgaaactcggggaaccccctccgctcggagaagggggaggagggggcggggaaggaggaggagccggcggcggctccggggaaagggaggggggcgctccgcagccgccgccgcccaggggctggcgagggaaaggcgtacgcgctcagcagaggggcggcagcggcggggagggggcctccccttctccatcctcctcttctgcgggcaaaaccccaggaaccggcagcagaaactccggaagcggcgttgcggggggcggcagcggtggtggagggagctactggaaagaaggatgtctgcagtctgagctcatccagttccatctcaagaaggagcgggcggcagcggcggcggccgcggctcagatgcacgctaagaacggcggcggcagcagtagccgcagctccccggtgtctggcccccctgccgtttgcgagaccctggccgtcgcctccgcctccccaatggcggcggcggcggagggcccccagcagagcgcagagggcagcgcgagcggcgggggcatgcaggcggcagcgcccccttcgtcgcagccgcacccgcagcagctccaagagcaggaagaaatgcaagaggagatggagaagctgcgagaggaaaacgagactctcaagaacgagatcgatgagctgagaaccgagatggacgagatgagggacactttcttcgaggaggatgcctgtcaactgcaggaaatgcgccacgagttggagagagccaacaaaaactgccggatcctgcagtaccgcctccgcaaagccgagcgcaaaaggctccgctacgcccagaccggggaaatcgacggggagctgttgcgcagcctggagcaggacctcaaggttgcaaaggatgtatctgtgagacttcaccatgaattagaaaatgtggaagaaaagagaacaacaacagaagatgaaaatgagaaactgaggcaacagctcatagaagttgaaattgcaaagcaagctttacagaatgaactggaaaaaatgaaagagttatccttaaaaagaagaggaagcaaagatttgccaaaatctgaaaaaaaggctcaacagactcccacagaggaggacaatgaagatctgaagtgccagctgcagtttgttaaggaagaagccgctttgatgagaaagaaaatggccaagattgataaagaaaaggacagatttgaacacgagctccagaagtacagatccttttatggggatctggacagtcctttgcccaaaggagaagccggaggccctcccagcactagggaggccgagctcaagctacggctaaggctggtggaggaagaagccaacatcctgggcaggaaaatcgtcgaactggaggtggagaacagaggcctgaaggcggaactggacgaccttaggggcgatgacttcaacggctcggccaacccgctcatgagggagcagagcgaatccctgtcggagctgcggcagcacctgcagctggtggaagacgagacggagctgctgcggaggaacgtggccgacctggaggagcagaacaagcgcatcacggcggagctcaacaagtacaagtacaagtccggcggccacgacagcgcgcggcaccacgacaacgccaagaccgaggccctgcaggaggagctgaaggcggcgcgcctgcagatcaacgagctcagcggcaaggtcatgcagctgcagtacgagaaccgcgtgcttatgtccaacatgcagcgctacgacctggcctcgcacctgggcatccgcggcagcccccgcgacagcgacgccgagagcgacgcgggcaagaaggagagcgacgacgactcgcggcctccgcaccgcaagcgcgaagggcccatcggcggcgagagcgactcggaggaggtgcgcaacatccgctgcctcacgcccactcgctccttctacccggcgcccgggccctggcccaagagcttctccgatcggcagcagatgaaggacatccgctcggaggccgagcgcctgggcaagaccatcgaccggctcatcgccgacacgagcaccatcatcaccgaggcgcgcatctacgtggccaacggggacctgttcggactcatggacgaggaggacgacggcagccgcatccgggagcacgagctgctctaccgcatcaacgctcagatgaaggccttccgcaaggagctgcagaccttcatcgaccgcctcgaggtgcccaagtctgcggacgaccgcggcgccgaggagcccatttccgtgagtcagatgttccagcctatcattttacttattctcattcttgtattattttcatcactttcttacacaacaatatttaaacttgtcttcctttttacactgttttttgtactgtaaatctttcatcatttaccattcattgtagtattttcagtttgtttattttgttcacccttcaagacaagaagtaaaagaagtataatttctgtagtaaccaatgctataaaaacactgaagactgcttatttctttaaaaagatacaactcatcttaccaagaccaaattcaataagaagcccaaacactaaaatatttcaggctttattttaaaggcaagtgagactgcttcaaataaaacaacttcaagcttccaagaaacagttaagaggaggcagagaagagcagaaacacttctttgctgacacttacactgttgccatggacctacataagcagtgggagaacacagagactaactggcataaggaaaagatggaattactggaccagtttgacaatgaaagaaaggaatgggaaagtcaatggaagattatgcagaagaaaatagaagagctttgccgggaagtaaagctttggaggaaaatcaatatcaatgaaagtgctaagatcattgatctttaccatgagaagaccattccagagaaagtgatagaatcttccccaaattaccccgatttaggacaaagtgaatttataaggacgaatcacaaagatggtctgagaaaagaaaataaaagagagcagagcttagtcagtggaggaaatcaaatgtgtaaggaacaaaaagcaacaaaaaaatcaaaagtagggtttttggatcctttggctacagacaaccaaaaggaatgtgaggcctggcctgacctgaggacttctgaggaagacagcaagagctgttctggcgccctcagtacagctcttgaagaacttgcgaaggtgagtgaagaattatgcagctttcaagaggaaattcgaaagcggtctaaccatagaaggatgaagtcagattcttttctccaggaaatgccaaatgtaactaatatacctcatggggaccccatgatcaacaatgaccagtgcattcttccaatcagtttagaaaaagaaaaacagaaaaacaggaagaatctgagctgtaccaatgtgctccagagcaattctacgaaaaaatgtggaattgatacaatcgatttaaaaagaaatgaaactccaccagttcctcctccaagaagcacctctcgaaattttcccagctcggattctgaacaagcctatgaaagatggaaggaaaggttagaccacaacagctgggtgccccatgagggtcgaagtaaaaggaattacaaccctcacttccctttgagacaacaagagatgtctatgttgtatccaaatgaagggaaaacttcgaaagatggtatcatcttttcctctttggtaccagaagtcaaaatagatagcaagcctccaagtaatgaagatgttggacttagcatgtggtcatgtgacattgggataggtgcaaaaaggagcccctctacttcgtggtttcagaaaacctgctctacccccagtaatccaaaatatgaaatggtgatcccagatcaccctgctaaatctcatcctgatcttcatgtaagtaatgactgtagctcctcagtagcagagagcagtagcccacttagaaatttcagttgtggctttgaaaggactacaaggaatgagaagctggcagcaaagactgatgaatttaacagaactgtatttagaacagatagaaattgtcaggcaatacagcaaaatcacagctgctcaaaatcatcggaggatctcaagccctgtgatacctcatctactcacacaggtagcatatcacaaagtaacgatgtgtccggtatttggaaaaccaatgcccacatgcctgtgcccatggaaaatgtgcctgataatcccaccaagaaatccacaacaggcctagtaagacaaatgcagggacacctaagtcctcgcagttatcgaaatatgctccacgagcatgactggagaccgagtaatttgtctggccgtccgaggtcagctgatcccaggtcaaattatggtgttgtggaaaagctgctgaaaacctatgagacagcaacagagtctgcattgcaaaattctaagtgcttccaggataattggaccaaatgtaattctgatgtcagtggtggtgccacattaagtcagcatttagaaatgctccaaatggaacaacagtttcagcaaaagacagctgtgtgggggggacaggaagtgaagcaaggaatagatccgaaaaagataacagaggaatccatgtcagtgaacgcctcacatggaaaaggattttcccgacctgctagaccagcaaatcgtcgtctcccctccagatgggcatccagatctccatctgcaccccctgccttgcggagaactacccacaactataccatttctctgcgatccgaagcattgatggtttaagtctttggcctggattgctatattacagaagttctagtcccacttgtcaaacagagcattctgagtgtttacaggcggacctgttctcttccgacaagcaatttgaatcttaactttccatcagtcttcagtgtttttaatctaaggaataattatcttcctgcattttgatttcttagatcagaattttttaatgccatcctcattagttttccaatacaatataagttgaaacaatgtacaatattgtatattctttgttgcaagtggcagaaagtaaggttatgtgcatggccatgtgtttgtaggtgcatgtgttgaaataggaagtatcctagtatgtatttagatatgaaaaacttatgtgctagtgttgactttgaaattataacatgtatacctatatattctttgtgtttatttaaaagttttgaaaatatgcagtactgtttatattttgtataccttttaataggtatccacttaaggcatttgcagtacaaatattaattgaccacttccttggcccccagctacaatgaaaaagaagaattatgcacacatctaacattggtagatttctaaagacaactcataaataatttcttaacccatataaggataaaataataccattgatattcttgtttattctttttaaataaaaatgtcacaagtttaatagatcagccttgtaaagcaagcataaaatgttcataaatgttttatatattatttggtagtctagtatggctttaactgaatatttgatcctcagagacagtatcatgagactgcattataaatgacatgattaaatgatgaatttattttgtcagcctcagcaacaaacatttcctaaatgggatgcaaaaagaaactgaatgatgttgaattttagtttttctttaagttgtggtaagcttttagtttagctgctttaacatggagtcatacatacttagaggtaagtcatttattatttttttcctttttctaatcttttccttaaaattaatagataacaaactaagttacttttttactaacaaggaagatcaggaataatatttctttgaaagctgaaattatacttctcacagtttgctaccgaaaaaaggcttaaactaaaccttgacatccacagtagcatcaggaatagaaatgtgtattttggctacagtttgcatacagtgaacacataaaatctatattgaaaactgacagaaatatgaatgtcgaggggcttggaattctaaatggaagattttagaaggaactttgctctctactgtcactatataaaaccaattatgttatgttattagatattaactctatttaagcttttcttttactaagaaattcttatgccaaatgtattccaagagccatctccttatgatgtatttgaaccatttagagaaattcacttcattgtaccccatgacctgaggtaaagaaaataattttcaaattgcagacttccttgaaaggctcaagactgtagcatggtgatgtctagattcatactttactgtaaggacagtttcggtagttaagtggaattaaaggtctagagtgatttgtattggatggtaactaaggtctatacatctactcttttaattcttatttccttcaggaagatccttttccacaggaagctatcaaagaaaagtaaactagacaccaagtaatatcactctcataatatgctttccagctagaggggagaaaacaccaggaaagaggaaccctgggtcataaaatgacggacctgttaggaaaatgctgttgtgtgacaatggagagcctgcccaaggactgtgcaacctatctgttcctctccaccagtgtatcccaagtagtctggtatgatctgtggttccttagaatattgaggatctctttaaaaaatgaaatttctgatctcaccccatattactaaagcaaaatttccaggggtagggactgggactccagaaccattaataaaacaaaacaaaacaaagcaaaatattgatgatcaggcagatttgaaaacagtgacattgcttgatctctgaatggatggatgcccttgggtggtcacttttcttcctaggacttgcctttgttatctgtaaattagaatggctatactttcagacttcacaattttaagccacttttttctattaacagttgaatgaaccagtgggacacattttaacgtcttcttatgttgactaaaattatagttagagctgagaaaaaaaaaatagcatctagtccaactccttgattgtaaaactgaaaaactaaggttatttgaatgttctgttttctctttttaaatattttataacttttaaatggaaaaacctattaggtaaatggaaataatccttgaaaatagtttttgatgttttgtgatttttaactggtaaatttctactttaggtgggcattttcttccctagaatatgccctttattatgctatcattgctagatttaaagggacttgtaagcatttctggaaatatttgatttaaaaacatatattaatagatgttttccctagcagacttttggagcaaaaatattattttagttcagcagaggattactgatattatgggctgatctcagaaaggaataaggatgaggcagagaggagtacttgagtttgtgtgtgtgtgtgtgtgtgtgtgtttgtgtcagtgtcacataagttctccatattgccttatgtcccaaagccaaatataaaaatataaatgatgctttgtataattcattttatcaaaaattacccataactttcatttgtttttatatcgacaatgaagatgatcatatttcattttgcagatgtggccataaaatattatttacttctatataggtgattttaccaggtttagttatcctgagaaaacatctggacttaagagtttctgcttccctacaaagatctttaaagttatttttaggcacatttgtgacaaacaactacttgatattgaaatctccttcagccattagaagctatcaaataaagtaggtgtaaaaacaactgtctgtggcatttgtatacatcgagaacatttttctttccctcattttctgcagtgaactccagtaaagctaagtgtcttatgaaatctaaactcatatatgtacacagttcactctagcttcttccaaaatatctctaggtagtacaactgaagccaaacctgcctgacttcctgctcctggccacccaaaactccatatggcttctcgtacactgacatcctctctctacccatttaactgctaattgagtctgataaaagtcttctttgaaaaaagtttttacttctaagatttgcatttacatcataaaattaaaccattttcaggaaaatcagatttttttattacagtactatttgctttaaattcggcatgtttttcttaagtagcaagtacatgtatcggaacttagaactggtgggcgcggtggctcttgcctgtaatcccagcactttgggaggccaaggtggggggatcacgaggtcaggagatggagaccatcctggtttcatcacggtgaaaccccctctctgctaaaaatacaaaaaattagccaggcattgtggtggtcacctgtagtcccagctgctcgggaggctgaggcaggagaatggcatgaacccgggaggcagagcttgcagtgagcagagatcgcgccactgcactccagcctgggtgacagagtgagactctgtctcaaaaaaaaaaaaaaaaaagaacttataactatgacttgttcatctcaccctgaaaatatgttcctacaagaaaatgtgctttgcaaagcaaaaaaggcaaaaattggggatgagttcttcagacaagtaccaaaaatgatttctcgtcatttttattgtatgcatattcatcatagaaaataattttttgttttattgggaataaaatcatgatacttaaaatctgatacacatttcaatgatagtattaatccaataggttaaattaacaaattcttaggaaaaaaatctgtttatatgaagctatggagaaatctagaaagtaggtaacggtttagattttgagggacctatgaactcagaacaagttcatttagaggtgggaaacctgagattcaaagaggtctgcatggctgccaagattgcagggacagaatccaagcctgggctcactcatgatctgctctcctgtataaatgtcccatgtgcatctatgaccttattgtttgcaaagcaaattcatattccacgacttgtctgcttcttacaacaaactacaaggcaggcattgtgatttctaagtaagaaggaaaaattaagtagtcaagataatatttagaataaatatttttgaagatgatagttaaatagatggctcttcagactcctagctcaggctatttttccagccttcttttcccaaggaagagaagacaaaaaaaaaaaaagattgaacagctctttttcatttttgttttgttcattttatacatgacacaaattgtttatcttgctctcattgggagtttctgttgattccctctttcaatgatcatcaaaagtcatcacccctgacttaaatggttttatgaaattcaagaagttgtgaacaaggctttaacaaaatatttccacttttaatgcctatgctctgattttatataaattttgtatgtaggacatgatgttgaagtaaaaccaataaatagccaatcagtattcatctctagcgtcaactgaatcctgacctcaatcttcaaaagaatcagaatagtttcacacttcataagttacatatactccagaataaataaaagcagtttgcttgaagtattatcttggctcatttgtgctgctataacaaaacacacttgagactgggttatttataaagaacagaaatttatttctctacagttctggaggctgggaagtccaagatcaagctgcaagcagattcggtgtctggtgagggctgctgtgtgctttcaaggtggtgccttattgctgtgtctttatatggcagaaggggccaacaatggagaaacagcagaatagcaagaagcagctgaatgctatgtgatgcttcttttataagggccttaaatcccattcatgaaagagaagccttcataatccaatcacctcctaaaggccctacctcttaatattgaagattaagtttcaacatgaattttggaggtacgtattcaaaccatagcaagcatacagtaatttccaatataaacctcactcaaaattacagtcacatgctgcacaaaccagttcaatgcacatatatgatgataagattataatacaatatttttgctatactttttctatgtttacatatacagatatcattgtgttacaattgcctttagtattcagtacagtaacatgctgtacaggtttgtagcctaggagcaatagatcatactttcaagcctaccatctagatttatataattacactctgtgatgttcgctcagtgatgaaatcacctgagaacacgtttctcagatcatatccctgttgttaagcaatgtgactgcaattgtgctctgctgccagtttatttttgaagctttatttttcaattacttactcatggcaattttataagaatcattaaacaaatttaatccagcta

SEQ ID NO: 171484 - DNA, 3350 bp, Homo sapiens
  Payload ID: 13728
  Gene Symbol:
  Gene Name: Protein SOGA3  [Source:UniProtKB/Swiss-Prot
  Acc:Q5TF21]
  ENST ID: ENST00000473298
  CDS Start-End: 1-874
cgagacggagctgctgcggaggaacgtggccgacctggaggagcagaacaagcgcatcacggcggagctcaacaagtacaagtacaagtccggcggccacgacagcgcgcggcaccacgacaacgccaagaccgaggccctgcaggaggagctgaaggcggcgcgcctgcagatcaacgagctcagcggcaaggtcatgcagctgcagtacgagaaccgcgtgcttatgtccaacatgcagcgctacgacctggcctcgcacctgggcatccgcggcagcccccgcgacagcgacgccgagagcgacgcgggcaagaaggagagcgacgacgactcgcggcctccgcaccgcaagcgcgaagggcccatcggcggcgagagcgactcggaggaggtgcgcaacatccgctgcctcacgcccactcgctccttctacccggcgcccgggccctggcccaagagcttctccgatcggcagcagatgaaggacatccgctcggaggccgagcgcctgggcaagaccatcgaccggctcatcgccgacacgagcaccatcatcaccgaggcgcgcatctacgtggccaacggggacctgttcggactcatggacgaggaggacgacggcagccgcatccgggagcacgagctgctctaccgcatcaacgctcagatgaaggccttccgcaaggagctgcagaccttcatcgaccgcctcgaggtgcccaagtctgcggacgaccgcggcgccgaggagcccatttccatgttccagcctatcattttacttattctcattcttgtattattttcatcactttcttacacaacaatatttaaacttgtcttcctttttacactgttttttgtactgtaaatctttcatcatttaccattcattgtagtattttcagtttgtttattttgttcacccttcaagacaagaagtaaaagaagtataatttctgtagtaaccaatgctataaaaacactgaagactgcttatttctttaaaaagatacaactcatcttaccaagaccaaattcaataagaagcccaaacactaaaatatttcaggctttattttaaaggcaagtgagactgcttcaaataaaacaacttcaagcttccaagaaacagttaagaggaggcagagaagagcagaaacacttctttgctgacacttacactgttgccatggacctacataagcagtgggagaacacagagactaactggcataaggaaaagatggaattactggaccagtttgacaatgaaagaaaggaatgggaaagtcaatggaagattatgcagaagaaaatagaagagctttgccgggaagtaaagctttggaggaaaatcaatatcaatgaaagtgctaagatcattgatctttaccatgagaagaccattccagagaaagtgatagaatcttccccaaattaccccgatttaggacaaagtgaatttataaggacgaatcacaaagatggtctgagaaaagaaaataaaagagagcagagcttagtcagtggaggaaatcaaatgtgtaaggaacaaaaagcaacaaaaaaatcaaaagtagggtttttggatcctttggctacagacaaccaaaaggaatgtgaggcctggcctgacctgaggacttctgaggaagacagcaagagctgttctggcgccctcagtacagctcttgaagaacttgcgaaggtgagtgaagaattatgcagctttcaagaggaaattcgaaagcggtctaaccatagaaggatgaagtcagattcttttctccaggaaatgccaaatgtaactaatatacctcatggggaccccatgatcaacaatgaccagtgcattcttccaatcagtttagaaaaagaaaaacagaaaaacaggaagaatctgagctgtaccaatgtgctccagagcaattctacgaaaaaatgtggaattgatacaatcgatttaaaaagaaatgaaactccaccagttcctcctccaagaagcacctctcgaaattttcccagctcggattctgaacaagcctatgaaagatggaaggaaaggttagaccacaacagctgggtgccccatgagggtcgaagtaaaaggaattacaaccctcacttccctttgagacaacaagagatgtctatgttgtatccaaatgaagggaaaacttcgaaagatggtatcatcttttcctctttggtaccagaagtcaaaatagatagcaagcctccaagtaatgaagatgttggacttagcatgtggtcatgtgacattgggataggtgcaaaaaggagcccctctacttcgtggtttcagaaaacctgctctacccccagtaatccaaaatatgaaatggtgatcccagatcaccctgctaaatctcatcctgatcttcatgtaagtaatgactgtagctcctcagtagcagagagcagtagcccacttagaaatttcagttgtggctttgaaaggactacaaggaatgagaagctggcagcaaagactgatgaatttaacagaactgtatttagaacagatagaaattgtcaggcaatacagcaaaatcacagctgctcaaaatcatcggaggatctcaagccctgtgatacctcatctactcacacaggtagcatatcacaaagtaacgatgtgtccggtatttggaaaaccaatgcccacatgcctgtgcccatggaaaatgtgcctgataatcccaccaagaaatccacaacaggcctagtaagacaaatgcagggacacctaagtcctcgcagttatcgaaatatgctccacgagcatgactggagaccgagtaatttgtctggccgtccgaggtcagctgatcccaggtcaaattatggtgttgtggaaaagctgctgaaaacctatgagacagcaacagagtctgcattgcaaaattctaagtgcttccaggataattggaccaaatgtaattctgatgtcagtggtggtgccacattaagtcagcatttagaaatgctccaaatggaacaacagtttcagcaaaagacagctgtgtgggggggacaggaagtgaagcaaggaatagatccgaaaaagataacagaggaatccatgtcagtgaacgcctcacatggaaaaggattttcccgacctgctagaccagcaaatcgtcgtctcccctccagatgggcatccagatctccatctgcaccccctgccttgcggagaactacccacaactataccatttctctgcgatccgaagcattgatggtttaagtctttggcctggattgctatattacagaagttctagtcccacttgtcaaacagagcattctgagtgttt

SEQ ID NO: 171485 - DNA, 900 bp, Homo sapiens
  Payload ID: 13728
  Gene Symbol:
  Gene Name: Protein SOGA3  [Source:UniProtKB/Swiss-Prot
  Acc:Q5TF21]
  ENST ID: ENST00000464495
  CDS Start-End: 1-292
cctgttcggactcatggacgaggaggacgacggcagccgcatccgggagcacgagctgctctaccgcatcaacgctcagatgaaggccttccgcaaggagctgcagaccttcatcgaccgcctcgaggtgcccaagtctgcggacgaccgcggcgccgaggagcccatttccgtgagtcagatgttccagcctatcattttacttattctcattcttgtattattttcatcactttcttacacaacaatatttaaacttgtcttcctttttacactgttttttgtactgtaaatctttcatcatttaccattcattgtagtattttcagtttgtttattttgttcacccttcaagacaagaagtaaaagaagtataatttctgtagtaaccaatgctataaaaacactgaagactgcttatttctttaaaaagatacaactcatcttaccaagaccaaattcaataagaagcccaaacactaaaatatttcaggcaagtgagactgcttcaaataaaacaacttcaagcttccaagaaacagttaagaggaggcagagaagagcagaaacacttctttgctgacacttacactgttgccatggacctacataagcagtgggagaacacagagactaactggcataaggaaaagatggaattactggaccagtttgacaatgaaagaaaggaatgggaaagtcaatggaagattatgcagaagaaaatagaagagctttgccgggaagtaaagctttggaggaaaatcaatatcaatgaaagtgctaagatcattgatctttaccatgagaagaccattccagagaaagtgatagaatcttccccaaattaccccgatttaggacaaagtgaatttataaggacgaatcacaaagatggtc

SEQ ID NO: 171486 - DNA, 4414 bp, Homo sapiens
  Payload ID: 13729
  Gene Symbol: PTK2
  Gene Name: protein tyrosine kinase 2
  Uniprot ID: Q05397
  ENST ID: ENST00000340930
  CDS Start-End: 156-3353
tgccttcgcttcacggcgccgagccgcggtccgagcagaactggggctcccttgcatcttccagttacaaattcagtgccttctgcagtttccccagagctcctcaagaataacggaagggagaatatgacagatacctagcatctagcaaaataatggcagctgcttaccttgaccccaacttgaatcacacaccaaattcgagtactaagactcacctgggtactggtatggaacgttctcctggtgcaatggagcgagtattaaaggtctttcattattttgaaagcaatagtgagccaaccacctgggccagtattatcaggcatggagatgctactgatgtcaggggcatcattcagaagatagtggacagtcacaaagtaaagcatgtggcctgctatggattccgcctcagtcacctgcggtcagaggaggttcactggcttcacgtggatatgggcgtctccagtgtgagggagaagtatgagcttgctcacccaccagaggagtggaaatatgaattgagaattcgttatttgccaaaaggatttctaaaccagtttactgaagataagccaactttgaatttcttctatcaacaggtgaagagcgattatatgttagagatagctgatcaagtggaccaggaaattgctttgaagttgggttgtctagaaatacggcgatcatactgggagatgcggggcaatgcactagaaaagaagtctaactatgaagtattagaaaaagatgttggtttaaagcgattttttcctaagagtttactggattctgtcaaggccaaaacactaagaaaactgatccaacaaacatttagacaatttgccaaccttaatagagaagaaagtattctgaaattctttgagatcctgtctccagtctacagatttgataaggaatgcttcaagtgtgctcttggttcaagctggattatttcagtggaactggcaatcggcccagaagaaggaatcagttacctaacggacaagggctgcaatcccacacatcttgctgacttcactcaagtgcaaaccattcagtattcaaacagtgaagacaaggacagaaaaggaatgctacaactaaaaatagcaggtgcacccgagcctctgacagtgacggcaccatccctaaccattgcggagaatatggctgacctaatagatgggtactgccggctggtgaatggaacctcgcagtcatttatcatcagacctcagaaagaaggtgaacgggctttgccatcaataccaaagttggccaacagcgaaaagcaaggcatgcggacacacgccgtctctgtgtcagaaacagatgattatgctgagattatagatgaagaagatacttacaccatgccctcaaccagggattatgagattcaaagagaaagaatagaacttggacgatgtattggagaaggccaatttggagatgtacatcaaggcatttatatgagtccagagaatccagctttggcggttgcaattaaaacatgtaaaaactgtacttcggacagcgtgagagagaaatttcttcaagaagccttaacaatgcgtcagtttgaccatcctcatattgtgaagctgattggagtcatcacagagaatcctgtctggataatcatggagctgtgcacacttggagagctgaggtcatttttgcaagtaaggaaatacagtttggatctagcatctttgatcctgtatgcctatcagcttagtacagctcttgcatatctagagagcaaaagatttgtacacagggacattgctgctcggaatgttctggtgtcctcaaatgattgtgtaaaattaggagactttggattatcccgatatatggaagatagtacttactacaaagcttccaaaggaaaattgcctattaaatggatggctccagagtcaatcaattttcgacgttttacctcagctagtgacgtatggatgtttggtgtgtgtatgtgggagatactgatgcatggtgtgaagccttttcaaggagtgaagaacaatgatgtaatcggtcgaattgaaaatggggaaagattaccaatgcctccaaattgtcctcctaccctctacagccttatgacgaaatgctgggcctatgaccccagcaggcggcccaggtttactgaacttaaagctcagctcagcacaatcctggaggaagagaaggctcagcaagaagagcgcatgaggatggagtccagaagacaggccacagtgtcctgggactccggagggtctgatgaagcaccgcccaagcccagcagaccgggttatcccagtccgaggtccagcgaaggattttatcccagcccacagcacatggtacaaaccaatcattaccaggtttctggctaccctggttcacatggaatcacagccatggctggcagcatctatccaggtcaggcatctcttttggaccaaacagattcatggaatcatagacctcaggagatagcaatgtggcagcccaatgtggaggactctacagtattggacctgcgagggattgggcaagtgttgccaacccatctgatggaagagcgtctaatccgacagcaacaggaaatggaagaagatcagcgctggctggaaaaagaggaaagatttctgaaacctgatgtgagactctctcgaggcagtattgacagggaggatggaagtcttcagggtccgattggaaaccaacatatatatcagcctgtgggtaaaccaggtaaagaagaaaagaattgggcggaaagaaatcctgcagctccaccaaagaaaccgcctcgccctggagctcccggtcatctgggaagccttgccagcctcagcagccctgctgacagctacaacgagggtgtcaagccatggaggcttcagccccaggaaatcagcccccctcctactgccaacctggaccggtcgaatgataaggtgtacgagaatgtgacgggcctggtgaaagctgtcatcgagatgtccagtaaaatccagccagccccaccagaggagtatgtccctatggtgaaggaagtcggcttggccctgaggacattattggccactgtggatgagaccattcccctcctaccagccagcacccaccgagagattgagatggcacagaagctattgaactctgacctgggtgagctcatcaacaagatgaaactggcccagcagtatgtcatgaccagcctccagcaagagtacaaaaagcaaatgctgactgctgctcacgccctggctgtggatgccaaaaacttactcgatgtcattgaccaagcaagactgaaaatgcttgggcagacgagaccacactgagcctcccctaggagcacgtcttgctaccctcttttgaagatgttctctagccttccaccagcagcgaggaattaaccctgtgtcctcagtcgccagcacttacagctccaacttttttgaatgaccatctggttgaaaaatctttctcatataagtttaaccacactttgatttgggttcattttttgttttgtttttttcaatcatgatattcagaaaaatccaggatccaaaatgtggcgtttttctaagaatgaaaattatatgtaagcttttaagcatcatgaagaacaatttatgttcacattaagatacgttctaaagggggatggccaaggggtgacatcttaattcctaaactaccttagctgcatagtggaagaggagagcatgaagcaaagaattccaggaaacccaagaggctgagaattcttttgtctaccatagaattattatccagactggaatttttgtttgttagaacacccttcagttgcaatatgctaatcccactttacaaagaatataaaagctatattttgaagacttgagttatttcagaaaaaactacagccctttttgtcttacctgccttttactttcgtgtggatatgtgaagcattgggtcgggaactagctgtagaacacaactaaaaactcatgtcttttttcacagaataatgtgccagttttttgtagcaatgttatttctcttggaagcagaaatgctttgtaccagagcacctccaaactgcattgaggagaagttccagaaccatcccctttttccatttttatataatttataaagaaagattaaagccatgttgactattttacagccactggagttaactaacccttccttgtatctgtcttcccaggagagaatgaagcaaaacaggaatttggttttcttttgatgtccagttacaccatccattctgttaattttgaaaaaatataccctccctttagtttgttgggggatataaattattctcaggaagaatataatgaactgtacagttactttgacctattaaaaaggtgttaccagt

SEQ ID NO: 171487 - DNA, 4415 bp, Homo sapiens
  Payload ID: 13729
  Gene Symbol: PTK2
  Gene Name: protein tyrosine kinase 2
  Uniprot ID: Q05397
  ENST ID: ENST00000395218
  CDS Start-End: 311-3331
gcgcacgcgcgcgggcccgcgccgacgcagcacggcctcgagggcgcgagcccgcgccgccgccgccgccgccggtcccggaccactgtgagcccgcggcgtgaggcgtgggaggaagcgcggctgctgtcgcccagcgccgccccgtcgtcgtctgccttcgcttcacggcgccgagccgcggtccgagcagaactggggctcccttgcatcttccagttacaaattcagtgccttctgcagtttccccagagctcctcaagaataacggaagggagaatatgacagatacctagcatctagcaaaataatggcagctgcttaccttgaccccaacttgaatcacacaccaaattcgagtactaagactcacctgggtactggtatggaacgttctcctggtgcaatggagcgagtattaaaggtctttcattattttgaaagcaatagtgagccaaccacctgggccagtattatcaggcatggagatgctactgatgtcaggggcatcattcagaagatagtggacagtcacaaagtaaagcatgtggcctgctatggattccgcctcagtcacctgcggtcagaggaggttcactggcttcacgtggatatgggcgtctccagtgtgagggagaagtatgagcttgctcacccaccagaggagtggaaatatgaattgagaattcgttatttgccaaaaggatttctaaaccagtttactgaagataagccaactttgaatttcttctatcaacaggtgaagagcgattatatgttagagatagctgatcaagtggaccaggaaattgctttgaagttgggttgtctagaaatacggcgatcatactgggagatgcggggcaatgcactagaaaagaagtctaactatgaagtattagaaaaagatgttggtttaaagcgattttttcctaagagtttactggattctgtcaaggccaaaacactaagaaaactgatccaacaaacatttagacaatttgccaaccttaatagagaagaaagtattctgaaattctttgagatcctgtctccagtctacagatttgataaggaatgcttcaagtgtgctcttggttcaagctggattatttcagtggaactggcaatcggcccagaagaaggaatcagttacctaacggacaagggctgcaatcccacacatcttgctgacttcactcaagtgcaaaccattcagtattcaaacagtgaagacaaggacagaaaaggaatgctacaactaaaaatagcaggtgcacccgagcctctgacagtgacggcaccatccctaaccattgcggagaatatggctgacctaatagatgggtactgccggctggtgaatggaacctcgcagtcatttatcatcagacctcagaaagaaggtgaacgggctttgccatcaataccaaagttggccaacagcgaaaagcaaggcatgcggacacacgccgtctctgtgtcagaaacagatgattatgctgagattatagatgaagaagatacttacaccatgccctcaaccagggattatgagattcaaagagaaagaatagaacttggacgatgtattggagaaggccaatttggagatgtacatcaaggcatttatatgagtccagagaatccagctttggcggttgcaattaaaacatgtaaaaactgtacttcggacagcgtgagagagaaatttcttcaagaagccttaacaatgcgtcagtttgaccatcctcatattgtgaagctgattggagtcatcacagagaatcctgtctggataatcatggagctgtgcacacttggagagctgaggtcatttttgcaagtaaggaaatacagtttggatctagcatctttgatcctgtatgcctatcagcttagtacagctcttgcatatctagagagcaaaagatttgtacacagggacattgctgctcggaatgttctggtgtcctcaaatgattgtgtaaaattaggagactttggattatcccgatatatggaagatagtacttactacaaagcttccaaaggaaaattgcctattaaatggatggctccagagtcaatcaattttcgacgttttacctcagctagtgacgtatggatgtttggtgtgtgtatgtgggagatactgatgcatggtgtgaagccttttcaaggagtgaagaacaatgatgtaatcggtcgaattgaaaatggggaaagattaccaatgcctccaaattgtcctcctaccctctacagccttatgacgaaatgctgggcctatgaccccagcaggcggcccaggtttactgaacttaaagctcagctcagcacaatcctggaggaagagaaggctcagcaagaagagcgcatgaggatggagtccagaagacaggccacagtgtcctgggactccggagggtctgatgaagcaccgcccaagcccagcagaccgggttatcccagtccgaggtccagcgaaggattttatcccagcccacagcacatggtacaaaccaatcattaccaggactctacagtattggacctgcgagggattgggcaagtgttgccaacccatctgatggaagagcgtctaatccgacagcaacaggaaatggaagaagatcagcgctggctggaaaaagaggaaagatttctgaaacctgatgtgagactctctcgaggcagtattgacagggaggatggaagtcttcagggtccgattggaaaccaacatatatatcagcctgtgggtaaaccagatcctgcagctccaccaaagaaaccgcctcgccctggagctcccggtcatctgggaagccttgccagcctcagcagccctgctgacagctacaacgagggtgtcaagcttcagccccaggaaatcagcccccctcctactgccaacctggaccggtcgaatgataaggtgtacgagaatgtgacgggcctggtgaaagctgtcatcgagatgtccagtaaaatccagccagccccaccagaggagtatgtccctatggtgaaggaagtcggcttggccctgaggacattattggccactgtggatgagaccattcccctcctaccagccagcacccaccgagagattgagatggcacagaagctattgaactctgacctgggtgagctcatcaacaagatgaaactggcccagcagtatgtcatgaccagcctccagcaagagtacaaaaagcaaatgctgactgctgctcacgccctggctgtggatgccaaaaacttactcgatgtcattgaccaagcaagactgaaaatgcttgggcagacgagaccacactgagcctcccctaggagcacgtcttgctaccctcttttgaagatgttctctagccttccaccagcagcgaggaattaaccctgtgtcctcagtcgccagcacttacagctccaacttttttgaatgaccatctggttgaaaaatctttctcatataagtttaaccacactttgatttgggttcattttttgttttgtttttttcaatcatgatattcagaaaaatccaggatccaaaatgtggcgtttttctaagaatgaaaattatatgtaagcttttaagcatcatgaagaacaatttatgttcacattaagatacgttctaaagggggatggccaaggggtgacatcttaattcctaaactaccttagctgcatagtggaagaggagagcatgaagcaaagaattccaggaaacccaagaggctgagaattcttttgtctaccatagaattattatccagactggaatttttgtttgttagaacacccttcagttgcaatatgctaatcccactttacaaagaatataaaagctatattttgaagacttgagttatttcagaaaaaactacagccctttttgtcttacctgccttttactttcgtgtggatatgtgaagcattgggtcgggaactagctgtagaacacaactaaaaactcatgtcttttttcacagaataatgtgccagttttttgtagcaatgttatttctcttggaagcagaaatgctttgtaccagagcacctccaaactgcattgaggagaagttccagaaccatcccctttttccatttttatataatttataaagaaagattaaagccatgttgactattttacagccactggagttaactaacccttccttgtatctgtcttcccaggagagaatgaagcaaaacaggaatttggttttcttttgatgtccagttacaccatccattctgttaattttgaaaaaatataccctccctttagtttgttgggggatataaattattctcaggaagaatataatgaactgtacagttactttgacctattaaaaaggtgttaccagtaaagttcttgttgtaatatcctt

SEQ ID NO: 171488 - DNA, 1940 bp, Homo sapiens
  Payload ID: 13729
  Gene Symbol: PTK2
  Gene Name: protein tyrosine kinase 2
  ENST ID: ENST00000430260
  CDS Start-End: 459-1547
aacagcacattctagcctccagccaagcaggaatgtctttttaaacagttgagcaaattcccagattagaaagtctggtgcactgatgtcactctttcctgagtaatttttgggtggttgtttactgcacactatctaccaggagcctagaaactttgaatgagtgtcattattagaactctagagttgtaggaatgtaggaagagctgtttgccacagttaggacgagggtttcaaactgtctgctgagccctggggcatctgcgtggaatgggaaactagcaaagtctcgctttggctgcattctgaggggtttatgtgatggcaaacagccaagatgaagaagctgcctagcagtcgctgcagcggctgcagcgttatgtgggacttcagatagcttctgagtagtcaagcagtgcacaatcctggaggaagagaaggctcagcaagaagagcgcatgaggatggagtccagaagacaggccacagtgtcctgggactccggagggtctgatgaagcaccgcccaagcccagcagaccgggttatcccagtccgaggtccagcgaaggattttatcccagcccacagcacatggtacaaaccaatcattaccaggtttctggctaccctggttcacatggaatcacagccatggctggcagcatctatccaggtcaggcatctcttttggaccaaacagattcatggaatcatagacctcaggagatagcaatgtggcagcccaatgtggaggactctacagtattggacctgcgagggattgggcaagtgttgccaacccatctgatggaagagcgtctaatccgacagcaacaggaaatggaagaagatcagcgctggctggaaaaagaggaaagatttctgaaacctgatgtgagactctctcgaggcagtattgacagggaggatggaagtcttcagggtccgattggaaaccaacatatatatcagcctgtgggtaaaccagatcctgcagctccaccaaagaaaccgcctcgccctggagctcccggtcatctgggaagccttgccagcctcagcagccctgctgacagctacaacgagggtgtcaagcttcagccccaggaaatcagcccccctcctactgccaacctggaccggtcgaatgataaggtgtacgagaatgtgacgggcctggtgaaagctgtcatcgagatgtccagtaaaatccagccagccccaccagaggagtatgtccctatggtgaaggaagtcggcttggccctgaggacattattggccactgtggatgagaccattcccctcctaccagccagcacccaccgagagattgagatggcacagaagctattgaactctgacctgggtgagctcatcaacaagatgaaactggcccagcagtatgtcatgaccagcctccagcaagagtacaaaaagcaaatgctgactgctgctcacgccctggctgtggatgccaaaaacttactcgatgtcattgaccaagcaagactgaaaatgcttgggcagacgagaccacactgagcctcccctaggagcacgtcttgctaccctcttttgaagatgttctctagccttccaccagcagcgaggaattaaccctgtgtcctcagtcgccagcacttacagctccaacttttttgaatgaccatctggttgaaaaatctttctcatataagtttaaccacactttgatttgggttcattttttgttttgtttttttcaatcatgatattcagaaaaatccaggatccaaaatgtggcgtttttctaagaatgaaaattatatgtaagcttttaagcatcatgaagaacaatttatgttcacattaagatacgttctaaagggggatggccaaggggtgacatcttaattcctaaactaccttagctgcatagtggaagaggagagcatg

SEQ ID NO: 171489 - DNA, 574 bp, Homo sapiens
  Payload ID: 13729
  Gene Symbol: PTK2
  Gene Name: protein tyrosine kinase 2
  ENST ID: ENST00000520828
  CDS Start-End: 398-574
gtcgtctgccttcgcttcacggcgccgagccgcggtccgagcagaactggggctcccttgcatcttccagttacaaattcagtgccttctgcagtttccccagagctcctcaagaataacggaagggaggtatagtaatggttaagaaactttgcaaagaaagtgaataatgccagtactgtcaccttttggaacttgttggtatttcctgttgtctgtctttggaagcaatagtgagccaaccacctgggccagtattatcaggcatggagatgctactgatgtcaggggcatcattcagaagatagtggacagtcacaaagtaaagcatgtggcctgctatggattccgcctcagtcacctgcggtcagaggaggttcactggcttcacgtggatatgggcgtctccagtgtgagggagaagtatgagcttgctcacccaccagaggagtggaaatatgaattgagaattcgttatttgccaaaaggatttctaaaccagtttactgaagataagccaactttgaatttcttctatcaacaggtgaagagcgattatatgttagagatagct

SEQ ID NO: 171490 - DNA, 569 bp, Homo sapiens
  Payload ID: 13729
  Gene Symbol: PTK2
  Gene Name: protein tyrosine kinase 2
  ENST ID: ENST00000522424
  CDS Start-End: 171-569
aaatacaagtaggagttggccagagaaagaagagaaaggtgttccaggcaagagacacaacataaagaggcatgggagagcataatgacttcggagaacttgccaggacataaaggaagaaggtgtatagcacaatcctggaggaagagaaggctcagcaagaagagcgcatgaggatggagtccagaagacaggccacagtgtcctgggactccggagggtctgatgaagcaccgcccaagcccagcagaccgggttatcccagtccgaggtccagcgaaggattttatcccagcccacagcacatggtacaaaccaatcattaccaggtttctggctaccctggttcacatggaatcacagccatggctggcagcatctatccaggtcaggcatctcttttggaccaaacagattcatggaatcatagacctcaggagatagcaatgtggcagcccaatgtggaggactctacagtattggacctgcgagggattgggcaagtgttgccaacccatctgatggaagagcgtctaatccgacagcaacaggaaatggaagaagatcag

SEQ ID NO: 171491 - DNA, 542 bp, Homo sapiens
  Payload ID: 13729
  Gene Symbol: PTK2
  Gene Name: protein tyrosine kinase 2
  ENST ID: ENST00000521907
  CDS Start-End: 186-542
ttagtagagacggggttttaccgtcttggccaggctggtcttgaactcctgacttcaggtgatccacccaccttggcctcccaaagtgttgggattacaggcctgagccaccgtgcccggcagtgcttggtcttattaaacgctttatgaaagaatatgacagatacctagcatctagcaaaataatggcagctgcttaccttgaccccaacttgaatcacacaccaaattcgagtactaagactcacctgggtactggtatggaacgttctcctggtgcaatggagcgagtattaaaggtctttcattattttgaaagcaatagtgagccaaccacctgggccagtattatcaggcatggagatgctactgatgtcaggggcatcattcagaagatagtggacagtcacaaagtaaagcatgtggcctgctatggattccgcctcagtcacctgcggtcagaggaggttcactggcttcacgtggatatgggcgtctccagtgtgagggagaagtatgagcttgctcacccaccagaggag

SEQ ID NO: 171492 - DNA, 556 bp, Homo sapiens
  Payload ID: 13729
  Gene Symbol: PTK2
  Gene Name: protein tyrosine kinase 2
  ENST ID: ENST00000521791
  CDS Start-End: 80-280
ccgtgaggaggttgggggccctcgcggaggccgagaggcttaaggagaatatgacagatacctagcatctagcaaaataatggcagctgcttaccttgaccccaacttgaatcacacaccaaattcgagtactaagactcacctgggtactggtatggaacgttctcctggtgcaatggagcgagtattaaaggtctttcattattttgaaagcaatagtgagccaaccacctgggccagtattatcaggcatggagatgctactgatgtcaggatatgaattgagaattcgttatttgccaaaaggatttctaaaccagtttactgaagataagccaactttgaatttcttctatcaacaggtgaagagcgattatatgttagagatagctgatcaagtggaccaggaaattgctttgaagttgggttgtctagaaatacggcgatcatactgggagatgcggggcaatgcactagaaaagaagtctaactatgaagtattagaaaaagatgttggtttaaagcgattttttcctaagagtttactggattctgt

SEQ ID NO: 171493 - DNA, 571 bp, Homo sapiens
  Payload ID: 13729
  Gene Symbol: PTK2
  Gene Name: protein tyrosine kinase 2
  ENST ID: ENST00000520892
  CDS Start-End: 180-545
gaggccggtggccgtgaggaggttgggggccctcgcggaggccgagaggcttaaggaggcagaactggggctcccttgcatcttccagttacaaattcagtgccttctgcagtttccccagagctcctcaagaataacggaagggagaatatgacagatacctagcatctagcaaaataatggcagctgcttaccttgaccccaacttgaatcacacaccaaattcgagtactaagactcacctgggtactggtatggaacgttctcctggtgcaatggagcgagtattaaaggtctttcattattttgaaagcaatagtgagccaaccacctgggccagtattatcaggcatggagatgctactgatgtcaggggcatcattcagaagatagtggacagtcacaaagtaaagcatgtggcctgctatggattccgcctcagtcacctgcggtcagaggaggttcactggcttcacgtggatatgggcgtctccagtgtgagggagaagtatgagcttgctcacccaccagaggagtggaagtaagatacaaacctgctttggtgtgatgc

SEQ ID NO: 171494 - DNA, 592 bp, Homo sapiens
  Payload ID: 13729
  Gene Symbol: PTK2
  Gene Name: protein tyrosine kinase 2
  ENST ID: ENST00000521250
  CDS Start-End: 1-219
accattgcggagaatatggctgacctaatagatgggtactgccggctggtgaatggaacctcgcagtcatttatcatcagacctcagaaagaaggtgaacgggctttgccatcaataccaaagttggccaacagcgaaaagcaaggcatgcggacacacgccgtctctgtgtcagcacaatcctggaggaagagaaggctcagcaagaagagcgcatgaggatggagtccagaagacaggccacagtgtcctgggactccggagggtctgatgaagcaccgcccaagcccagcagaccgggttatcccagtccgaggtccagcgaaggattttatcccagcccacagcacatggtacaaaccaatcattaccaggtttctggctaccctggttcacatggaatcacagccatggctggcagcatctatccaggtcaggcatctcttttggaccaaacagattcatggaatcatagacctcaggagatagcaatgtggcagcccaatgtggaggactctacagtattggacctgcgagggattgggcaagtgttgccaacccatctgatggaagagcgtctaatccgacagca

SEQ ID NO: 171495 - DNA, 576 bp, Homo sapiens
  Payload ID: 13729
  Gene Symbol: PTK2
  Gene Name: protein tyrosine kinase 2
  ENST ID: ENST00000519024
  CDS Start-End: 71-576
gtaatagtgttttaagaatatttcagcgtagtagaggatttaagcagatcgctttgcctactttaattatatgaaataccaggaggtcagatgtttaacctctttcaacatatctgtttcttttcctgcagaaacagatgattatgctgagattatagatgaagaagatacttacaccatgccctcaaaaagctatggaatagatgaagccagggattatgagattcaaagagaaagaatagaacttggacgatgtattggagaaggccaatttggagatgtacatcaaggcatttatatgagtccagagaatccagctttggcggttgcaattaaaacatgtaaaaactgtacttcggacagcgtgagagagaaatttcttcaagaagccttaacaatgcgtcagtttgaccatcctcatattgtgaagctgattggagtcatcacagagaatcctgtctggataatcatggagctgtgcacacttggagagctgaggtcatttttgcaagtaaggaaatacagtttggatctagcatctttgatcctgtatgcctatcagcttagtacagctct

SEQ ID NO: 171496 - DNA, 542 bp, Homo sapiens
  Payload ID: 13729
  Gene Symbol: PTK2
  Gene Name: protein tyrosine kinase 2
  ENST ID: ENST00000523670
  CDS Start-End: 69-287
aatagtgttttaagaatatttcagcgtagtagaggatttaagcagatcgctttgcctactttaattatatgaaataccaggaggtcagatgtttaacctctttcaacatatctgtttcttttcctgcagaaacagatgattatgctgagattatagatgaagaagatacttacaccatgccctcaaccagggattatgagattcaaagagaaagaatagaacttggacgatgtattggagaaggccaatttggagatgtacatcaaggcatttatatgagtccataacaatgcgtcagtttgaccatcctcatattgtgaagctgattggagtcatcacagagaatcctgtctggataatcatggagctgtgcacacttggagagctgaggtcatttttgcaagtaaggaaatacagtttggatctagcatctttgatcctgtatgcctatcagcttagtacagctcttgcatatctagagagcaaaagatttgtacacagggacattgctgctcggaatgttctggtgtcctcaaatgatt

SEQ ID NO: 171497 - DNA, 573 bp, Homo sapiens
  Payload ID: 13729
  Gene Symbol: PTK2
  Gene Name: protein tyrosine kinase 2
  ENST ID: ENST00000520151
  CDS Start-End: 63-437
gttttaagaatatttcagcgtagtagaggatttaagcagatcgctttgcctactttaattatatgaaataccaggaggtcagatgtttaacctctttcaacatatctgtttcttttcctgcagaaacagatgattatgctgagattatagatgaagaagatacttacaccatgccctcaaccagggattatgagattcaaagagaaagaatagaacttggacgatgtattggagaaggccaatttggagatgtacatcaaggcatttatatgagtccagagaatccagctttggcggttgcaattaaaacatgtaaaaactgtacttcggacagcgtgagagagaaatttcttcaagaagcctctgaggtcatttttgcaagtaaggaaatacagtttggatctagcatctttgatcctgtatgcctatcagcttagtacagctcttgcatatctagagagcaaaagatttgtacacagggacattgctgctcggaatgttctggtgtcctcaaatgattgtgtaaaattaggagactttggattatcccgatatatggaagatagtacttac

SEQ ID NO: 171498 - DNA, 3236 bp, Homo sapiens
  Payload ID: 13729
  Gene Symbol: PTK2
  Gene Name: protein tyrosine kinase 2
  ENST ID: ENST00000523539
  CDS Start-End: 1-2175
attgcggagaatatggctgacctaatagatgggtactgccggctggtgaatggaacctcgcagtcatttatcatcagacctcagaaagaaggtgaacgggctttgccatcaataccaaagttggccaacagcgaaaagcaaggcatgcggacacacgccgtctctgtgtcagaaacagatgattatgctgagattatagatgaagaagatacttacaccatgccctcaaaaagctatggaatagatgaagccagggattatgagattcaaagagaaagaatagaacttggacgatgtattggagaaggccaatttggagatgtacatcaaggcatttatatgagtccagagaatccagctttggcggttgcaattaaaacatgtaaaaactgtacttcggacagcgtgagagagaaatttcttcaagaagccttaacaatgcgtcagtttgaccatcctcatattgtgaagctgattggagtcatcacagagaatcctgtctggataatcatggagctgtgcacacttggagagctgaggtcatttttgcaagtaaggaaatacagtttggatctagcatctttgatcctgtatgcctatcagcttagtacagctcttgcatatctagagagcaaaagatttgtacacagggacattgctgctcggaatgttctggtgtcctcaaatgattgtgtaaaattaggagactttggattatcccgatatatggaagatagtacttactacaaagcttccaaaggaaaattgcctattaaatggatggctccagagtcaatcaattttcgacgttttacctcagctagtgacgtatggatgtttggtgtgtgtatgtgggagatactgatgcatggtgtgaagccttttcaaggagtgaagaacaatgatgtaatcggtcgaattgaaaatggggaaagattaccaatgcctccaaattgtcctcctaccctctacagccttatgacgaaatgctgggcctatgaccccagcaggcggcccaggtttactgaacttaaagctcagctcagcacaatcctggaggaagagaaggctcagcaagaagagcgcatgaggatggagtccagaagacaggccacagtgtcctgggactccggagggtctgatgaagcaccgcccaagcccagcagaccgggttatcccagtccgaggtccagcgaaggattttatcccagcccacagcacatggtacaaaccaatcattaccaggtttctggctaccctggttcacatggaatcacagccatggctggcagcatctatccaggtcaggcatctcttttggaccaaacagattcatggaatcatagacctcaggagatagcaatgtggcagcccaatgtggaggactctacagtattggacctgcgagggattgggcaagtgttgccaacccatctgatggaagagcgtctaatccgacagcaacaggaaatggaagaagatcagcgctggctggaaaaagaggaaagatttctgaaacctgatgtgagactctctcgaggcagtattgacagggaggatggaagtcttcagggtccgattggaaaccaacatatatatcagcctgtgggtaaaccagatcctgcagctccaccaaagaaaccgcctcgccctggagctcccggtcatctgggaagccttgccagcctcagcagccctgctgacagctacaacgagggtgtcaagcttcagccccaggaaatcagcccccctcctactgccaacctggaccggtcgaatgataaggtgtacgagaatgtgacgggcctggtgaaagctgtcatcgagatgtccagtaaaatccagccagccccaccagaggagtatgtccctatggtgaaggaagtcggcttggccctgaggacattattggccactgtggatgagaccattcccctcctaccagccagcacccaccgagagattgagatggcacagaagctattgaactctgacctgggtgagctcatcaacaagatgaaactggcccagcagtatgtcatgaccagcctccagcaagagtacaaaaagcaaatgctgactgctgctcacgccctggctgtggatgccaaaaacttactcgatgtcattgaccaagcaagactgaaaatgcttgggcagacgagaccacactgagcctcccctaggagcacgtcttgctaccctcttttgaagatgttctctagccttccaccagcagcgaggaattaaccctgtgtcctcagtcgccagcacttacagctccaacttttttgaatgaccatctggttgaaaaatctttctcatataagtttaaccacactttgatttgggttcattttttgttttgtttttttcaatcatgatattcagaaaaatccaggatccaaaatgtggcgtttttctaagaatgaaaattatatgtaagcttttaagcatcatgaagaacaatttatgttcacattaagatacgttctaaagggggatggccaaggggtgacatcttaattcctaaactaccttagctgcatagtggaagaggagagcatgaagcaaagaattccaggaaacccaagaggctgagaattcttttgtctaccatagaattattatccagactggaatttttgtttgttagaacacccttcagttgcaatatgctaatcccactttacaaagaatataaaagctatattttgaagacttgagttatttcagaaaaaactacagccctttttgtcttacctgccttttactttcgtgtggatatgtgaagcattgggtcgggaactagctgtagaacacaactaaaaactcatgtcttttttcacagaataatgtgccagttttttgtagcaatgttatttctcttggaagcagaaatgctttgtaccagagcacctccaaactgcattgaggagaagttccagaaccatcccctttttccatttttatataatttataaagaaagattaaagccatgttgactattttacagccactggagttaactaacccttccttgtatctgtcttcccaggagagaatgaagcaaaacaggaatttggttttcttttgatgtccagttacaccatccattctgttaattttgaaaaaatataccctccctttagtttgttgggggatataaattattctcaggaagaatataatgaactgtacagttactttgacctattaaaaaggtgttaccagt

SEQ ID NO: 171499 - DNA, 4388 bp, Homo sapiens
  Payload ID: 13729
  Gene Symbol: PTK2
  Gene Name: protein tyrosine kinase 2
  ENST ID: ENST00000519993
  CDS Start-End: 288-488
aactccggactgagaccgggtcgggcgtgcgctgccgagagaggacgcgcgcctcagccggctgccgcgcacgcgcgcgggcccgcgccgacgcagcacggcctcgagggcgcgagcccgcgccgccgccgccgccgccggtcccggaccactgtgagcccgcggcgtgaggcgtgggaggaagcgcggctgctgtcgcccagcgccgccccgtcgtcgtctgccttcgcttcacggcgccgagccgcggtccgaaatatgacagatacctagcatctagcaaaataatggcagctgcttaccttgaccccaacttgaatcacacaccaaattcgagtactaagactcacctgggtactggtatggaacgttctcctggtgcaatggagcgagtattaaaggtctttcattattttgaaagcaatagtgagccaaccacctgggccagtattatcaggcatggagatgctactgatgtcaggatatgaattgagaattcgttatttgccaaaaggatttctaaaccagtttactgaagataagccaactttgaatttcttctatcaacaggtgaagagcgattatatgttagagatagctgatcaagtggaccaggaaattgctttgaagttgggttgtctagaaatacggcgatcatactgggagatgcggggcaatgcactagaaaagaagtctaactatgaagtattagaaaaagatgttggtttaaagcgattttttcctaagagtttactggattctgtcaaggccaaaacactaagaaaactgatccaacaaacatttagacaatttgccaaccttaatagagaagaaagtattctgaaattctttgagatcctgtctccagtctacagatttgataaggaatgcttcaagtgtgctcttggttcaagctggattatttcagtggaactggcaatcggcccagaagaaggaatcagttacctaacggacaagggctgcaatcccacacatcttgctgacttcactcaagtgcaaaccattcagtattcaaacagtgaagacaaggacagaaaaggaatgctacaactaaaaatagcaggtgcacccgagcctctgacagtgacggcaccatccctaaccattgcggagaatatggctgacctaatagatgggtactgccggctggtgaatggaacctcgcagtcatttatcatcagacctcagaaagaaggtgaacgggctttgccatcaataccaaagttggccaacagcgaaaagcaaggcatgcggacacacgccgtctctgtgtcagatgaaattagtggggacgaaacagatgattatgctgagattatagatgaagaagatacttacaccatgccctcaaaaagctatggaatagatgaagccagggattatgagattcaaagagaaagaatagaacttggacgatgtattggagaaggccaatttggagatgtacatcaaggcatttatatgagtccagagaatccagctttggcggttgcaattaaaacatgtaaaaactgtacttcggacagcgtgagagagaaatttcttcaagaagccttaacaatgcgtcagtttgaccatcctcatattgtgaagctgattggagtcatcacagagaatcctgtctggataatcatggagctgtgcacacttggagagctgaggtcatttttgcaagtaaggaaatacagtttggatctagcatctttgatcctgtatgcctatcagcttagtacagctcttgcatatctagagagcaaaagatttgtacacagggacattgctgctcggaatgttctggtgtcctcaaatgattgtgtaaaattaggagactttggattatcccgatatatggaagatagtacttactacaaagcttccaaaggaaaattgcctattaaatggatggctccagagtcaatcaattttcgacgttttacctcagctagtgacgtatggatgtttggtgtgtgtatgtgggagatactgatgcatggtgtgaagccttttcaaggagtgaagaacaatgatgtaatcggtcgaattgaaaatggggaaagattaccaatgcctccaaattgtcctcctaccctctacagccttatgacgaaatgctgggcctatgaccccagcaggcggcccaggtttactgaacttaaagctcagctcagcacaatcctggaggaagagaaggctcagcaagaagagcgcatgaggatggagtccagaagacaggccacagtgtcctgggactccggagggtctgatgaagcaccgcccaagcccagcagaccgggttatcccagtccgaggtccagcgaaggattttatcccagcccacagcacatggtacaaaccaatcattaccaggtttctggctaccctggttcacatggaatcacagccatggctggcagcatctatccaggtcaggcatctcttttggaccaaacagattcatggaatcatagacctcaggagatagcaatgtggcagcccaatgtggaggactctacagtattggacctgcgagggattgggcaagtgttgccaacccatctgatggaagagcgtctaatccgacagcaacaggaaatggaagaagatcagcgctggctggaaaaagaggaaagatttctgaaacctgatgtgagactctctcgaggcagtattgacagggaggatggaagtcttcagggtccgattggaaaccaacatatatatcagcctgtgggtaaaccagatcctgcagctccaccaaagaaaccgcctcgccctggagctcccggtcatctgggaagccttgccagcctcagcagccctgctgacagctacaacgagggtgtcaagccatggaggcttcagccccaggaaatcagcccccctcctactgccaacctggaccggtcgaatgataaggtgtacgagaatgtgacgggcctggtgaaagctgtcatcgagatgtccagtaaaatccagccagccccaccagaggagtatgtccctatggtgaaggaagtcggcttggccctgaggacattattggccactgtggatgagaccattcccctcctaccagccagcacccaccgagagattgagatggcacagaagctattgaactctgacctgggtgagctcatcaacaagatgaaactggcccagcagtatgtcatgaccagcctccagcaagagtacaaaaagcaaatgctgactgctgctcacgccctggctgtggatgccaaaaacttactcgatgtcattgaccaagcaagactgaaaatgcttgggcagacgagaccacactgagcctcccctaggagcacgtcttgctaccctcttttgaagatgttctctagccttccaccagcagcgaggaattaaccctgtgtcctcagtcgccagcacttacagctccaacttttttgaatgaccatctggttgaaaaatctttctcatataagtttaaccacactttgatttgggttcattttttgttttgtttttttcaatcatgatattcagaaaaatccaggatccaaaatgtggcgtttttctaagaatgaaaattatatgtaagcttttaagcatcatgaagaacaatttatgttcacattaagatacgttctaaagggggatggccaaggggtgacatcttaattcctaaactaccttagctgcatagtggaagaggagagcatgaagcaaagaattccaggaaacccaagaggctgagaattcttttgtctaccatagaattattatccagactggaatttttgtttgttagaacacccttcagttgcaatatgctaatcccactttacaaagaatataaaagctatattttgaagacttgagttatttcagaaaaaactacagccctttttgtcttacctgccttttactttcgtgtggatatgtgaagcattgggtcgggaactagctgtagaacacaactaaaaactcatgtcttttttcacagaataatgtgccagttttttgtagcaatgttatttctcttggaagcagaaatgctttgtaccagagcacctccaaactgcattgaggagaagttccagaaccatcccctttttccatttttatataatttataaagaaagattaaagccatgttgactattttacagccactggagttaactaacccttccttgtatctgtcttcccaggagagaatgaagcaaaacaggaatttggttttcttttgatgtccagttacaccatccattctgttaattttgaaaaaatataccctccctttagtttgttgggggatataaattattctcaggaagaatataatgaactgtacagttactttgacctattaaaaaggtgttaccagt

SEQ ID NO: 171500 - DNA, 552 bp, Homo sapiens
  Payload ID: 13729
  Gene Symbol: PTK2
  Gene Name: protein tyrosine kinase 2
  ENST ID: ENST00000521981
  CDS Start-End: 1-387
gcggagaatatggctgacctaatagatgggtactgccggctggtgaatggaacctcgcagtcatttatcatcagacctcagaaagaaggtgaacgggctttgccatcaataccaaagttggccaacagcgaaaagcaaggcatgcggacacacgccgtctctgtgtcagaaacagatgattatgctgagattatagatgaagaagatacttacaccatgccctcaaccagggattatgagattcaaagagaaagaatagaacttggacgatgtattggagaaggccaatttggagatgtacatcaaggcggcccaggtttactgaacttaaagctcagctcagcacaatcctggaggaagagaaggctcagcaagaagagcgcatgaggatggagtccagaagacaggccacagtgtcctgggactccggagggtctgatgaagcaccgcccaagcccagcagaccgggttatcccagtccgaggtccagcgaaggattttatcccagcccacagcacatggtacaaaccaatcattaccaggtttctggct

SEQ ID NO: 171501 - DNA, 570 bp, Homo sapiens
  Payload ID: 13729
  Gene Symbol: PTK2
  Gene Name: protein tyrosine kinase 2
  ENST ID: ENST00000520475
  CDS Start-End: 101-570
acgtaaattttaagaaacttgttgggatggttgtgttctaaagttaaggaatcaaggatgatgtcaagaatatgacagatacctagcatctagcaaaataatggcagctgcttaccttgaccccaacttgaatcacacaccaaattcgagtactaagactcacctgggtactggtatggaacgttctcctggtgcaatggagcgagtattaaaggtctttcattattttgaaagcaatagtgagccaaccacctgggccagtattatcaggcatggagatgctactgatgtcaggggcatcattcagaagatagtggacagtcacaaagtaaagcatgtggcctgctatggattccgcctcagtcacctgcggtcagaggaggttcactggcttcacgtggatatgggcgtctccagtgtgagggagaagtatgagcttgctcacccaccagaggagtggaaatatgaattgagaattcgttatttgccaaaaggatttctaaaccagtttactgaagataagccaactttgaatttcttctatcaacaggtgaagagcgattatatgtt

SEQ ID NO: 171502 - DNA, 535 bp, Homo sapiens
  Payload ID: 13729
  Gene Symbol: PTK2
  Gene Name: protein tyrosine kinase 2
  ENST ID: ENST00000524357
  CDS Start-End: 169-535
gcgccgccgccgccgccgccggtcccggaccactgtgagcccgcggcgtgaggcgtgggaggaagcgcggctgctgtcgcccagcgccgccccgtcgtcgtctgccttcgcttcacggcgccgagccgcggtccgaaatatgacagatacctagcatctagcaaaataatggcagctgcttaccttgaccccaacttgaatcacacaccaaattcgagtactaagactcacctgggtactggtatggaacgttctcctggtgcaatggagcgagtattaaaggtctttcattattttgaaagcaatagtgagccaaccacctgggccagtattatcaggcatggagatgctactgatgtcagggtgaagagcgattatatgttagagatagctgatcaagtggaccaggaaattgctttgaagttgggttgtctagaaatacgaaaagatgttggtttaaagcgattttttcctaagagtttactggattctgtcaaggccaaaacactaagaaaactgatccaacaaacattta

SEQ ID NO: 171503 - DNA, 3014 bp, Homo sapiens
  Payload ID: 13729
  Gene Symbol: PTK2
  Gene Name: protein tyrosine kinase 2
  ENST ID: ENST00000524202
  CDS Start-End: 1-959
tagaaaagaagtctaactatgaagtattagaaaaagatgttggtttaaagcgattttttcctaagagtttactggattctgtcaaggccaaaacactaagaaaactgatccaacaaacatttagacaatttgccaaccttaatagagaagaaagtattctgaaattctttgagatcctgtctccagtctacagatttgataaggaatgcttcaagtgtgctcttggttcaagctggattatttcagtggaactggcaatcggcccagaagaaggaatcagttacctaacggacaagggctgcaatcccacacatcttgctgacttcactcaagtgcaaaccattcagtattcaaacagtgaagacaaggacagaaaaggaatgctacaactaaaaatagcaggtgcacccgagcctctgacagtgacggcaccatccctaaccattgcggagaatatggctgacctaatagatgggtactgccggctggtgaatggaacctcgcagtcatttatcatcagacctcagaaagaaggtgaacgggctttgccatcaataccaaagttggccaacagcgaaaagcaaggcatgcggacacacgccgtctctgtgtcagaaacagatgattatgctgagattatagatgaagaagatacttacaccatgccctcaaccagggattatgagattcaaagagaaagaatagaacttggacgatgtattggagaaggccaatttggagatgtacatcaaggcatttatatgagtccagagaatccagctttggcggttgcaattaaaacatgtaaaaactgtacttcggacagcgtgagagagaaatttcttcaagaagcctgccattacacatctttgcactggaattggtgcagatatataagtgatcctaatgttgatgctgcccagaccccaggaatgcagagtaacaatgcgtcagtttgaccatcctcatattgtgaagctgattggagtcatcacagagaatcctgtctggataatcatggagctgtgcacacttggagagctgaggtcatttttgcaagtaaggaaatacagtttggatctagcatctttgatcctgtatgcctatcagcttagtacagctcttgcatatctagagagcaaaagatttgtacacagggacattgctgctcggaatgttctggtgtcctcaaatgattgtgtaaaattaggagactttggattatcccgatatatggaagatagtacttactacaaagcttccaaaggaaaattgcctattaaatggatggctccagagtcaatcaattttcgacgttttacctcagctagtgacgtatggatgtttggtgtgtgtatgtgggagatactgatgcatggtgtgaagccttttcaaggagtgaagaacaatgatgtaatcggtcgaattgaaaatggggaaagattaccaatgcctccaaattgtcctcctaccctctacagccttatgacgaaatgctgggcctatgaccccagcaggcggcccaggtttactgaacttaaagctcagctcagcacaatcctggaggaagagaaggctcagcaagaagagcgcatgaggatggagtccagaagacaggccacagtgtcctgggactccggagggtctgatgaagcaccgcccaagcccagcagaccgggttatcccagtccgaggtccagcgaaggattttatcccagcccacagcacatggtacaaaccaatcattaccaggtttctggctaccctggttcacatggaatcacagccatggctggcagcatctatccaggtcaggcatctcttttggaccaaacagattcatggaatcatagacctcaggagatagcaatgtggcagcccaatgtggaggactctacagtattggacctgcgagggattgggcaagtgttgccaacccatctgatggaagagcgtctaatccgacagcaacaggaaatggaagaagatcagcgctggctggaaaaagaggaaagatttctgattggaaaccaacatatatatcagcctgtgggtaaaccagatcctgcagctccaccaaagaaaccgcctcgccctggagctcccggtcatctgggaagccttgccagcctcagcagccctgctgacagctacaacgagggtgtcaagcttcagccccaggaaatcagcccccctcctactgccaacctggaccggtcgaatgataaggtgtacgagaatgtgacgggcctggtgaaagctgtcatcgagatgtccagtaaaatccagccagccccaccagaggagtatgtccctatggtgaaggaagtcggcttggccctgaggacattattggccactgtggatgagaccattcccctcctaccagccagcacccaccgagagattgagatggcacagaagctattgaactctgacctgggtgagctcatcaacaagatgaaactggcccagcagtatgtcatgaccagcctccagcaagagtacaaaaagcaaatgctgactgctgctcacgccctggctgtggatgccaaaaacttactcgatgtcattgaccaagcaagactgaaaatgcttgggcagacgagaccacactgagcctcccctaggagcacgtcttgctaccctcttttgaagatgttctctagccttccaccagcagcgaggaattaaccctgtgtcctcagtcgccagcacttacagctccaacttttttgaatgaccatctggttgaaaaatctttctcatataagtttaaccacactttgatttgggttcattttttgttttgtttttttcaatcatgatattcagaaaaatccaggatccaaaatgtggcgtttttctaagaatgaaaattatatgtaagcttttaagcatcatgaagaacaatttatgttcacattaagatacgttctaaagggggatggccaaggggtgacatcttaattcctaaactaccttagctgcatagtggaagaggagagcatgaa

SEQ ID NO: 171504 - DNA, 504 bp, Homo sapiens
  Payload ID: 13729
  Gene Symbol: PTK2
  Gene Name: protein tyrosine kinase 2
  ENST ID: ENST00000523679
  CDS Start-End: 461-504
gcgccgccccgtcgtcgtctgccttcgcttcacggcgccgagccgcggtccgagcagaactggggctcccttgcatcttccagttacaaattcagtgccttctgcagtttccccagagctcctcaagaataacggaagggaggtatagtaatggttaagaaactttgcaaagaaagtgaataatgccagtactgtcaccttttggaacttgttggtatttcctgttgtctgtctttggaagattgcggaagcatgagaagattctgtaactgagaggcattcttcaagctgctggaaaatattacagaaggaacaccttccaaattttgcttcaagctctgaaaaaaggagcacacaggggaaccttagtcttgcttgtggatcgaagcaaatactatcacagcgaggaactgggactttgtgtgcagactcctggcttgatctttataggattgggtgtatgttgttggaactggcaggccaagaggccctgaaaccagcagg

SEQ ID NO: 171505 - DNA, 4661 bp, Homo sapiens
  Payload ID: 13729
  Gene Symbol: PTK2
  Gene Name: protein tyrosine kinase 2
  ENST ID: ENST00000517887
  CDS Start-End: 307-3597
taggaacacagagccatggggtcacattactaagctggtttcattctgttcagtagcttgatctagccaggatggtctgtgtttcagattgcggaagcatgagaagattctgtaactgagaggcattcttcaagctgctggaaaatattacagaaggaacaccttccaaattttgcttcaagctctgaaaaaaggagcacacaggggaaccttagtcttgcttgtggatcgaagcaaatactatcacagcgaggaactgggactttgtgtgcagactcctggcttgatctttataggattgggtgtatgttgttggaactggcaggccaagaggccctgaaaccagcaggtgccatctatatggagaaaagcggatgtagtccatttccagtgtgttgggctaaagaatatgacagatacctagcatctagcaaaataatggcagctgcttaccttgaccccaacttgaatcacacaccaaattcgagtactaagactcacctgggtactggtatggaacgttctcctggtgcaatggagcgagtattaaaggtctttcattattttgaaagcaatagtgagccaaccacctgggccagtattatcaggcatggagatgctactgatgtcaggggcatcattcagaagatagtggacagtcacaaagtaaagcatgtggcctgctatggattccgcctcagtcacctgcggtcagaggaggttcactggcttcacgtggatatgggcgtctccagtgtgagggagaagtatgagcttgctcacccaccagaggagtggaaatatgaattgagaattcgttatttgccaaaaggatttctaaaccagtttactgaagataagccaactttgaatttcttctatcaacaggtgaagagcgattatatgttagagatagctgatcaagtggaccaggaaattgctttgaagttgggttgtctagaaatacggcgatcatactgggagatgcggggcaatgcactagaaaagaagtctaactatgaagtattagaaaaagatgttggtttaaagcgattttttcctaagagtttactggattctgtcaaggccaaaacactaagaaaactgatccaacaaacatttagacaatttgccaaccttaatagagaagaaagtattctgaaattctttgagatcctgtctccagtctacagatttgataaggaatgcttcaagtgtgctcttggttcaagctggattatttcagtggaactggcaatcggcccagaagaaggaatcagttacctaacggacaagggctgcaatcccacacatcttgctgacttcactcaagtgcaaaccattcagtattcaaacagtgaagacaaggacagaaaaggaatgctacaactaaaaatagcaggtgcacccgagcctctgacagtgacggcaccatccctaaccattgcggagaatatggctgacctaatagatgggtactgccggctggtgaatggaacctcgcagtcatttatcatcagacctcagaaagaaggtgaacgggctttgccatcaataccaaagttggccaacagcgaaaagcaaggcatgcggacacacgccgtctctgtgtcagaaacagatgattatgctgagattatagatgaagaagatacttacaccatgccctcaaccagggattatgagattcaaagagaaagaatagaacttggacgatgtattggagaaggccaatttggagatgtacatcaaggcatttatatgagtccagagaatccagctttggcggttgcaattaaaacatgtaaaaactgtacttcggacagcgtgagagagaaatttcttcaagaagccttaacaatgcgtcagtttgaccatcctcatattgtgaagctgattggagtcatcacagagaatcctgtctggataatcatggagctgtgcacacttggagagctgaggtcatttttgcaagtaaggaaatacagtttggatctagcatctttgatcctgtatgcctatcagcttagtacagctcttgcatatctagagagcaaaagatttgtacacagggacattgctgctcggaatgttctggtgtcctcaaatgattgtgtaaaattaggagactttggattatcccgatatatggaagatagtacttactacaaagcttccaaaggaaaattgcctattaaatggatggctccagagtcaatcaattttcgacgttttacctcagctagtgacgtatggatgtttggtgtgtgtatgtgggagatactgatgcatggtgtgaagccttttcaaggagtgaagaacaatgatgtaatcggtcgaattgaaaatggggaaagattaccaatgcctccaaattgtcctcctaccctctacagccttatgacgaaatgctgggcctatgaccccagcaggcggcccaggtttactgaacttaaagctcagctcagcacaatcctggaggaagagaaggctcagcaagaagagcgcatgaggatggagtccagaagacaggccacagtgtcctgggactccggagggtctgatgaagcaccgcccaagcccagcagaccgggttatcccagtccgaggtccagcgaaggattttatcccagcccacagcacatggtacaaaccaatcattaccaggtttctggctaccctggttcacatggaatcacagccatggctggcagcatctatccaggtcaggcatctcttttggaccaaacagattcatggaatcatagacctcaggagatagcaatgtggcagcccaatgtggaggactctacagtattggacctgcgagggattgggcaagtgttgccaacccatctgatggaagagcgtctaatccgacagcaacaggaaatggaagaagatcagcgctggctggaaaaagaggaaagatttctgaaacctgatgtgagactctctcgaggcagtattgacagggaggatggaagtcttcagggtccgattggaaaccaacatatatatcagcctgtgggtaaaccagatcctgcagctccaccaaagaaaccgcctcgccctggagctcccggtcatctgggaagccttgccagcctcagcagccctgctgacagctacaacgagggtgtcaagcttcagccccaggaaatcagcccccctcctactgccaacctggaccggtcgaatgataaggtgtacgagaatgtgacgggcctggtgaaagctgtcatcgagatgtccagtaaaatccagccagccccaccagaggagtatgtccctatggtgaaggaagtcggcttggccctgaggacattattggccactgtggatgagaccattcccctcctaccagccagcacccaccgagagattgagatggcacagaagctattgaactctgacctgggtgagctcatcaacaagatgaaactggcccagcagtatgtcatgaccagcctccagcaagagtacaaaaagcaaatgctgactgctgctcacgccctggctgtggatgccaaaaacttactcgatgtcattgaccaagcaagactgaaaatgcttgggcagacgagaccacactgagcctcccctaggagcacgtcttgctaccctcttttgaagatgttctctagccttccaccagcagcgaggaattaaccctgtgtcctcagtcgccagcacttacagctccaacttttttgaatgaccatctggttgaaaaatctttctcatataagtttaaccacactttgatttgggttcattttttgttttgtttttttcaatcatgatattcagaaaaatccaggatccaaaatgtggcgtttttctaagaatgaaaattatatgtaagcttttaagcatcatgaagaacaatttatgttcacattaagatacgttctaaagggggatggccaaggggtgacatcttaattcctaaactaccttagctgcatagtggaagaggagagcatgaagcaaagaattccaggaaacccaagaggctgagaattcttttgtctaccatagaattattatccagactggaatttttgtttgttagaacacccttcagttgcaatatgctaatcccactttacaaagaatataaaagctatattttgaagacttgagttatttcagaaaaaactacagccctttttgtcttacctgccttttactttcgtgtggatatgtgaagcattgggtcgggaactagctgtagaacacaactaaaaactcatgtcttttttcacagaataatgtgccagttttttgtagcaatgttatttctcttggaagcagaaatgctttgtaccagagcacctccaaactgcattgaggagaagttccagaaccatcccctttttccatttttatataatttataaagaaagattaaagccatgttgactattttacagccactggagttaactaacccttccttgtatctgtcttcccaggagagaatgaagcaaaacaggaatttggttttcttttgatgtccagttacaccatccattctgttaattttgaaaaaatataccctccctttagtttgttgggggatataaattattctcaggaagaatataatgaactgtacagttactttgacctattaaaaaggtgttaccagtaaa

SEQ ID NO: 171506 - DNA, 4439 bp, Homo sapiens
  Payload ID: 13729
  Gene Symbol: PTK2
  Gene Name: protein tyrosine kinase 2
  ENST ID: ENST00000519419
  CDS Start-End: 313-3603
tctctgactgcaatggaaagaggaaagagaaattagaagtatttttttaaattgtcatttgatttcttcagagttattgtgggcttctgaactattgcggaagcatgagaagattctgtaactgagaggcattcttcaagctgctggaaaatattacagaaggaacaccttccaaattttgcttcaagctctgaaaaaaggagcacacaggggaaccttagtcttgcttgtggatcgaagcaaatactatcacagcgaggaactgggactttgtgtgcagactcctggcttgatctttataggattgggtgtatgttgttggaactggcaggccaagaggccctgaaaccagcaggtgccatctatatggagaaaagcggatgtagtccatttccagtgtgttgggctaaagaatatgacagatacctagcatctagcaaaataatggcagctgcttaccttgaccccaacttgaatcacacaccaaattcgagtactaagactcacctgggtactggtatggaacgttctcctggtgcaatggagcgagtattaaaggtctttcattattttgaaagcaatagtgagccaaccacctgggccagtattatcaggcatggagatgctactgatgtcaggggcatcattcagaagatagtggacagtcacaaagtaaagcatgtggcctgctatggattccgcctcagtcacctgcggtcagaggaggttcactggcttcacgtggatatgggcgtctccagtgtgagggagaagtatgagcttgctcacccaccagaggagtggaaatatgaattgagaattcgttatttgccaaaaggatttctaaaccagtttactgaagataagccaactttgaatttcttctatcaacaggtgaagagcgattatatgttagagatagctgatcaagtggaccaggaaattgctttgaagttgggttgtctagaaatacggcgatcatactgggagatgcggggcaatgcactagaaaagaagtctaactatgaagtattagaaaaagatgttggtttaaagcgattttttcctaagagtttactggattctgtcaaggccaaaacactaagaaaactgatccaacaaacatttagacaatttgccaaccttaatagagaagaaagtattctgaaattctttgagatcctgtctccagtctacagatttgataaggaatgcttcaagtgtgctcttggttcaagctggattatttcagtggaactggcaatcggcccagaagaaggaatcagttacctaacggacaagggctgcaatcccacacatcttgctgacttcactcaagtgcaaaccattcagtattcaaacagtgaagacaaggacagaaaaggaatgctacaactaaaaatagcaggtgcacccgagcctctgacagtgacggcaccatccctaaccattgcggagaatatggctgacctaatagatgggtactgccggctggtgaatggaacctcgcagtcatttatcatcagacctcagaaagaaggtgaacgggctttgccatcaataccaaagttggccaacagcgaaaagcaaggcatgcggacacacgccgtctctgtgtcagaaacagatgattatgctgagattatagatgaagaagatacttacaccatgccctcaaccagggattatgagattcaaagagaaagaatagaacttggacgatgtattggagaaggccaatttggagatgtacatcaaggcatttatatgagtccagagaatccagctttggcggttgcaattaaaacatgtaaaaactgtacttcggacagcgtgagagagaaatttcttcaagaagccttaacaatgcgtcagtttgaccatcctcatattgtgaagctgattggagtcatcacagagaatcctgtctggataatcatggagctgtgcacacttggagagctgaggtcatttttgcaagtaaggaaatacagtttggatctagcatctttgatcctgtatgcctatcagcttagtacagctcttgcatatctagagagcaaaagatttgtacacagggacattgctgctcggaatgttctggtgtcctcaaatgattgtgtaaaattaggagactttggattatcccgatatatggaagatagtacttactacaaagcttccaaaggaaaattgcctattaaatggatggctccagagtcaatcaattttcgacgttttacctcagctagtgacgtatggatgtttggtgtgtgtatgtgggagatactgatgcatggtgtgaagccttttcaaggagtgaagaacaatgatgtaatcggtcgaattgaaaatggggaaagattaccaatgcctccaaattgtcctcctaccctctacagccttatgacgaaatgctgggcctatgaccccagcaggcggcccaggtttactgaacttaaagctcagctcagcacaatcctggaggaagagaaggctcagcaagaagagcgcatgaggatggagtccagaagacaggccacagtgtcctgggactccggagggtctgatgaagcaccgcccaagcccagcagaccgggttatcccagtccgaggtccagcgaaggattttatcccagcccacagcacatggtacaaaccaatcattaccaggtttctggctaccctggttcacatggaatcacagccatggctggcagcatctatccaggtcaggcatctcttttggaccaaacagattcatggaatcatagacctcaggagatagcaatgtggcagcccaatgtggaggactctacagtattggacctgcgagggattgggcaagtgttgccaacccatctgatggaagagcgtctaatccgacagcaacaggaaatggaagaagatcagcgctggctggaaaaagaggaaagatttctgaaacctgatgtgagactctctcgaggcagtattgacagggaggatggaagtcttcagggtccgattggaaaccaacatatatatcagcctgtgggtaaaccagatcctgcagctccaccaaagaaaccgcctcgccctggagctcccggtcatctgggaagccttgccagcctcagcagccctgctgacagctacaacgagggtgtcaagcttcagccccaggaaatcagcccccctcctactgccaacctggaccggtcgaatgataaggtgtacgagaatgtgacgggcctggtgaaagctgtcatcgagatgtccagtaaaatccagccagccccaccagaggagtatgtccctatggtgaaggaagtcggcttggccctgaggacattattggccactgtggatgagaccattcccctcctaccagccagcacccaccgagagattgagatggcacagaagctattgaactctgacctgggtgagctcatcaacaagatgaaactggcccagcagtatgtcatgaccagcctccagcaagagtacaaaaagcaaatgctgactgctgctcacgccctggctgtggatgccaaaaacttactcgatgtcattgaccaagcaagactgaaaatgcttgggcagacgagaccacactgagcctcccctaggagcacgtcttgctaccctcttttgaagatgttctctagccttccaccagcagcgaggaattaaccctgtgtcctcagtcgccagcacttacagctccaacttttttgaatgaccatctggttgaaaaatctttctcatataagtttaaccacactttgatttgggttcattttttgttttgtttttttcaatcatgatattcagaaaaatccaggatccaaaatgtggcgtttttctaagaatgaaaattatatgtaagcttttaagcatcatgaagaacaatttatgttcacattaagatacgttctaaagggggatggccaaggggtgacatcttaattcctaaactaccttagctgcatagtggaagaggagagcatgaagcaaagaattccaggaaacccaagaggctgagaattcttttgtctaccatagaattattatccagactggaatttttgtttgttagaacacccttcagttgcaatatgctaatcccactttacaaagaatataaaagctatattttgaagacttgagttatttcagaaaaaactacagccctttttgtcttacctgccttttactttcgtgtggatatgtgaagcattgggtcgggaactagctgtagaacacaactaaaaactcatgtcttttttcacagaataatgtgccagttttttgtagcaatgttatttctcttggaagcagaaatgctttgtaccagagcacctccaaactgcattgaggagaagttccagaaccatcccctttttccatttttatataatttataaagaaagattaaagccatgttgactatt

SEQ ID NO: 171507 - DNA, 3279 bp, Homo sapiens
  Payload ID: 13729
  Gene Symbol: PTK2
  Gene Name: protein tyrosine kinase 2
  ENST ID: ENST00000519465
  CDS Start-End: 173-2215
agccctgtttgctctccgataaacaagtctgtgtattataacgtattggacaatgatgtcacttttatttccataaatgactcatgtgtgagcaaaatttgagtaatagtgttttaagaatatttcagcgtagtagaggatttaagcagatcgctttgcctactttaattatatgaaataccaggaggtcagatgtttaacctctttcaacatatctgtttcttttcctgcagaaacagatgattatgctgagattatagatgaagaagatacttacaccatgccctcaaccagggattatgagattcaaagagaaagaatagaacttggacgatgtattggagaaggccaatttggagatgtacatcaaggcatttatatgagtccagagaatccagctttggcggttgcaattaaaacatgtaaaaactgtacttcggacagcgtgagagagaaatttcttcaagaagccttaacaatgcgtcagtttgaccatcctcatattgtgaagctgattggagtcatcacagagaatcctgtctggataatcatggagctgtgcacacttggagagctgaggtcatttttgcaagtaaggaaatacagtttggatctagcatctttgatcctgtatgcctatcagcttagtacagctcttgcatatctagagagcaaaagatttgtacacagggacattgctgctcggaatgttctggtgtcctcaaatgattgtgtaaaattaggagactttggattatcccgatatatggaagatagtacttactacaaagcttccaaaggaaaattgcctattaaatggatggctccagagtcaatcaattttcgacgttttacctcagctagtgacgtatggatgtttggtgtgtgtatgtgggagatactgatgcatggtgtgaagccttttcaaggagtgaagaacaatgatgtaatcggtcgaattgaaaatggggaaagattaccaatgcctccaaattgtcctcctaccctctacagccttatgacgaaatgctgggcctatgaccccagcaggcggcccaggtttactgaacttaaagctcagctcagcacaatcctggaggaagagaaggctcagcaagaagagcgcatgaggatggagtccagaagacaggccacagtgtcctgggactccggagggtctgatgaagcaccgcccaagcccagcagaccgggttatcccagtccgaggtccagcgaaggattttatcccagcccacagcacatggtacaaaccaatcattaccaggtttctggctaccctggttcacatggaatcacagccatggctggcagcatctatccaggtcaggcatctcttttggaccaaacagattcatggaatcatagacctcaggagatagcaatgtggcagcccaatgtggaggactctacagtattggacctgcgagggattgggcaagtgttgccaacccatctgatggaagagcgtctaatccgacagcaacaggaaatggaagaagatcagcgctggctggaaaaagaggaaagatttctgaaacctgatgtgagactctctcgaggcagtattgacagggaggatggaagtcttcagggtccgattggaaaccaacatatatatcagcctgtgggtaaaccagatcctgcagctccaccaaagaaaccgcctcgccctggagctcccggtcatctgggaagccttgccagcctcagcagccctgctgacagctacaacgagggtgtcaagcttcagccccaggaaatcagcccccctcctactgccaacctggaccggtcgaatgataaggtgtacgagaatgtgacgggcctggtgaaagctgtcatcgagatgtccagtaaaatccagccagccccaccagaggagtatgtccctatggtgaaggaagtcggcttggccctgaggacattattggccactgtggatgagaccattcccctcctaccagccagcacccaccgagagattgagatggcacagaagctattgaactctgacctgggtgagctcatcaacaagatgaaactggcccagcagtatgtcatgaccagcctccagcaagagtacaaaaagcaaatgctgactgctgctcacgccctggctgtggatgccaaaaacttactcgatgtcattgaccaagcaagactgaaaatgcttgggcagacgagaccacactgagcctcccctaggagcacgtcttgctaccctcttttgaagatgttctctagccttccaccagcagcgaggaattaaccctgtgtcctcagtcgccagcacttacagctccaacttttttgaatgaccatctggttgaaaaatctttctcatataagtttaaccacactttgatttgggttcattttttgttttgtttttttcaatcatgatattcagaaaaatccaggatccaaaatgtggcgtttttctaagaatgaaaattatatgtaagcttttaagcatcatgaagaacaatttatgttcacattaagatacgttctaaagggggatggccaaggggtgacatcttaattcctaaactaccttagctgcatagtggaagaggagagcatgaagcaaagaattccaggaaacccaagaggctgagaattcttttgtctaccatagaattattatccagactggaatttttgtttgttagaacacccttcagttgcaatatgctaatcccactttacaaagaatataaaagctatattttgaagacttgagttatttcagaaaaaactacagccctttttgtcttacctgccttttactttcgtgtggatatgtgaagcattgggtcgggaactagctgtagaacacaactaaaaactcatgtcttttttcacagaataatgtgccagttttttgtagcaatgttatttctcttggaagcagaaatgctttgtaccagagcacctccaaactgcattgaggagaagttccagaaccatcccctttttccatttttatataatttataaagaaagattaaagccatgttgactattttacagccactggagttaactaacccttccttgtatctgtcttcccaggagagaatgaagcaaaacaggaatttggttttcttttgatgtccagttacaccatccattctgttaattttgaaaaaatataccctccctttagtttgttgggggatataaattattctcaggaagaatataatgaactgtacagttactttgacctattaaaaaggtgttaccagtaaa

SEQ ID NO: 171508 - DNA, 630 bp, Homo sapiens
  Payload ID: 13729
  Gene Symbol: PTK2
  Gene Name: protein tyrosine kinase 2
  ENST ID: ENST00000521332
  CDS Start-End: 436-630
gagcccgcgccgccgccgccgccgccggtcccggaccactgtgagcccgcggcgtgaggcgtgggaggaagcgcggctgctgtcgcccagcgccgccccgtcgtcgtctgccttcgcttcacggcgccgagccgcggtccgagcagaactggggctcccttgcatcttccagttacaaattcagtgccttctgcagtttccccagagctcctcaagaataacggaagggaggtatagtaatggttaagaaactttgcaaagaaagtgaataatgccagtactgtcaccttttggaacttgttggtatttcctgttgtctgtctttggaaggtatggaacctgtggtgacttaagagttgtataattgtgagagctaagcacagtccttgttattaaatgacagaatatgacagatacctagcatctagcaaaataatggcagctgcttaccttgaccccaacttgaatcacacaccaaattcgagtactaagactcacctgggtactggtatggaacgttctcctggtgcaatggagcgagtattaaaggtctttcattattttgaaagcaatagtgagccaaccacctgggccagtattatcaggcatggagatgctactgatgtcagg

SEQ ID NO: 171509 - DNA, 548 bp, Homo sapiens
  Payload ID: 13729
  Gene Symbol: PTK2
  Gene Name: protein tyrosine kinase 2
  ENST ID: ENST00000522950
  CDS Start-End: 274-477
aacatgatgtaatgcactgtcccactctgcagggcacgttccagggtcgtcggttgtctctgtagcacttttccgtcgcctgtgagagccagaccaggattacactttgcacgtggtgttgctttcttcagcctcctttcatctgaaacagctcctcagcctttttttatctttcatgacattgacatttttgacaaacataggctcagtgattttatagagtattcttaaagttggattgagggatatcctataaacatttgtttcttcctgatgagattgagattttgcatctccagtcaggaatacaacataaataatgctgaatccttctcagcatcatacccagagacatacgatgtccaggggatgttccagttgaccaactggacattgacttctgaaggacggttggacacaactcctgttggtgattcctttgctcaagccgtcctcccacgtcagcctcctgagtagcttggaatacagattgagatggcacagaagctattgaactctgacctgggtgagctcatcaacaagatgaa

SEQ ID NO: 171510 - DNA, 4405 bp, Homo sapiens
  Payload ID: 13729
  Gene Symbol: PTK2
  Gene Name: protein tyrosine kinase 2
  Uniprot ID: Q05397
  ENST ID: ENST00000521059
  CDS Start-End: 183-3341
gcgcggctgctgtcgcccagcgccgccccgtcgtcgtctgccttcgcttcacggcgccgagccgcggtccgaagtcttgctgtgtcacccaggctgccaggctggagtggagtggcatgatctcggctgactgcaacctctgcctcccagaatatgacagatacctagcatctagcaaaataatggcagctgcttaccttgaccccaacttgaatcacacaccaaattcgagtactaagactcacctgggtactggtatggaacgttctcctggtgcaatggagcgagtattaaaggtctttcattattttgaaagcaatagtgagccaaccacctgggccagtattatcaggcatggagatgctactgatgtcaggggcatcattcagaagatagtggacagtcacaaagtaaagcatgtggcctgctatggattccgcctcagtcacctgcggtcagaggaggttcactggcttcacgtggatatgggcgtctccagtgtgagggagaagtatgagcttgctcacccaccagaggagtggaaatatgaattgagaattcgttatttgccaaaaggatttctaaaccagtttactgaagataagccaactttgaatttcttctatcaacaggtgaagagcgattatatgttagagatagctgatcaagtggaccaggaaattgctttgaagttgggttgtctagaaatacggcgatcatactgggagatgcggggcaatgcactagaaaagaagtctaactatgaagtattagaaaaagatgttggtttaaagcgattttttcctaagagtttactggattctgtcaaggccaaaacactaagaaaactgatccaacaaacatttagacaatttgccaaccttaatagagaagaaagtattctgaaattctttgagatcctgtctccagtctacagatttgataaggaatgcttcaagtgtgctcttggttcaagctggattatttcagtggaactggcaatcggcccagaagaaggaatcagttacctaacggacaagggctgcaatcccacacatcttgctgacttcactcaagtgcaaaccattcagtattcaaacagtgaagacaaggacagaaaaggaatgctacaactaaaaatagcaggtgcacccgagcctctgacagtgacggcaccatccctaaccattgcggagaatatggctgacctaatagatgggtactgccggctggtgaatggaacctcgcagtcatttatcatcagacctcagaaagaaggtgaacgggctttgccatcaataccaaagttggccaacagcgaaaagcaaggcatgcggacacacgccgtctctgtgtcagaaacagatgattatgctgagattatagatgaagaagatacttacaccatgccctcaaccagggattatgagattcaaagagaaagaatagaacttggacgatgtattggagaaggccaatttggagatgtacatcaaggcatttatatgagtccagagaatccagctttggcggttgcaattaaaacatgtaaaaactgtacttcggacagcgtgagagagaaatttcttcaagaagccttaacaatgcgtcagtttgaccatcctcatattgtgaagctgattggagtcatcacagagaatcctgtctggataatcatggagctgtgcacacttggagagctgaggtcatttttgcaagtaaggaaatacagtttggatctagcatctttgatcctgtatgcctatcagcttagtacagctcttgcatatctagagagcaaaagatttgtacacagggacattgctgctcggaatgttctggtgtcctcaaatgattgtgtaaaattaggagactttggattatcccgatatatggaagatagtacttactacaaagcttccaaaggaaaattgcctattaaatggatggctccagagtcaatcaattttcgacgttttacctcagctagtgacgtatggatgtttggtgtgtgtatgtgggagatactgatgcatggtgtgaagccttttcaaggagtgaagaacaatgatgtaatcggtcgaattgaaaatggggaaagattaccaatgcctccaaattgtcctcctaccctctacagccttatgacgaaatgctgggcctatgaccccagcaggcggcccaggtttactgaacttaaagctcagctcagcacaatcctggaggaagagaaggctcagcaagaagagcgcatgaggatggagtccagaagacaggccacagtgtcctgggactccggagggtctgatgaagcaccgcccaagcccagcagaccgggttatcccagtccgaggtccagcgaaggattttatcccagcccacagcacatggtacaaaccaatcattaccaggtttctggctaccctggttcacatggaatcacagccatggctggcagcatctatccaggtcaggcatctcttttggaccaaacagattcatggaatcatagacctcaggagatagcaatgtggcagcccaatgtggaggactctacagtattggacctgcgagggattgggcaagtgttgccaacccatctgatggaagagcgtctaatccgacagcaacaggaaatggaagaagatcagcgctggctggaaaaagaggaaagatttctgaaacctgatgtgagactctctcgaggcagtattgacagggaggatggaagtcttcagggtccgattggaaaccaacatatatatcagcctgtgggtaaaccagatcctgcagctccaccaaagaaaccgcctcgccctggagctcccggtcatctgggaagccttgccagcctcagcagccctgctgacagctacaacgagggtgtcaagcttcagccccaggaaatcagcccccctcctactgccaacctggaccggtcgaatgataaggtgtacgagaatgtgacgggcctggtgaaagctgtcatcgagatgtccagtaaaatccagccagccccaccagaggagtatgtccctatggtgaaggaagtcggcttggccctgaggacattattggccactgtggatgagaccattcccctcctaccagccagcacccaccgagagattgagatggcacagaagctattgaactctgacctgggtgagctcatcaacaagatgaaactggcccagcagtatgtcatgaccagcctccagcaagagtacaaaaagcaaatgctgactgctgctcacgccctggctgtggatgccaaaaacttactcgatgtcattgaccaagcaagactgaaaatgcttgggcagacgagaccacactgagcctcccctaggagcacgtcttgctaccctcttttgaagatgttctctagccttccaccagcagcgaggaattaaccctgtgtcctcagtcgccagcacttacagctccaacttttttgaatgaccatctggttgaaaaatctttctcatataagtttaaccacactttgatttgggttcattttttgttttgtttttttcaatcatgatattcagaaaaatccaggatccaaaatgtggcgtttttctaagaatgaaaattatatgtaagcttttaagcatcatgaagaacaatttatgttcacattaagatacgttctaaagggggatggccaaggggtgacatcttaattcctaaactaccttagctgcatagtggaagaggagagcatgaagcaaagaattccaggaaacccaagaggctgagaattcttttgtctaccatagaattattatccagactggaatttttgtttgttagaacacccttcagttgcaatatgctaatcccactttacaaagaatataaaagctatattttgaagacttgagttatttcagaaaaaactacagccctttttgtcttacctgccttttactttcgtgtggatatgtgaagcattgggtcgggaactagctgtagaacacaactaaaaactcatgtcttttttcacagaataatgtgccagttttttgtagcaatgttatttctcttggaagcagaaatgctttgtaccagagcacctccaaactgcattgaggagaagttccagaaccatcccctttttccatttttatataatttataaagaaagattaaagccatgttgactattttacagccactggagttaactaacccttccttgtatctgtcttcccaggagagaatgaagcaaaacaggaatttggttttcttttgatgtccagttacaccatccattctgttaattttgaaaaaatataccctccctttagtttgttgggggatataaattattctcaggaagaatataatgaactgtacagttactttgacctattaaaaaggtgttaccagtaaa

SEQ ID NO: 171511 - DNA, 750 bp, Homo sapiens
  Payload ID: 13729
  Gene Symbol: PTK2
  Gene Name: protein tyrosine kinase 2
  ENST ID: ENST00000523803
  CDS Start-End: 389-750
gggattacaggcacatgccaccacacccggctgatatttgtatttttagtagagacggggttttaccgtcttggccaggctggtcttgaactcctgacttcaggtgatccacccaccttggcctcccaaagtgttgggattacaggcctgagccaccgtgcccggcagtgcttggtcttattaaacgctttatgaaagttagcttggaaagttaacctaacttggaaagacacaatagcttgacactgttgctatttgttaaataaggcagaactggggctcccttgcatcttccagttacaaattcagtgccttctgcagtttccccagagctcctcaagaataacggaagggagaatatgacagatacctagcatctagcaaaataatggcagctgcttaccttgaccccaacttgaatcacacaccaaattcgagtactaagactcacctgggtactggtatggaacgttctcctggtgcaatggagcgagtattaaaggtctttcattattttgaaagcaatagtgagccaaccacctgggccagtattatcaggcatggagatgctactgatgtcaggggcatcattcagaagatagtggacagtcacaaagtaaagcatgtggcctgctatggattccgcctcagtcacctgcggtcagaggaggttcactggcttcacgtggatatgggcgtctccagtgtgagggagaagtatgagcttgctcacccaccagaggagtggaa

SEQ ID NO: 171512 - DNA, 581 bp, Homo sapiens
  Payload ID: 13729
  Gene Symbol: PTK2
  Gene Name: protein tyrosine kinase 2
  ENST ID: ENST00000523388
  CDS Start-End: 380-581
atttctcagaggaattctgttctgctcaagataaactttggcatgcaaacatttcatcttggcccatccttcattttctgcaacctctttttcttaccagctgtctttttcttacctatggctgtgctttaaatggacttgcccatttggaccaaggctattctagaatcatttcgtggagagttagaaacctgatccttctttcccctgtgtataggatcctttattgttatcatctactgttagccaactggtgttccttagataactcagggtggggtctagtgtgtgctaactctgggttgtcagctcccctaagacaatgtgttgtctctctagcacaatcctggaggaagagaaggctcagcaagaagagcgcatgaggatggagtccagaagacaggccacagtgtcctgggactccggagggtctgatgaagcaccgcccaagcccagcagaccgggttatcccagtccgaggtccagcgaaggattttatcccagcccacagcacatggtacaaaccaatcattaccaggtttctggctaccctggttcacatggaatcacagccatggctg

SEQ ID NO: 171513 - DNA, 488 bp, Homo sapiens
  Payload ID: 13729
  Gene Symbol: PTK2
  Gene Name: protein tyrosine kinase 2
  ENST ID: ENST00000523067
  CDS Start-End: 134-334
gtcgtcgtctgccttcgcttcacggcgccgagccgcggtccgaatccatggttggttgaatctggatgtggaacccgctgacgtggatggctgactgtattaatatgacagatacctagcatctagcaaaataatggcagctgcttaccttgaccccaacttgaatcacacaccaaattcgagtactaagactcacctgggtactggtatggaacgttctcctggtgcaatggagcgagtattaaaggtctttcattattttgaaagcaatagtgagccaaccacctgggccagtattatcaggcatggagatgctactgatgtcaggatatgaattgagaattcgttatttgccaaaaggatttctaaaccagtttactgaagataagccaactttgaatttcttctatcaacaggtgaagagcgattatatgttagagatagctgatcaagtggaccaggaaattgctttgaagttgggttgtcta

SEQ ID NO: 171514 - DNA, 540 bp, Homo sapiens
  Payload ID: 13729
  Gene Symbol: PTK2
  Gene Name: protein tyrosine kinase 2
  ENST ID: ENST00000521395
  CDS Start-End: 220-540
agccactggaggatcttgagcagaggcgtgacgtaaattttaagaaacttgttgggatggttgtgttctaaagttaaggaatcaaggatgatgtcaaggcagaactggggctcccttgcatcttccagttacaaattcagtgccttctgcagtttccccagagctcctcaagaataacggaagggagaatatgacagatacctagcatctagcaaaataatggcagctgcttaccttgaccccaacttgaatcacacaccaaattcgagtactaagactcacctgggtactggtatggaacgttctcctggtgcaatggagcgagtattaaaggtctttcattattttgaaagcaatagtgagccaaccacctgggccagtattatcaggcatggagatgctactgatgtcaggggcatcattcagaagatagtggacagtcacaaagtaaagcatgtggcctgctatggattccgcctcagtcacctgcggtcagaggaggttcactggcttcacgtggatatgggcgtctccagtgtg

SEQ ID NO: 171515 - DNA, 4955 bp, Homo sapiens
  Payload ID: 13729
  Gene Symbol: PTK2
  Gene Name: protein tyrosine kinase 2
  Uniprot ID: Q05397
  ENST ID: ENST00000522684
  CDS Start-End: 231-3389
gaccactgtgagcccgcggcgtgaggcgtgggaggaagcgcggctgctgtcgcccagcgccgccccgtcgtcgtctgccttcgcttcacggcgccgagccgcggtccgagcagaactggggctcccttgcatcttccagttacaaattcagtgccttctgcagtttccccagagctcctcaagaataacggaagggagaatatgacagatacctagcatctagcaaaataatggcagctgcttaccttgaccccaacttgaatcacacaccaaattcgagtactaagactcacctgggtactggtatggaacgttctcctggtgcaatggagcgagtattaaaggtctttcattattttgaaagcaatagtgagccaaccacctgggccagtattatcaggcatggagatgctactgatgtcaggggcatcattcagaagatagtggacagtcacaaagtaaagcatgtggcctgctatggattccgcctcagtcacctgcggtcagaggaggttcactggcttcacgtggatatgggcgtctccagtgtgagggagaagtatgagcttgctcacccaccagaggagtggaaatatgaattgagaattcgttatttgccaaaaggatttctaaaccagtttactgaagataagccaactttgaatttcttctatcaacaggtgaagagcgattatatgttagagatagctgatcaagtggaccaggaaattgctttgaagttgggttgtctagaaatacggcgatcatactgggagatgcggggcaatgcactagaaaagaagtctaactatgaagtattagaaaaagatgttggtttaaagcgattttttcctaagagtttactggattctgtcaaggccaaaacactaagaaaactgatccaacaaacatttagacaatttgccaaccttaatagagaagaaagtattctgaaattctttgagatcctgtctccagtctacagatttgataaggaatgcttcaagtgtgctcttggttcaagctggattatttcagtggaactggcaatcggcccagaagaaggaatcagttacctaacggacaagggctgcaatcccacacatcttgctgacttcactcaagtgcaaaccattcagtattcaaacagtgaagacaaggacagaaaaggaatgctacaactaaaaatagcaggtgcacccgagcctctgacagtgacggcaccatccctaaccattgcggagaatatggctgacctaatagatgggtactgccggctggtgaatggaacctcgcagtcatttatcatcagacctcagaaagaaggtgaacgggctttgccatcaataccaaagttggccaacagcgaaaagcaaggcatgcggacacacgccgtctctgtgtcagaaacagatgattatgctgagattatagatgaagaagatacttacaccatgccctcaaccagggattatgagattcaaagagaaagaatagaacttggacgatgtattggagaaggccaatttggagatgtacatcaaggcatttatatgagtccagagaatccagctttggcggttgcaattaaaacatgtaaaaactgtacttcggacagcgtgagagagaaatttcttcaagaagccttaacaatgcgtcagtttgaccatcctcatattgtgaagctgattggagtcatcacagagaatcctgtctggataatcatggagctgtgcacacttggagagctgaggtcatttttgcaagtaaggaaatacagtttggatctagcatctttgatcctgtatgcctatcagcttagtacagctcttgcatatctagagagcaaaagatttgtacacagggacattgctgctcggaatgttctggtgtcctcaaatgattgtgtaaaattaggagactttggattatcccgatatatggaagatagtacttactacaaagcttccaaaggaaaattgcctattaaatggatggctccagagtcaatcaattttcgacgttttacctcagctagtgacgtatggatgtttggtgtgtgtatgtgggagatactgatgcatggtgtgaagccttttcaaggagtgaagaacaatgatgtaatcggtcgaattgaaaatggggaaagattaccaatgcctccaaattgtcctcctaccctctacagccttatgacgaaatgctgggcctatgaccccagcaggcggcccaggtttactgaacttaaagctcagctcagcacaatcctggaggaagagaaggctcagcaagaagagcgcatgaggatggagtccagaagacaggccacagtgtcctgggactccggagggtctgatgaagcaccgcccaagcccagcagaccgggttatcccagtccgaggtccagcgaaggattttatcccagcccacagcacatggtacaaaccaatcattaccaggtttctggctaccctggttcacatggaatcacagccatggctggcagcatctatccaggtcaggcatctcttttggaccaaacagattcatggaatcatagacctcaggagatagcaatgtggcagcccaatgtggaggactctacagtattggacctgcgagggattgggcaagtgttgccaacccatctgatggaagagcgtctaatccgacagcaacaggaaatggaagaagatcagcgctggctggaaaaagaggaaagatttctgaaacctgatgtgagactctctcgaggcagtattgacagggaggatggaagtcttcagggtccgattggaaaccaacatatatatcagcctgtgggtaaaccagatcctgcagctccaccaaagaaaccgcctcgccctggagctcccggtcatctgggaagccttgccagcctcagcagccctgctgacagctacaacgagggtgtcaagcttcagccccaggaaatcagcccccctcctactgccaacctggaccggtcgaatgataaggtgtacgagaatgtgacgggcctggtgaaagctgtcatcgagatgtccagtaaaatccagccagccccaccagaggagtatgtccctatggtgaaggaagtcggcttggccctgaggacattattggccactgtggatgagaccattcccctcctaccagccagcacccaccgagagattgagatggcacagaagctattgaactctgacctgggtgagctcatcaacaagatgaaactggcccagcagtatgtcatgaccagcctccagcaagagtacaaaaagcaaatgctgactgctgctcacgccctggctgtggatgccaaaaacttactcgatgtcattgaccaagcaagactgaaaatgcttgggcagacgagaccacactgagcctcccctaggagcacgtcttgctaccctcttttgaagatgttctctagccttccaccagcagcgaggaattaaccctgtgtcctcagtcgccagcacttacagctccaacttttttgaatgaccatctggttgaaaaatctttctcatataagtttaaccacactttgatttgggttcattttttgttttgtttttttcaatcatgatattcagaaaaatccaggatccaaaatgtggcgtttttctaagaatgaaaattatatgtaagcttttaagcatcatgaagaacaatttatgttcacattaagatacgttctaaagggggatggccaaggggtgacatcttaattcctaaactaccttagctgcatagtggaagaggagagcatgaagcaaagaattccaggaaacccaagaggctgagaattcttttgtctaccatagaattattatccagactggaatttttgtttgttagaacacccttcagttgcaatatgctaatcccactttacaaagaatataaaagctatattttgaagacttgagttatttcagaaaaaactacagccctttttgtcttacctgccttttactttcgtgtggatatgtgaagcattgggtcgggaactagctgtagaacacaactaaaaactcatgtcttttttcacagaataatgtgccagttttttgtagcaatgttatttctcttggaagcagaaatgctttgtaccagagcacctccaaactgcattgaggagaagttccagaaccatcccctttttccatttttatataatttataaagaaagattaaagccatgttgactattttacagccactggagttaactaacccttccttgtatctgtcttcccaggagagaatgaagcaaaacaggaatttggttttcttttgatgtccagttacaccatccattctgttaattttgaaaaaatataccctccctttagtttgttgggggatataaattattctcaggaagaatataatgaactgtacagttactttgacctattaaaaaggtgttaccagtaaagttcttgttgtaatatcctttcttttggttctgtttcttcagatggcttttcaggtgacttgtcagataagataacatacaagagagttcccaataattatcaggaagcctctcactaattagtttctttttttttatttaatcttctaaacaagtcaaggatgttaccacagaagggtagcgtggcgtaagttaaccttttcattccatcgtcacctattaaatgcagagctcaggatggaagtagcaatggtcttcaatgaaagaaccttcccctgcgcagggtctcactattccgctaactcggactcaaagcataattcacttgtcaaggaaattgttagcatttcccaggcccaccctagtcttgctagaatctctgtgagccacagagcagggagcaaatagaactgagatctccagcactagggactcagactccaaagggagggatttgagtgaattttttccaggtaaatacatgctcttatgtgcaaaagca

SEQ ID NO: 171516 - DNA, 4129 bp, Homo sapiens
  Payload ID: 13729
  Gene Symbol: PTK2
  Gene Name: protein tyrosine kinase 2
  ENST ID: ENST00000519654
  CDS Start-End: 1-3052
atatgacagatacctagcatctagcaaaataatggcagctgcttaccttgaccccaacttgaatcacacaccaaattcgagtactaagactcacctgggtactggtatggaacgttctcctggtgcaatggagcgagtattaaaggtctttcattattttgaaagcaatagtgagccaaccacctgggccagtattatcaggcatggagatgctactgatgtcaggggcatcattcagaagatagtggacagtcacaaagtaaagcatgtggcctgctatggattccgcctcagtcacctgcggtcagaggaggttcactggcttcacgtggatatgggcgtctccagtgtgagggagaagtatgagcttgctcacccaccagaggagtggaaatatgaattgagaattcgttatttgccaaaaggatttctaaaccagtttactgaagataagccaactttgaatttcttctatcaacaggtgaagagcgattatatgttagagatagctgatcaagtggaccaggaaattgctttgaagttgggttgtctagaaatacggcgatcatactgggagatgcggggcaatgcactagaaaagaagtctaactatgaagtattagaaaaagatgttggtttaaagcgattttttcctaagagtttactggattctgtcaaggccaaaacactaagaaaactgatccaacaaacatttagacaatttgccaaccttaatagagaagaaagtattctgaaattctttgagatcctgtctccagtctacagatttgataaggaatgcttcaagtgtgctcttggttcaagctggattatttcagtggaactggcaatcggcccagaagaaggaatcagttacctaacggacaagggctgcaatcccacacatcttgctgacttcactcaagtgcaaaccattcagtattcaaacagtgaagacaaggacagaaaaggaatgctacaactaaaaatagcaggtgcacccgagcctctgacagtgacggcaccatccctaaccattgcggagaatatggctgacctaatagatgggtactgccggctggtgaatggaacctcgcagtcatttatcatcagacctcagaaagaaggtgaacgggctttgccatcaataccaaagttggccaacagcgaaaagcaaggcatgcggacacacgccgtctctgtgtcagaaacagatgattatgctgagattatagatgaagaagatacttacaccatgccctcaaccagggattatgagattcaaagagaaagaatagaacttggacgatgtattggagaaggccaatttggagatgtacatcaaggcatttatatgagtccagagaatccagctttggcggttgcaattaaaacatgtaaaaactgtacttcggacagcgtgagagagaaatttcttcaagaagccttaacaatgcgtcagtttgaccatcctcatattgtgaagctgattggagtcatcacagagaatcctgtctggataatcatggagctgtgcacacttggagagctgaggtcatttttgcaagtaaggaaatacagtttggatctagcatctttgatcctgtatgcctatcagcttagtacagctcttgcatatctagagagcaaaagatttgtacacagggacattgctgctcggaatgttctggtgtcctcaaatgattgtgtaaaattaggagactttggattatcccgatatatggaagatagtacttactacaaagcttccaaaggaaaattgcctattaaatggatggctccagagtcaatcaattttcgacgttttacctcagctagtgacgtatggatgtttggtgtgtgtatgtgggagatactgatgcatggtgtgaagccttttcaaggagtgaagaacaatgatgtaatcggtcgaattgaaaatggggaaagattaccaatgcctccaaattgtcctcctaccctctacagccttatgacgaaatgctgggcctatgaccccagcaggcggcccaggtttactgaacttaaagctcagctcagcacaatcctggaggaagagaaggctcagcaagaagagcgcatgaggatggagtccagaagacaggccacagtgtcctgggactccggagggtctgatgaagcaccgcccaagcccagcagaccgggttatcccagtccgaggtccagcgaaggattttatcccagcccacagcacatggtacaaaccaatcattaccaggactctacagtattggacctgcgagggattgggcaagtgttgccaacccatctgatggaagagcgtctaatccgacagcaacaggaaatggaagaagatcagcgctggctggaaaaagaggaaagatttctgaaacctgatgtgagactctctcgaggcagtattgacagggaggatggaagtcttcagggtccgattggaaaccaacatatatatcagcctgtgggtaaaccagatcctgcagctccaccaaagaaaccgcctcgccctggagctcccggtcatctgggaagccttgccagcctcagcagccctgctgacagctacaacgagggtgtcaagcttcagccccaggaaatcagcccccctcctactgccaacctggaccggtcgaatgataaggtgtacgagaatgtgacgggcctggtgaaagctgtcatcgagatgtccagtaaaatccagccagccccaccagaggagtatgtccctatggtgaaggaagtcggcttggccctgaggacattattggccactgtggatgagaccattcccctcctaccagccagcacccaccgagagattgagatggcacagaagctattgaactctgacctgggtgagctcatcaacaagatgaaactggcccagcagtatgtcatgaccagcctccagcaagagtacaaaaagcaaatgctgactgctgctcacgccctggctgtggatgccaaaaacttactcgatgtcattgaccaagcaagactgaaaatgcttgggcagacgagaccacactgagcctcccctaggagcacgtcttgctaccctcttttgaagatgttctctagccttccaccagcagcgaggaattaaccctgtgtcctcagtcgccagcacttacagctccaacttttttgaatgaccatctggttgaaaaatctttctcatataagtttaaccacactttgatttgggttcattttttgttttgtttttttcaatcatgatattcagaaaaatccaggatccaaaatgtggcgtttttctaagaatgaaaattatatgtaagcttttaagcatcatgaagaacaatttatgttcacattaagatacgttctaaagggggatggccaaggggtgacatcttaattcctaaactaccttagctgcatagtggaagaggagagcatgaagcaaagaattccaggaaacccaagaggctgagaattcttttgtctaccatagaattattatccagactggaatttttgtttgttagaacacccttcagttgcaatatgctaatcccactttacaaagaatataaaagctatattttgaagacttgagttatttcagaaaaaactacagccctttttgtcttacctgccttttactttcgtgtggatatgtgaagcattgggtcgggaactagctgtagaacacaactaaaaactcatgtcttttttcacagaataatgtgccagttttttgtagcaatgttatttctcttggaagcagaaatgctttgtaccagagcacctccaaactgcattgaggagaagttccagaaccatcccctttttccatttttatataatttataaagaaagattaaagccatgttgactattttacagccactggagttaactaacccttccttgtatctgtcttcccaggagagaatgaagcaaaacaggaatttggttttcttttgatgtccagttacaccatccattctgttaattttgaaaaaatataccctccctttagtttgttgggggatataaattattctcaggaagaatataatgaactgtacagttactttgacctattaaaaaggtgttaccagtaaagttcttgttgtaa

SEQ ID NO: 171517 - DNA, 584 bp, Homo sapiens
  Payload ID: 13729
  Gene Symbol: PTK2
  Gene Name: protein tyrosine kinase 2
  ENST ID: ENST00000521029
  CDS Start-End: 3-242
atatgaaataccaggaggtcagatgtttaacctctttcaacatatctgtttcttttcctgcagaaacagatgattatgctgagattatagatgaagaagatacttacaccatgccctcaaccagggattatgagattcaaagagaaagaatagaacttggacgatgtattggagaaggccaatttggagatgtacatcaaggcatttatatgagtccagtgtgtgtatgtgggagatactgatgcatggtgtgaagccttttcaaggagtgaagaacaatgatgtaatcggtcgaattgaaaatggggaaagattaccaatgcctccaaattgtcctcctaccctctacagccttatgacgaaatgctgggcctatgaccccagcaggcggcccaggtttactgaacttaaagctcagctcagcacaatcctggaggaagagaaggctcagcaagaagagcgcatgaggatggagtccagaagacaggccacagtgtcctgggactccggagggtctgatgaagcaccgcccaagcccagcagaccgggttatcccagtccgaggtccagcgaaggattttatc

SEQ ID NO: 171518 - DNA, 475 bp, Homo sapiens
  Payload ID: 13729
  Gene Symbol: PTK2
  Gene Name: protein tyrosine kinase 2
  ENST ID: ENST00000524040
  CDS Start-End: 322-475
gagcccgcgccgccgccgccgccgccggtcccggaccactgtgagcccgcggcgtgaggcgtgggaggaagcgcggctgctgtcgcccagcgccgccccgtcgtcgtctgccttcgcttcacggcgccgagccgcggtccgaatccatggttggttgaatctggatgtggaacccgctgacgtggatggctgactgtattgcagaactggggctcccttgcatcttccagttacaaattcagtgccttctgcagtttccccagagctcctcaagaataacggaagggagaatatgacagatacctagcatctagcaaaataatggcagctgcttaccttgaccccaacttgaatcacacaccaaattcgagtactaagactcacctgggtactggtatggaacgttctcctggtgcaatggagcgagtattaaaggtctttcattattttgaaagcaatagtgagccaaccacct

SEQ ID NO: 171519 - DNA, 602 bp, Homo sapiens
  Payload ID: 13729
  Gene Symbol: PTK2
  Gene Name: protein tyrosine kinase 2
  ENST ID: ENST00000520045
  CDS Start-End: 252-602
agcacggcctcgagggcgcgagcccgcgccgccgccgccgccgccggtcccggaccactgtgagcccgcggcgtgaggcgtgggaggaagcgcggctgctgtcgcccagcgccgccccgtcgtcgtctgccttcgcttcacggcgccgagccgcggtccgaatccatggttggttgaatctggatgtggaacccgctgacgtggatggctgactgtattaatatgacagatacctagcatctagcaaaataatggcagctgcttaccttgaccccaacttgaatcacacaccaaattcgagtactaagactcacctgggtactggtatggaacgttctcctggtgcaatggagcgagtattaaaggtctttcattattttgaaagcaatagtgagccaaccacctgggccagtattatcaggcatggagatgctactgatgtcaggggcatcattcagaagatagtggacagtcacaaagtaaagcatgtggcctgctatggattccgcctcagtcacctgcggtcagaggaggttcactggcttcacgtggatatgggcgtctccagtgtgagggagaagtatgagcttgctcacccacca

SEQ ID NO: 171520 - DNA, 863 bp, Homo sapiens
  Payload ID: 13729
  Gene Symbol: PTK2
  Gene Name: protein tyrosine kinase 2
  ENST ID: ENST00000519881
  CDS Start-End: 193-558
gcacggcctcgagggcgcgagcccgcgccgccgccgccgccgccggtcccggaccactgtgagcccgcggcgtgaggcgtgggaggaagcgcggctgctgtcgcccagcgccgccccgtcgtcgtctgccttcgcttcacggcgccgagccgcggtccgaaatatgacagatacctagcatctagcaaaataatggcagctgcttaccttgaccccaacttgaatcacacaccaaattcgagtactaagactcacctgggtactggtatggaacgttctcctggtgcaatggagcgagtattaaaggtctttcattattttgaaagcaatagtgagccaaccacctgggccagtattatcaggcatggagatgctactgatgtcaggggcatcattcagaagatagtggacagtcacaaagtaaagcatgtggcctgctatggattccgcctcagtcacctgcggtcagaggaggttcactggcttcacgtggatatgggcgtctccagtgtgagggagaagtatgagcttgctcacccaccagaggagtggaagtaagatacaaacctgctttggtgtgatgcacacttgatttcttttgctttttaaaaacatgcacaagataacaaatgtatatgtttaattttcacactgcttgtcattacaactctggtataaataaaattcgttagtaattattaacgaatgatctcttctagacctctagtctagcttttgggtattattaattatactttgagccatctgatttccgttttctgtgatggtcttttgctagctaatttctcatcagtgctactttgtttcaacctttgctcccaataaaactcaaatcatatata

SEQ ID NO: 171521 - DNA, 2393 bp, Homo sapiens
  Payload ID: 13729
  Gene Symbol: PTK2
  Gene Name: protein tyrosine kinase 2
  ENST ID: ENST00000521986
  CDS Start-End: 1-2262
gcggagaatatggctgacctaatagatgggtactgccggctggtgaatggaacctcgcagtcatttatcatcagacctcagaaagaaggtgaacgggctttgccatcaataccaaagttggccaacagcgaaaagcaaggcatgcggacacacgccgtctctgtgtcaggagtcagtcactgccaacataaagttaagaaagctaggcgctttctccctttggtcttctgttcccatgatcctccttctacggatgaaattagtggggacgaaacagatgattatgctgagattatagatgaagaagatacttacaccatgccctcaaccagggattatgagattcaaagagaaagaatagaacttggacgatgtattggagaaggccaatttggagatgtacatcaaggcatttatatgagtccagagaatccagctttggcggttgcaattaaaacatgtaaaaactgtacttcggacagcgtgagagagaaatttcttcaagaagccttaacaatgcgtcagtttgaccatcctcatattgtgaagctgattggagtcatcacagagaatcctgtctggataatcatggagctgtgcacacttggagagctgaggtcatttttgcaagtaaggaaatacagtttggatctagcatctttgatcctgtatgcctatcagcttagtacagctcttgcatatctagagagcaaaagatttgtacacagggacattgctgctcggaatgttctggtgtcctcaaatgattgtgtaaaattaggagactttggattatcccgatatatggaagatagtacttactacaaagcttccaaaggaaaattgcctattaaatggatggctccagagtcaatcaattttcgacgttttacctcagctagtgacgtatggatgtttggtgtgtgtatgtgggagatactgatgcatggtgtgaagccttttcaaggagtgaagaacaatgatgtaatcggtcgaattgaaaatggggaaagattaccaatgcctccaaattgtcctcctaccctctacagccttatgacgaaatgctgggcctatgaccccagcaggcggcccaggtttactgaacttaaagctcagctcagcacaatcctggaggaagagaaggctcagcaagaagagcgcatgaggatggagtccagaagacaggccacagtgtcctgggactccggagggtctgatgaagcaccgcccaagcccagcagaccgggttatcccagtccgaggtccagcgaaggattttatcccagcccacagcacatggtacaaaccaatcattaccaggtttctggctaccctggttcacatggaatcacagccatggctggcagcatctatccaggtcaggcatctcttttggaccaaacagattcatggaatcatagacctcaggagatagcaatgtggcagcccaatgtggaggactctacagtattggacctgcgagggattgggcaagtgttgccaacccatctgatggaagagcgtctaatccgacagcaacaggaaatggaagaagatcagcgctggctggaaaaagaggaaagatttctgaaacctgatgtgagactctctcgaggcagtattgacagggaggatggaagtcttcagggtccgattggaaaccaacatatatatcagcctgtgggtaaaccagatcctgcagctccaccaaagaaaccgcctcgccctggagctcccggtcatctgggaagccttgccagcctcagcagccctgctgacagctacaacgagggtgtcaagccatggaggcttcagccccaggaaatcagcccccctcctactgccaacctggaccggtcgaatgataaggtgtacgagaatgtgacgggcctggtgaaagctgtcatcgagatgtccagtaaaatccagccagccccaccagaggagtatgtccctatggtgaaggaagtcggcttggccctgaggacattattggccactgtggatgagaccattcccctcctaccagccagcacccaccgagagattgagatggcacagaagctattgaactctgacctgggtgagctcatcaacaagatgaaactggcccagcagtatgtcatgaccagcctccagcaagagtacaaaaagcaaatgctgactgctgctcacgccctggctgtggatgccaaaaacttactcgatgtcattgaccaagcaagactgaaaatgcttgggcagacgagaccacactgagcctcccctaggagcacgtcttgctaccctcttttgaagatgttctctagccttccaccagcagcgaggaattaaccctgtgtcctcagtcgccagcacttacagctccaacttttttgaatgaccatctg

SEQ ID NO: 171522 - DNA, 629 bp, Homo sapiens
  Payload ID: 13729
  Gene Symbol: PTK2
  Gene Name: protein tyrosine kinase 2
  ENST ID: ENST00000523435
  CDS Start-End: 270-629
tgatgtaatgcactgtcccactctgcagggcacgttccagggtcgtcggttgtctctgtagcacttttccgtcgcctgtgagagccagaccaggattacactttgcacgtggtgttgctttcttcagcctcctttcatctgaaacagctcctcagcctttttttatctttcatgacattgacatttttgacaaacataggctcagtgattttatagagtattcttaaagttggattgagggatatcctataaacatttgtttcttcctgatgagattgagattttgcatctccagtcaggaatacaacataaataatgctgaatccttctcagcatcatacccagagacatacgatgtccaggggatgttccagttgaccaactggacattgacttctgaaggacggttggacacaactcctgttggtgattcctttattgagatggcacagaagctattgaactctgacctgggtgagctcatcaacaagatgaaactggcccagcagtatgtcatgaccagcctccagcaagagtacaaaaagcaaatgctgactgctgctcacgccctggctgtggatgccaaaaacttactcgatgtcattgaccaagcaagactgaaaatgctt

SEQ ID NO: 171523 - DNA, 3351 bp, Homo sapiens
  Payload ID: 13729
  Gene Symbol: PTK2
  Gene Name: protein tyrosine kinase 2
  ENST ID: ENST00000517712
  CDS Start-End: 1943-2290
aggctgggcctaatatctttaaactcagccccaagtcaggaatctttatgatagcattatggctagatgatgaagtggatctcaaggatattgaggggccgggctcaggaattgaggctgctgcagtttctcctgaatctatgagaattcagatgggcacttttcagtaattaaaaccatatgtcctcctcctcctttctttttgaagagctctcattctgttgaccttgcactgctgctggattgttcctcgggctttgcatgttccctgcatttgttttgtaactgagcatggtgcatggcagacctctctatgcagtatgctggggcagtgagcaggtggcacagtagccacaccctggcaacagtgagtgagagctggtgggcaggcttggaaactagctcctttttgttctgctcatgtgtttttatgggggatttgtcttatgcctttattaatattgtttttcttttttccctttctctgataaattcctttaacttttcctcaccttccgttcgacaatagccatggagggtaagcacatcgtgtctttgtgtgtctgtccagctctctctatcacacccggctctctgcatgtaactttggactggaaagcaggaagcccaagtgggagggcacttcggcctgctttgtcacctctcatgactgacagatgccaaaagcagtgtttatatatgcaaaagaatgagacatgtacatctttgcagtaaatgaattattcttgtgcttttctatctcatacccagacttttggaacaaccaagaattaatctgttccagattacttaggcaaaagcacccaagggttcagaaatgggaacttatatttagactgagcactggcatcaggttcatgattaaactatatgtactacaagttggtcttttttaaaaagtgtatatatatatatatatatatatatatatatatatatataccattttatgctggtgtaattctaaccagttggaatttttaaatactgctgaagatttcccaaaggccctcatgttattccaccatcagtactcaagttatcttagtaacatttgttgatgtctcttctgtgcccaggccctaggtagacattgttacatctttggcctcatcttccctgatcacagttgcccgggtgagagagctgaggctttataagcgtaggcccaggtgctttccagcagtcagcacagagctggctgaaaccggggtcttgagcagagaggctcctagcgacaccactgctgctttgacttcagtcacgacctgcaaacagatgctatccccttaaagtgcattcatatgtcagctttttataattgtacaaagaacatgtttccattaggcggctgagggcagctaagctgagccataccgttttcactgcagaattcaaactaagtggaaatccttatagtcttcatgtagaatgtttgactctttagccaaataggtaattttgtctaaaattcagtaaattcccagatggattattatcttgtggtaaatgattttggggtgaggggacattgaatcaggtctctgaaagaatctggggtttttagtataatatgtatgattccatctcatttcctttaactgagctcaaagttagaaagaaaatactgcctaatttgtcacttggaggaattactttactgtcattctcaatctgaactatatcccgcacacacaagaaaatcaatgaccttctgcaatctgctttgatctcttgtaaagaccctctctagcttgattgtggtgatctcacgccatctgctggagagcagaaaaatgactggcttctgtgttgtcagcttcagccccaggaaatcagcccccctcctactgccaacctggaccggtcgaatgataaggtgtacgagaatgtgacgggcctggtgaaagctgtcatcgagatgtccagtaaaatccagccagccccaccagaggagtatgtccctatggtgaaggaagtcggcttggccctgaggacattattggccactgtggatgagaccattcccctcctaccagccagcacccaccgagagattgagatggcacagaagctattgaactctgacctgggtgagctcatcaacaagatgaaactggcccagcagtatgtcatgaccagcctccagcaagagtacaaaaagcaaatgctgactgctgctcacgccctggctgtggatgccaaaaacttactcgatgtcattgaccaagcaagactgaaaatgcttgggcagacgagaccacactgagcctcccctaggagcacgtcttgctaccctcttttgaagatgttctctagccttccaccagcagcgaggaattaaccctgtgtcctcagtcgccagcacttacagctccaacttttttgaatgaccatctggttgaaaaatctttctcatataagtttaaccacactttgatttgggttcattttttgttttgtttttttcaatcatgatattcagaaaaatccaggatccaaaatgtggcgtttttctaagaatgaaaattatatgtaagcttttaagcatcatgaagaacaatttatgttcacattaagatacgttctaaagggggatggccaaggggtgacatcttaattcctaaactaccttagctgcatagtggaagaggagagcatgaagcaaagaattccaggaaacccaagaggctgagaattcttttgtctaccatagaattattatccagactggaatttttgtttgttagaacacccttcagttgcaatatgctaatcccactttacaaagaatataaaagctatattttgaagacttgagttatttcagaaaaaactacagccctttttgtcttacctgccttttactttcgtgtggatatgtgaagcattgggtcgggaactagctgtagaacacaactaaaaactcatgtcttttttcacagaataatgtgccagttttttgtagcaatgttatttctcttggaagcagaaatgctttgtaccagagcacctccaaactgcattgaggagaagttccagaaccatcccctttttccatttttatataatttataaagaaagattaaagccatgttgactattttacagccactggagttaactaacccttccttgtatctgtcttcccaggagagaatgaagcaaaacaggaatttggttttcttttgatgtccagttacaccatccattctgttaattttgaaaaaatataccctccctttagtttgttgggggatataaattattctcaggaagaatataatgaactgtacagttactttgacctattaaaaaggtgttaccagt

SEQ ID NO: 171524 - DNA, 571 bp, Homo sapiens
  Payload ID: 13729
  Gene Symbol: PTK2
  Gene Name: protein tyrosine kinase 2
  ENST ID: ENST00000517453
  CDS Start-End: 219-571
ataaccaactagctcctcgctgaaactggctcacaccgcggaagcccgggtcggtgtcggggcgagccttccctccttttcctggagcccgtctcaggcagaactggggctcccttgcatcttccagttacaaattcagtgccttctgcagtttccccagagctcctcaagaataacggaagggagaatatgacagatacctagcatctagcaaaataatggcagctgcttaccttgaccccaacttgaatcacacaccaaattcgagtactaagactcacctgggtactggtatggaacgttctcctggtgcaatggagcgagtattaaaggtctttcattattttgaaagcaatagtgagccaaccacctgggccagtattatcaggcatggagatgctactgatgtcaggggcatcattcagaagatagtggacagtcacaaagtaaagcatgtggcctgctatggattccgcctcagtcacctgcggtcagaggaggttcactggcttcacgtggatatgggcgtctccagtgtgagggagaagtatgagcttgctcacccaccaga

SEQ ID NO: 171525 - DNA, 430 bp, Homo sapiens
  Payload ID: 13729
  Gene Symbol: PTK2
  Gene Name: protein tyrosine kinase 2
  ENST ID: ENST00000524257
  CDS Start-End: 407-430
gtcgtctgccttcgcttcacggcgccgagccgcggtccgaatccatggttggttgaatctggatgtggaacccgctgacgtggatggctgactgtattgcagaactggggctcccttgcatcttccagttacaaattcagtgccttctgcagtttccccagagctcctcaagaataacggaagggagattgcggaagcatgagaagattctgtaactgagaggcattcttcaagctgctggaaaatattacagaaggaacaccttccaaattttgcttcaagctctgaaaaaaggagcacacaggggaaccttagtcttgcttgtggatcgaagcaaatactatcacagcgaggaactgggactttgtgtgcagactcctggcttgatctttataggattgggtgtatgttgttggaactggcaggccaa

SEQ ID NO: 171526 - DNA, 678 bp, Homo sapiens
  Payload ID: 13729
  Gene Symbol: PTK2
  Gene Name: protein tyrosine kinase 2
  ENST ID: ENST00000521562
  CDS Start-End: 283-678
atgtgggacttcagatagcttctgagtagtcaagcagtgataaagcactggttaagctgaacgataggaagattgtattgagcaatttagggagattattggccagattgctaattgatcacgtaagtgctggcgtgatcacattaggtgtgaaaagaatctgtcctcagacatgtatatgcttgataaagtgctgcgtgggatttctcagaggaattctgttctgctcaagataaactttgcacaatcctggaggaagagaaggctcagcaagaagagcgcatgaggatggagtccagaagacaggccacagtgtcctgggactccggagggtctgatgaagcaccgcccaagcccagcagaccgggttatcccagtccgaggtccagcgaaggattttatcccagcccacagcacatggtacaaaccaatcattaccaggtttctggctaccctggttcacatggaatcacagccatggctggcagcatctatccaggtcaggcatctcttttggaccaaacagattcatggaatcatagacctcaggagatagcaatgtggcagcccaatgtggaggactctacagtattggacctgcgagggattgggcaagtgttgccaacccatctgatggaagagcgtctaatccgacagcaacaggaaatggaagaagat

SEQ ID NO: 171527 - DNA, 4147 bp, Homo sapiens
  Payload ID: 13730
  Gene Symbol: PTK2B
  Gene Name: protein tyrosine kinase 2 beta
  Uniprot ID: Q14289
  ENST ID: ENST00000346049
  CDS Start-End: 241-3270
aaggaagtggggaggagagcagcaggggtgtggttaacaactcagaggaggagggagaatctaacctgtcagcccttttactcagccacagcctccggagccgttgcacacctacctgcccggccgacttacctgtacttgccgccgtcccggctcacctggcggtgcccgaggagtagtcgctggagtccgcgcctccctgggactgcaatgtgccgatcttagctgctgcctgagaggatgtctggggtgtccgagcccctgagtcgagtaaagttgggcacgttacgccggcctgaaggccctgcagagcccatggtggtggtaccagtagatgtggaaaaggaggacgtgcgtatcctcaaggtctgcttctatagcaacagcttcaatcctgggaaaaacttcaaactggtcaaatgcactgtccagacggagatccgggagatcatcacctccatcctgctgagcgggcggatcgggcccaacatccggttggctgagtgctatgggctgaggctgaagcacatgaagtccgatgagatccactggctgcacccacagatgacggtgggtgaggtgcaggacaagtatgagtgtctgcacgtggaagccgagtggaggtatgaccttcaaatccgctacttgccagaagacttcatggagagcctgaaggaggacaggaccacgctgctctatttttaccaacagctccggaacgactacatgcagcgctacgccagcaaggtcagcgagggcatggccctgcagctgggctgcctggagctcaggcggttcttcaaggatatgccccacaatgcacttgacaagaagtccaacttcgagctcctagaaaaggaagtggggctggacttgtttttcccaaagcagatgcaggagaacttaaagcccaaacagttccggaagatgatccagcagaccttccagcagtacgcctcgctcagggaggaggagtgcgtcatgaagttcttcaacactctcgccggcttcgccaacatcgaccaggagacctaccgctgtgaactcattcaaggatggaacattactgtggacctggtcattggccctaaagggatccgccagctgactagtcaggacgcaaagcccacctgcctggccgagttcaagcagatcaggtccatcaggtgcctcccgctggaggagggccaggcagtacttcagctgggcattgaaggtgccccccaggccttgtccatcaaaacctcatccctagcagaggctgagaacatggctgacctcatagacggctactgccggctgcagggtgagcaccaaggctctctcatcatccatcctaggaaagatggtgagaagcggaacagcctgccccagatccccatgctaaacctggaggcccggcggtcccacctctcagagagctgcagcatagagtcagacatctacgcagagattcccgacgaaaccctgcgaaggcccggaggtccacagtatggcattgcccgtgaagatgtggtcctgaatcgtattcttggggaaggcttttttggggaggtctatgaaggtgtctacacaaatcacaaaggggagaaaatcaatgtagctgtcaagacctgcaagaaagactgcactctggacaacaaggagaagttcatgagcgaggcagtgatcatgaagaacctcgaccacccgcacatcgtgaagctgatcggcatcattgaagaggagcccacctggatcatcatggaattgtatccctatggggagctgggccactacctggagcggaacaagaactccctgaaggtgctcaccctcgtgctgtactcactgcagatatgcaaagccatggcctacctggagagcatcaactgcgtgcacagggacattgctgtccggaacatcctggtggcctcccctgagtgtgtgaagctgggggactttggtctttcccggtacattgaggacgaggactattacaaagcctctgtgactcgtctccccatcaaatggatgtccccagagtccattaacttccgacgcttcacgacagccagtgacgtctggatgttcgccgtgtgcatgtgggagatcctgagctttgggaagcagcccttcttctggctggagaacaaggatgtcatcggggtgctggagaaaggagaccggctgcccaagcctgatctctgtccaccggtcctttataccctcatgacccgctgctgggactacgaccccagtgaccggccccgcttcaccgagctggtgtgcagcctcagtgacgtttatcagatggagaaggacattgccatggagcaagagaggaatgctcgctaccgaacccccaaaatcttggagcccacagccttccaggaacccccacccaagcccagccgacctaagtacagaccccctccgcaaaccaacctcctggctccaaagctgcagttccaggttcctgagggtctgtgtgccagctctcctacgctcaccagccctatggagtatccatctcccgttaactcactgcacaccccacctctccaccggcacaatgtcttcaaacgccacagcatgcgggaggaggacttcatccaacccagcagccgagaagaggcccagcagctgtgggaggctgaaaaggtcaaaatgcggcaaatcctggacaaacagcagaagcagatggtggaggactaccagtggctcaggcaggaggagaagtccctggaccccatggtttatatgaatgataagtccccattgacgccagagaaggaggtcggctacctggagttcacagggcccccacagaagcccccgaggctgggcgcacagtccatccagcccacagctaacctggaccggactgatgacctggtgtacctcaatgtcatggagctggtgcgggccgtgctggagctcaagaatgagctctgtcagctgccccccgagggctacgtggtggtggtgaagaatgtggggctgaccctgcggaagctcatcgggagcgtggatgatctcctgccttccttgccgtcatcttcacggacagagatcgagggcacccagaaactgctcaacaaagacctggcagagctcatcaacaagatgcggctggcacagcagaacgccgtgacctccctaagtgaggagtgcaagaggcagatgctgacggcttcacacaccctggctgtggacgccaagaacctgctcgacgctgtggaccaggccaaggttctggccaatctggcccacccacctgcagagtgacggagggtgggggccacctgcctgcgtcttccgcccctgcctgccatgtacctcccctgccttgctgttggtcatgtgggtcttccagggggaaggccaaggggagtcaccttcccttgccactttgcacgacgccctctccccacccctacccctggctgtactgctcaggctgcagctggacagaggggactctgggctatggacacagggtgacggtgacaaagatggctcagagggggactgctgctgcctggccactgctccctaagccagcctggtccatgcagggggctcctgggggtggggaggtgtcacatggtgcccctagctttatatatggacatggcaggccgatttgggaaccaagctattcctttcccttcctcttcggccctcagatgtcccttgatgcacagagaagctggggaggagctttgttttgggggtcaggcagccagtgagatgagggatgggcctggcattcttgtacagtgtatattgaaatttatttaatgtgagtttggtctggactgacagcatgtgccctcctgagggaggacctggggcacagtccaggaacaagctaattgggagtccaggcacaggatgctgtgttgtcaacaaaccaagcatcagggggaagaagcagagagatgcggccaagataggaccttgggccaaatccgctctcttcctgcccctctttctctttcttcctttactttcccttgcttttccctcttttcttactcctcctctttctctccccaacccccattctcatctgcacccttcttttctcatgtgtttgcataaacattcttttaacttctttctatttgacttgtggttgaattaaaattgtcccatttgc

SEQ ID NO: 171528 - DNA, 3161 bp, Homo sapiens
  Payload ID: 13730
  Gene Symbol: PTK2B
  Gene Name: protein tyrosine kinase 2 beta
  ENST ID: ENST00000397497
  CDS Start-End: 452-2242
ccagcagaccttccagcagtacgcctcgctcagggaggaggagtgcgtcatgaagttcttcaacactctcgccggcttcgccaacatcgaccaggagacctaccgctgtgaactcattgtaatggcgggctctcttgatcctctccctgacctggattccaggcctctcggaaaagggggccaggagggggcagggagaggctgcaatcgctgcagattctcactcaggcagcaggacctcgctgacctgccgtcggtggaagtcaaaagcatccccttgcctgaagcaggcactgaaatgttggcctccagctctgggaggtgggcaggacaggcaaggtgtcaggaggggaagatccatatggccagggtttcggtgagaaggagctggagacccaggaaacagtggcttgtgtctagcttagggagcttttcttcaagtttctgaagaatggggaggacagctctggaacaacagtccactctccttttattccagcaaggatggaacattactgtggacctggtcattggccctaaagggatccgccagctgactagtcaggacgcaaagcccacctgcctggccgagttcaagcagatcaggtccatcaggtgcctcccgctggaggagggccaggcagtacttcagctgggcattgaaggtgccccccaggccttgtccatcaaaacctcatccctagcagaggctgagaacatggctgacctcatagacggctactgccggctgcagggtgagcaccaaggctctctcatcatccatcctaggaaagatggtgagaagcggaacagcctgccccagatccccatgctaaacctggaggcccggcggtcccacctctcagagagctgcagcatagagtcagacatctacgcagagattcccgacgaaaccctgcgaaggcccggaggtccacagtatggcattgcccgtgaagatgtggtcctgaatcgtattcttggggaaggcttttttggggaggtctatgaaggtgtctacacaaatcacaaaggggagaaaatcaatgtagctgtcaagacctgcaagaaagactgcactctggacaacaaggagaagttcatgagcgaggcagtgatcatgaagaacctcgaccacccgcacatcgtgaagctgatcggcatcattgaagaggagcccacctggatcatcatggaattgtatccctatggggagctgggccactacctggagcggaacaagaactccctgaaggtgctcaccctcgtgctgtactcactgcagatatgcaaagccatggcctacctggagagcatcaactgcgtgcacagggacattgctgtccggaacatcctggtggcctcccctgagtgtgtgaagctgggggactttggtctttcccggtacattgaggacgaggactattacaaagcctctgtgactcgtctccccatcaaatggatgtccccagagtccattaacttccgacgcttcacgacagccagtgacgtctggatgttcgccgtgtgcatgtgggagatcctgagctttgggaagcagcccttcttctggctggagaacaaggatgtcatcggggtgctggagaaaggagaccggctgcccaagcctgatctctgtccaccggtcctttataccctcatgacccgctgctgggactacgaccccagtgaccggccccgcttcaccgagctggtgtgcagcctcagtgacgtttatcagatggagaaggacattgccatggagcaagagaggaatgctcgctaccgaacccccaaaatcttggagcccacagccttccaggaacccccacccaagcccagccgacctaagtacagaccccctccgcaaaccaacctcctggctccaaagctgcagttccaggaggaggacttcatccaacccagcagccgagaagaggcccagcagctgtgggaggctgaaaaggtcaaaatgcggcaaatcctggacaaacagcagaagcagatggtggaggactaccagtggctcaggcaggaggagaagtccctggaccccatggtttatatgaatgataagtccccattgacgccagagaaggaggtcggctaccgtgagtgttcccgcccttcttcggggggtttcctcttggcaccttgtgcagagccaccatccttgcccaccgcccagggcagggagcagcggagtctgtctgcattccctgcagcatcggccatgatttaattcagagcatgtggggcaggccagcttcccctccgctccctccaccccattcctctccctgcctagcaccctgcccttctctctctcagtggccacatccttaggcccctcctcagatcatccccctcctgcattagtttggaggagctggaaattctctcttcctcatttcctgctctgttggaagctcccgtgggaaaagttaagcagtgccacctgcctgtcccagttcagattcatcttctgtaggcctgagggacagaggagagaaagtgagaggggcagctgagccctcaggctctctccagaagaccctgttgcaggcagggagggaagagccagcagtaagcccggggcctggaggggtggcattgaggaggaggatgatgacagccatcacagagaactggacacaagtcaggcatgggcctgggaccatttattatcttctgaggcacagggtgattaggtaacttgtccaaattcacacagctaataattggcaaagttcagatttgaacccaagccttctgactttagggtcccttctgagctcaccctcttatcttacaaatgaaaattaaggctcggaatgtgagctgcctagagtggtcacagagctctttggcggcagaggtgagaatagaaggccaggtgtggtggctcacacctgtaatcccagcactttgggaggctgaggtgggagggtcacttgatcccaggagtttgagactggcttgggcaacatagcaagaccccatctctacaaaagattaagaaaattaggcctggtgatgcatgcctgcaagcccagcggctcaggaggccgaggcaggaggattgcctgagcctagaaggtgaggctacagtgagctgtgatcacgccactgtgctccagcctcggtgcaagccctgcctc

SEQ ID NO: 171529 - DNA, 4719 bp, Homo sapiens
  Payload ID: 13730
  Gene Symbol: PTK2B
  Gene Name: protein tyrosine kinase 2 beta
  Uniprot ID: Q14289
  ENST ID: ENST00000397501
  CDS Start-End: 809-3838
gcagttcccgcctcctcaggtccgggcgggtccctggccggggtagcacggaagggtctcccaggcggcgtagtagggcttccgtgttactggaaacctacttccggctgcaaatgggaaaaggagcctctaccttaaccaatccccgggaacctcaggcccgcggatgggagaaaccagagatgccaacttcctgcttccgaagtagtggctgggtcttaaagcaccgatgtttctgcattgaatagccctggaagacagaattcttgtctctccaaagatctggcagacttattcccaattataagagatccttgcaaaggaggtgtcttgcttcaccttcaccttccactgtgattgtaagttttctgaggcctcgccagccatgcggaactgaataggactagcaacttcatagacggttgtgaagacaagctagacggcagatgaaagttcttggcacagagtgaacacttgataaactatatggcagggagggctggaacggggcttgtttgaagagcaatatgagccagggttatagacctgagtttggggtaagagtggaacatccaaatggaagagtccagcagctgaaaggacatttgttcaaaggcctttttcattacagttttctccttcttctgatccagccacagcctccggagccgttgcacacctacctgcccggccgacttacctgtacttgccgccgtcccggctcacctggcggtgcccgaggagtagtcgctggagtccgcgcctccctgggactgcaatgtgccgatcttagctgctgcctgagaggatgtctggggtgtccgagcccctgagtcgagtaaagttgggcacgttacgccggcctgaaggccctgcagagcccatggtggtggtaccagtagatgtggaaaaggaggacgtgcgtatcctcaaggtctgcttctatagcaacagcttcaatcctgggaaaaacttcaaactggtcaaatgcactgtccagacggagatccgggagatcatcacctccatcctgctgagcgggcggatcgggcccaacatccggttggctgagtgctatgggctgaggctgaagcacatgaagtccgatgagatccactggctgcacccacagatgacggtgggtgaggtgcaggacaagtatgagtgtctgcacgtggaagccgagtggaggtatgaccttcaaatccgctacttgccagaagacttcatggagagcctgaaggaggacaggaccacgctgctctatttttaccaacagctccggaacgactacatgcagcgctacgccagcaaggtcagcgagggcatggccctgcagctgggctgcctggagctcaggcggttcttcaaggatatgccccacaatgcacttgacaagaagtccaacttcgagctcctagaaaaggaagtggggctggacttgtttttcccaaagcagatgcaggagaacttaaagcccaaacagttccggaagatgatccagcagaccttccagcagtacgcctcgctcagggaggaggagtgcgtcatgaagttcttcaacactctcgccggcttcgccaacatcgaccaggagacctaccgctgtgaactcattcaaggatggaacattactgtggacctggtcattggccctaaagggatccgccagctgactagtcaggacgcaaagcccacctgcctggccgagttcaagcagatcaggtccatcaggtgcctcccgctggaggagggccaggcagtacttcagctgggcattgaaggtgccccccaggccttgtccatcaaaacctcatccctagcagaggctgagaacatggctgacctcatagacggctactgccggctgcagggtgagcaccaaggctctctcatcatccatcctaggaaagatggtgagaagcggaacagcctgccccagatccccatgctaaacctggaggcccggcggtcccacctctcagagagctgcagcatagagtcagacatctacgcagagattcccgacgaaaccctgcgaaggcccggaggtccacagtatggcattgcccgtgaagatgtggtcctgaatcgtattcttggggaaggcttttttggggaggtctatgaaggtgtctacacaaatcacaaaggggagaaaatcaatgtagctgtcaagacctgcaagaaagactgcactctggacaacaaggagaagttcatgagcgaggcagtgatcatgaagaacctcgaccacccgcacatcgtgaagctgatcggcatcattgaagaggagcccacctggatcatcatggaattgtatccctatggggagctgggccactacctggagcggaacaagaactccctgaaggtgctcaccctcgtgctgtactcactgcagatatgcaaagccatggcctacctggagagcatcaactgcgtgcacagggacattgctgtccggaacatcctggtggcctcccctgagtgtgtgaagctgggggactttggtctttcccggtacattgaggacgaggactattacaaagcctctgtgactcgtctccccatcaaatggatgtccccagagtccattaacttccgacgcttcacgacagccagtgacgtctggatgttcgccgtgtgcatgtgggagatcctgagctttgggaagcagcccttcttctggctggagaacaaggatgtcatcggggtgctggagaaaggagaccggctgcccaagcctgatctctgtccaccggtcctttataccctcatgacccgctgctgggactacgaccccagtgaccggccccgcttcaccgagctggtgtgcagcctcagtgacgtttatcagatggagaaggacattgccatggagcaagagaggaatgctcgctaccgaacccccaaaatcttggagcccacagccttccaggaacccccacccaagcccagccgacctaagtacagaccccctccgcaaaccaacctcctggctccaaagctgcagttccaggttcctgagggtctgtgtgccagctctcctacgctcaccagccctatggagtatccatctcccgttaactcactgcacaccccacctctccaccggcacaatgtcttcaaacgccacagcatgcgggaggaggacttcatccaacccagcagccgagaagaggcccagcagctgtgggaggctgaaaaggtcaaaatgcggcaaatcctggacaaacagcagaagcagatggtggaggactaccagtggctcaggcaggaggagaagtccctggaccccatggtttatatgaatgataagtccccattgacgccagagaaggaggtcggctacctggagttcacagggcccccacagaagcccccgaggctgggcgcacagtccatccagcccacagctaacctggaccggactgatgacctggtgtacctcaatgtcatggagctggtgcgggccgtgctggagctcaagaatgagctctgtcagctgccccccgagggctacgtggtggtggtgaagaatgtggggctgaccctgcggaagctcatcgggagcgtggatgatctcctgccttccttgccgtcatcttcacggacagagatcgagggcacccagaaactgctcaacaaagacctggcagagctcatcaacaagatgcggctggcacagcagaacgccgtgacctccctaagtgaggagtgcaagaggcagatgctgacggcttcacacaccctggctgtggacgccaagaacctgctcgacgctgtggaccaggccaaggttctggccaatctggcccacccacctgcagagtgacggagggtgggggccacctgcctgcgtcttccgcccctgcctgccatgtacctcccctgccttgctgttggtcatgtgggtcttccagggggaaggccaaggggagtcaccttcccttgccactttgcacgacgccctctccccacccctacccctggctgtactgctcaggctgcagctggacagaggggactctgggctatggacacagggtgacggtgacaaagatggctcagagggggactgctgctgcctggccactgctccctaagccagcctggtccatgcagggggctcctgggggtggggaggtgtcacatggtgcccctagctttatatatggacatggcaggccgatttgggaaccaagctattcctttcccttcctcttcggccctcagatgtcccttgatgcacagagaagctggggaggagctttgttttgggggtcaggcagccagtgagatgagggatgggcctggcattcttgtacagtgtatattgaaatttatttaatgtgagtttggtctggactgacagcatgtgccctcctgagggaggacctggggcacagtccaggaacaagctaattgggagtccaggcacaggatgctgtgttgtcaacaaaccaagcatcagggggaagaagcagagagatgcggccaagataggaccttgggccaaatccgctctcttcctgcccctctttctctttcttcctttactttcccttgcttttccctcttttcttactcctcctctttctctccccaacccccattctcatctgcacccttcttttctcatgtgtttgcataaacattcttttaacttctttctatttgacttgtggttgaattaaaattgtcccatttgctttg

SEQ ID NO: 171530 - DNA, 3941 bp, Homo sapiens
  Payload ID: 13730
  Gene Symbol: PTK2B
  Gene Name: protein tyrosine kinase 2 beta
  Uniprot ID: Q14289
  ENST ID: ENST00000420218
  CDS Start-End: 156-3059
ccacagcctccggagccgttgcacacctacctgcccggccgacttacctgtacttgccgccgtcccggctcacctggcggtgcccgaggagtagtcgctggagtccgcgcctccctgggactgcaatgtgccgatcttagctgctgcctgagaggatgtctggggtgtccgagcccctgagtcgagtaaagttgggcacgttacgccggcctgaaggccctgcagagcccatggtggtggtaccagtagatgtggaaaaggaggacgtgcgtatcctcaaggtctgcttctatagcaacagcttcaatcctgggaaaaacttcaaactggtcaaatgcactgtccagacggagatccgggagatcatcacctccatcctgctgagcgggcggatcgggcccaacatccggttggctgagtgctatgggctgaggctgaagcacatgaagtccgatgagatccactggctgcacccacagatgacggtgggtgaggtgcaggacaagtatgagtgtctgcacgtggaagccgagtggaggtatgaccttcaaatccgctacttgccagaagacttcatggagagcctgaaggaggacaggaccacgctgctctatttttaccaacagctccggaacgactacatgcagcgctacgccagcaaggtcagcgagggcatggccctgcagctgggctgcctggagctcaggcggttcttcaaggatatgccccacaatgcacttgacaagaagtccaacttcgagctcctagaaaaggaagtggggctggacttgtttttcccaaagcagatgcaggagaacttaaagcccaaacagttccggaagatgatccagcagaccttccagcagtacgcctcgctcagggaggaggagtgcgtcatgaagttcttcaacactctcgccggcttcgccaacatcgaccaggagacctaccgctgtgaactcattcaaggatggaacattactgtggacctggtcattggccctaaagggatccgccagctgactagtcaggacgcaaagcccacctgcctggccgagttcaagcagatcaggtccatcaggtgcctcccgctggaggagggccaggcagtacttcagctgggcattgaaggtgccccccaggccttgtccatcaaaacctcatccctagcagaggctgagaacatggctgacctcatagacggctactgccggctgcagggtgagcaccaaggctctctcatcatccatcctaggaaagatggtgagaagcggaacagcctgccccagatccccatgctaaacctggaggcccggcggtcccacctctcagagagctgcagcatagagtcagacatctacgcagagattcccgacgaaaccctgcgaaggcccggaggtccacagtatggcattgcccgtgaagatgtggtcctgaatcgtattcttggggaaggcttttttggggaggtctatgaaggtgtctacacaaatcacaaaggggagaaaatcaatgtagctgtcaagacctgcaagaaagactgcactctggacaacaaggagaagttcatgagcgaggcagtgatcatgaagaacctcgaccacccgcacatcgtgaagctgatcggcatcattgaagaggagcccacctggatcatcatggaattgtatccctatggggagctgggccactacctggagcggaacaagaactccctgaaggtgctcaccctcgtgctgtactcactgcagatatgcaaagccatggcctacctggagagcatcaactgcgtgcacagggacattgctgtccggaacatcctggtggcctcccctgagtgtgtgaagctgggggactttggtctttcccggtacattgaggacgaggactattacaaagcctctgtgactcgtctccccatcaaatggatgtccccagagtccattaacttccgacgcttcacgacagccagtgacgtctggatgttcgccgtgtgcatgtgggagatcctgagctttgggaagcagcccttcttctggctggagaacaaggatgtcatcggggtgctggagaaaggagaccggctgcccaagcctgatctctgtccaccggtcctttataccctcatgacccgctgctgggactacgaccccagtgaccggccccgcttcaccgagctggtgtgcagcctcagtgacgtttatcagatggagaaggacattgccatggagcaagagaggaatgctcgctaccgaacccccaaaatcttggagcccacagccttccaggaacccccacccaagcccagccgacctaagtacagaccccctccgcaaaccaacctcctggctccaaagctgcagttccaggaggaggacttcatccaacccagcagccgagaagaggcccagcagctgtgggaggctgaaaaggtcaaaatgcggcaaatcctggacaaacagcagaagcagatggtggaggactaccagtggctcaggcaggaggagaagtccctggaccccatggtttatatgaatgataagtccccattgacgccagagaaggaggtcggctacctggagttcacagggcccccacagaagcccccgaggctgggcgcacagtccatccagcccacagctaacctggaccggactgatgacctggtgtacctcaatgtcatggagctggtgcgggccgtgctggagctcaagaatgagctctgtcagctgccccccgagggctacgtggtggtggtgaagaatgtggggctgaccctgcggaagctcatcgggagcgtggatgatctcctgccttccttgccgtcatcttcacggacagagatcgagggcacccagaaactgctcaacaaagacctggcagagctcatcaacaagatgcggctggcacagcagaacgccgtgacctccctaagtgaggagtgcaagaggcagatgctgacggcttcacacaccctggctgtggacgccaagaacctgctcgacgctgtggaccaggccaaggttctggccaatctggcccacccacctgcagagtgacggagggtgggggccacctgcctgcgtcttccgcccctgcctgccatgtacctcccctgccttgctgttggtcatgtgggtcttccagggggaaggccaaggggagtcaccttcccttgccactttgcacgacgccctctccccacccctacccctggctgtactgctcaggctgcagctggacagaggggactctgggctatggacacagggtgacggtgacaaagatggctcagagggggactgctgctgcctggccactgctccctaagccagcctggtccatgcagggggctcctgggggtggggaggtgtcacatggtgcccctagctttatatatggacatggcaggccgatttgggaaccaagctattcctttcccttcctcttcggccctcagatgtcccttgatgcacagagaagctggggaggagctttgttttgggggtcaggcagccagtgagatgagggatgggcctggcattcttgtacagtgtatattgaaatttatttaatgtgagtttggtctggactgacagcatgtgccctcctgagggaggacctggggcacagtccaggaacaagctaattgggagtccaggcacaggatgctgtgttgtcaacaaaccaagcatcagggggaagaagcagagagatgcggccaagataggaccttgggccaaatccgctctcttcctgcccctctttctctttcttcctttactttcccttgcttttccctcttttcttactcctcctctttctctccccaacccccattctcatctgcacccttcttttctcatgtgtttgcataaacattcttttaacttctttctatttgacttgtggttgaattaaaattgtcccatttgctttgc

SEQ ID NO: 171531 - DNA, 818 bp, Homo sapiens
  Payload ID: 13730
  Gene Symbol: PTK2B
  Gene Name: protein tyrosine kinase 2 beta
  ENST ID: ENST00000412793
  CDS Start-End: 180-818
ccaggaagggcctgcctttgagacttgtcactccctgagatccatcgtggcaccaaatgtttgccgagctccgccctgggagggaggcctgcagcctgggaactgggagacctgggtcccagtggagaggcctcaccatgtagactgcaatgtgccgatcttagctgctgcctgagaggatgtctggggtgtccgagcccctgagtcgagtaaagttgggcacgttacgccggcctgaaggccctgcagagcccatggtggtggtaccagtagatgtggaaaaggaggacgtgcgtatcctcaaggtctgcttctatagcaacagcttcaatcctgggaaaaacttcaaactggtcaaatgcactgtccagacggagatccgggagatcatcacctccatcctgctgagcgggcggatcgggcccaacatccggttggctgagtgctatgggctgaggctgaagcacatgaagtccgatgagatccactggctgcacccacagatgacggtgggtgaggtgcaggacaagtatgagtgtctgcacgtggaagccgagtggaggtatgaccttcaaatccgctacttgccagaagacttcatggagagcctgaaggaggacaggaccacgctgctctatttttaccaacagctccggaacgactacatgcagcgctacgccagcaaggtcagcgagggcatggccctgcagctgggctgcctggagctcaggcggttcttcaaggatatgccccacaatgcacttgacaagaagtccaacttcgagctcctagaaaaggaagtggggctggacttgttt

SEQ ID NO: 171532 - DNA, 3914 bp, Homo sapiens
  Payload ID: 13730
  Gene Symbol: PTK2B
  Gene Name: protein tyrosine kinase 2 beta
  Uniprot ID: Q14289
  ENST ID: ENST00000517339
  CDS Start-End: 134-3037
tctgtcttggagctcggtgggtgctgtccctggggccatgaggtatgtgggcctgtgtggggctctttcagggctgaccctctgctgtctctgcaggactgcaatgtgccgatcttagctgctgcctgagaggatgtctggggtgtccgagcccctgagtcgagtaaagttgggcacgttacgccggcctgaaggccctgcagagcccatggtggtggtaccagtagatgtggaaaaggaggacgtgcgtatcctcaaggtctgcttctatagcaacagcttcaatcctgggaaaaacttcaaactggtcaaatgcactgtccagacggagatccgggagatcatcacctccatcctgctgagcgggcggatcgggcccaacatccggttggctgagtgctatgggctgaggctgaagcacatgaagtccgatgagatccactggctgcacccacagatgacggtgggtgaggtgcaggacaagtatgagtgtctgcacgtggaagccgagtggaggtatgaccttcaaatccgctacttgccagaagacttcatggagagcctgaaggaggacaggaccacgctgctctatttttaccaacagctccggaacgactacatgcagcgctacgccagcaaggtcagcgagggcatggccctgcagctgggctgcctggagctcaggcggttcttcaaggatatgccccacaatgcacttgacaagaagtccaacttcgagctcctagaaaaggaagtggggctggacttgtttttcccaaagcagatgcaggagaacttaaagcccaaacagttccggaagatgatccagcagaccttccagcagtacgcctcgctcagggaggaggagtgcgtcatgaagttcttcaacactctcgccggcttcgccaacatcgaccaggagacctaccgctgtgaactcattcaaggatggaacattactgtggacctggtcattggccctaaagggatccgccagctgactagtcaggacgcaaagcccacctgcctggccgagttcaagcagatcaggtccatcaggtgcctcccgctggaggagggccaggcagtacttcagctgggcattgaaggtgccccccaggccttgtccatcaaaacctcatccctagcagaggctgagaacatggctgacctcatagacggctactgccggctgcagggtgagcaccaaggctctctcatcatccatcctaggaaagatggtgagaagcggaacagcctgccccagatccccatgctaaacctggaggcccggcggtcccacctctcagagagctgcagcatagagtcagacatctacgcagagattcccgacgaaaccctgcgaaggcccggaggtccacagtatggcattgcccgtgaagatgtggtcctgaatcgtattcttggggaaggcttttttggggaggtctatgaaggtgtctacacaaatcacaaaggggagaaaatcaatgtagctgtcaagacctgcaagaaagactgcactctggacaacaaggagaagttcatgagcgaggcagtgatcatgaagaacctcgaccacccgcacatcgtgaagctgatcggcatcattgaagaggagcccacctggatcatcatggaattgtatccctatggggagctgggccactacctggagcggaacaagaactccctgaaggtgctcaccctcgtgctgtactcactgcagatatgcaaagccatggcctacctggagagcatcaactgcgtgcacagggacattgctgtccggaacatcctggtggcctcccctgagtgtgtgaagctgggggactttggtctttcccggtacattgaggacgaggactattacaaagcctctgtgactcgtctccccatcaaatggatgtccccagagtccattaacttccgacgcttcacgacagccagtgacgtctggatgttcgccgtgtgcatgtgggagatcctgagctttgggaagcagcccttcttctggctggagaacaaggatgtcatcggggtgctggagaaaggagaccggctgcccaagcctgatctctgtccaccggtcctttataccctcatgacccgctgctgggactacgaccccagtgaccggccccgcttcaccgagctggtgtgcagcctcagtgacgtttatcagatggagaaggacattgccatggagcaagagaggaatgctcgctaccgaacccccaaaatcttggagcccacagccttccaggaacccccacccaagcccagccgacctaagtacagaccccctccgcaaaccaacctcctggctccaaagctgcagttccaggaggaggacttcatccaacccagcagccgagaagaggcccagcagctgtgggaggctgaaaaggtcaaaatgcggcaaatcctggacaaacagcagaagcagatggtggaggactaccagtggctcaggcaggaggagaagtccctggaccccatggtttatatgaatgataagtccccattgacgccagagaaggaggtcggctacctggagttcacagggcccccacagaagcccccgaggctgggcgcacagtccatccagcccacagctaacctggaccggactgatgacctggtgtacctcaatgtcatggagctggtgcgggccgtgctggagctcaagaatgagctctgtcagctgccccccgagggctacgtggtggtggtgaagaatgtggggctgaccctgcggaagctcatcgggagcgtggatgatctcctgccttccttgccgtcatcttcacggacagagatcgagggcacccagaaactgctcaacaaagacctggcagagctcatcaacaagatgcggctggcacagcagaacgccgtgacctccctaagtgaggagtgcaagaggcagatgctgacggcttcacacaccctggctgtggacgccaagaacctgctcgacgctgtggaccaggccaaggttctggccaatctggcccacccacctgcagagtgacggagggtgggggccacctgcctgcgtcttccgcccctgcctgccatgtacctcccctgccttgctgttggtcatgtgggtcttccagggggaaggccaaggggagtcaccttcccttgccactttgcacgacgccctctccccacccctacccctggctgtactgctcaggctgcagctggacagaggggactctgggctatggacacagggtgacggtgacaaagatggctcagagggggactgctgctgcctggccactgctccctaagccagcctggtccatgcagggggctcctgggggtggggaggtgtcacatggtgcccctagctttatatatggacatggcaggccgatttgggaaccaagctattcctttcccttcctcttcggccctcagatgtcccttgatgcacagagaagctggggaggagctttgttttgggggtcaggcagccagtgagatgagggatgggcctggcattcttgtacagtgtatattgaaatttatttaatgtgagtttggtctggactgacagcatgtgccctcctgagggaggacctggggcacagtccaggaacaagctaattgggagtccaggcacaggatgctgtgttgtcaacaaaccaagcatcagggggaagaagcagagagatgcggccaagataggaccttgggccaaatccgctctcttcctgcccctctttctctttcttcctttactttcccttgcttttccctcttttcttactcctcctctttctctccccaacccccattctcatctgcacccttcttttctcatgtgtttgcataaacattcttttaacttctttctatttgacttgtggttgaattaaaattgtcccatttgc

SEQ ID NO: 171533 - DNA, 651 bp, Homo sapiens
  Payload ID: 13730
  Gene Symbol: PTK2B
  Gene Name: protein tyrosine kinase 2 beta
  ENST ID: ENST00000522517
  CDS Start-End: 99-651
tccattcaggaggcactcactggcttcccacctgcggccaggtgcaaggtgtggggacaaggactgcaatgtgccgatcttagctgctgcctgagaggatgtctggggtgtccgagcccctgagtcgagtaaagttgggcacgttacgccggcctgaaggccctgcagagcccatggtggtggtaccagtagatgtggaaaaggaggacgtgcgtatcctcaaggtctgcttctatagcaacagcttcaatcctgggaaaaacttcaaactggtcaaatgcactgtccagacggagatccgggagatcatcacctccatcctgctgagcgggcggatcgggcccaacatccggttggctgagtgctatgggctgaggctgaagcacatgaagtccgatgagatccactggctgcacccacagatgacggtgggtgaggtgcaggacaagtatgagtgtctgcacgtggaagccgagtggaggtatgaccttcaaatccgctacttgccagaagacttcatggagagcctgaaggaggacaggaccacgctgctctatttttaccaacagctccggaacgactacatgcagcgctacgccagcaaggtcagcgagggcatggccctgcagctgggctgcctggagctcaggt

SEQ ID NO: 171534 - DNA, 582 bp, Homo sapiens
  Payload ID: 13730
  Gene Symbol: PTK2B
  Gene Name: protein tyrosine kinase 2 beta
  ENST ID: ENST00000519512
  CDS Start-End: 1-582
ccggaagatgatccagcagaccttccagcagtacgcctcgctcagggaggaggagtgcgtcatgaagttcttcaacactctcgccggcttcgccaacatcgaccaggagacctaccgctgtgaactcattcaaggatggaacattactgtggacctggtcattggccctaaagggatccgccagctgactagtcaggacgcaaagcccacctgcctggccgagttcaagcagatcaggtccatcaggtgcctcccgctggaggagggccaggcagtacttcagctgggcattgaaggtgccccccaggccttgtccatcaaaacctcatccctagcagaggctgagaacatggctgacctcatagacggctactgccggctgcaggatggtgagaagcggaacagcctgccccagatccccatgctaaacctggaggcccggcggtcccacctctcagagagctgcagcatagagtcagacatctacgcagagattcccgacgaaaccctgcgaaggcccggaggtccacagtatggcattgcccgtgaagatgtggtcctgaatcgtattcttggggaagg

SEQ ID NO: 171535 - DNA, 539 bp, Homo sapiens
  Payload ID: 13730
  Gene Symbol: PTK2B
  Gene Name: protein tyrosine kinase 2 beta
  ENST ID: ENST00000522338
  CDS Start-End: 335-539
gggaacctcaggcccgcggatgggagaaaccagagatgccaacttcctgcttccgaagtagtggctgggtcttaaagcaccgaataggactagcaacttcatagacggttgtgaagacaagctagacggcagatgaaagttcttggcacagagtgaacacttgataaactatatggcagccacagcctccggagccgttgcacacctacctgcccggccgacttacctgtacttgccgccgtcccggctcacctggcggtgcccgaggagtagtcgctggagtccgcgcctccctgggactgcaatgtgccgatcttagctgctgcctgagaggatgtctggggtgtccgagcccctgagtcgagtaaagttgggcacgttacgccggcctgaaggccctgcagagcccatggtggtggtaccagtagatgtggaaaaggaggacgtgcgtatcctcaaggtctgcttctatagcaacagcttcaatcctgggaaaaacttcaaactggtcaaatgcactgtccagacggagatccggg

SEQ ID NO: 171536 - DNA, 554 bp, Homo sapiens
  Payload ID: 13730
  Gene Symbol: PTK2B
  Gene Name: protein tyrosine kinase 2 beta
  ENST ID: ENST00000521164
  CDS Start-End: 244-554
atttgcggccgggggaatggcagagatcgccccccaggtctgcccggcgctcagggaattggtggcagcgtctatttcagagtttatgccacagcctccggagccgttgcacacctacctgcccggccgacttacctgtacttgccgccgtcccggctcacctggcggtgcccgaggagtagtcgctggagtccgcgcctccctgggactgcaatgtgccgatcttagctgctgcctgagaggatgtctggggtgtccgagcccctgagtcgagtaaagttgggcacgttacgccggcctgaaggccctgcagagcccatggtggtggtaccagtagatgtggaaaaggaggacgtgcgtatcctcaaggtctgcttctatagcaacagcttcaatcctgggaaaaacttcaaactggtcaaatgcactgtccagacggagatccgggagatcatcacctccatcctgctgagcgggcggatcgggcccaacatccggttggctgagtgctatgggctgaggctgaagcacatgaagtccgatgagatccactg

SEQ ID NO: 171537 - DNA, 2401 bp, Homo sapiens
  Payload ID: 13731
  Gene Symbol: PTK6
  Gene Name: protein tyrosine kinase 6
  Uniprot ID: Q13882
  ENST ID: ENST00000217185
  CDS Start-End: 57-461
agctctgggtgctccagctgggccacagcctggtcctgccgctgcgcccgcccgccatggtgtcccgggaccaggctcacctgggccccaagtatgtgggcctctgggacttcaagtcccggacggacgaggagctgagcttccgcgcgggggacgtcttccacgtggccaggaaggaggagcagtggtggtgggccacgctgctggacgaggcgggtggggccgtggcccagggctatgtgccccacaactacctggccgagagggagacggtggagtcggaacctgcgggacacgcaggctgtgcggcactacaagatctggcggcgtgccgggggccggctgcacctgaacgaggcggtgtccttcctcagcctgcccgagcttgtgaactaccacagggcccagagcctgtcccacggcctgcggctggccgcgccctgccggaagcacgagcctgagcccctgccccattgggatgactgggagaggccgagggaggagttcacgctctgcaggaagctggggtccggctactttggggaggtcttcgaggggctctggaaagaccgggtccaggtggccattaaggtgatttctcgagacaacctcctgcaccagcagatgctgcagtcggagatccaggccatgaagaagctgcggcacaaacacatcctggcgctgtacgccgtggtgtccgtgggggaccccgtgtacatcatcacggagctcatggccaagggcagcctgctggagctgctccgcgactctgatgagaaagtcctgcccgtttcggagctgctggacatcgcctggcaggtggctgagggcatgtgttacctggagtcgcagaattacatccaccgggacctggccgccaggaacatcctcgtcggggaaaacaccctctgcaaagttggggacttcgggttagccaggcttatcaaggaggacgtctacctctcccatgaccacaatatcccctacaagtggacggcccctgaagcgctctcccgaggccattactccaccaaatccgacgtctggtcctttgggattctcctgcatgagatgttcagcaggggtcaggtgccctacccaggcatgtccaaccatgaggccttcctgagggtggacgccggctaccgcatgccctgccctctggagtgcccgcccagcgtgcacaagctgatgctgacatgctggtgcagggaccccgagcagagaccctgcttcaaggccctgcgggagaggctctccagcttcaccagctacgagaacccgacctgagctgctgtggagcgggcatggccgggccctgctgaggaggggcctgggcagagggcctggacctgggatcaaggcccacgcgcttccctggggtttactgaggtgatgggtgcaggaaaggttcacaaatgtggagtgtctgcgtccaatacacgcgtgtgctcctctccttactccatcgtgtgtgccttgggtctcagctgctgacacgcagcctgctctggagcctgcagatgagatccgggagactgacacgaagccagcagaggtcagaggggactctgaccacagcccgctctctggctgtctgtctgcagtgcccggctgagggtgggaggcaaacacgccttgttcctgctcttcccagttcagcttggtgggagaaagtcattcgcgtggctcgggacgctcatgtaaatttggttttggtgctcaagggttctttcctcccaggggcaggtgtttctttcctgtttgtcttgtgtcttgagagcttggccttatgaccagtgagaactctctccctggtctctgccagcccaagcatcactgcccgaggcgccagctcagtttcaccgtccacgtccacaaggggcttttcccaccttcacctttgtcgctgggtcagtgctggaaagcgcccctcactcctgcgctgacaagggcccttctctactgtctgtggggtggttccgggctgggggggctgcctcctttgcacctgattttgaaggtgtctctttcatccatggttaagtcataaaaagcttattggttttggttttgactcacctgaaagtttttttggtttaaaagaagaataggcggggcacggtggctcatgcctgtaatcccagcactttgggaggctgaggcaggtggatcacgaggtcaggagatcgacaccatcctggctaacacggtgaaaccccgtctctactaaaaaatacaaaaaattagctgggtgtggtggtgggggtgggcgcctgtagtcccagctacgtgggaggctgaggcagcagactggtgtgaacccgggaggtggagcttgcagtgagccgagatcgcgccactgcactccagcctgggcgacagagcgagactccatctc

SEQ ID NO: 171538 - DNA, 2931 bp, Homo sapiens
  Payload ID: 13731
  Gene Symbol: PTK6
  Gene Name: protein tyrosine kinase 6
  Uniprot ID: Q13882
  ENST ID: ENST00000542869
  CDS Start-End: 41-1396
gctgggccacagcctggtcctgccgctgcgcccgcccgccatggtgtcccgggaccaggctcacctgggccccaagtatgtgggcctctgggacttcaagtcccggacggacgaggagctgagcttccgcgcgggggacgtcttccacgtggccaggaaggaggagcagtggtggtgggccacgctgctggacgaggcgggtggggccgtggcccagggctatgtgccccacaactacctggccgagagggagacggtggagtcggaaccgtggttctttggctgcatctcccgctcggaagctgtgcgtcggctgcaggccgagggcaacgccacgggcgccttcctgatcagggtcagcgagaagccgagtgccgactacgtcctgtcggtgcgggacacgcaggctgtgcggcactacaagatctggcggcgtgccgggggccggctgcacctgaacgaggcggtgtccttcctcagcctgcccgagcttgtgaactaccacagggcccagagcctgtcccacggcctgcggctggccgcgccctgccggaagcacgagcctgagcccctgccccattgggatgactgggagaggccgagggaggagttcacgctctgcaggaagctggggtccggctactttggggaggtcttcgaggggctctggaaagaccgggtccaggtggccattaaggtgatttctcgagacaacctcctgcaccagcagatgctgcagtcggagatccaggccatgaagaagctgcggcacaaacacatcctggcgctgtacgccgtggtgtccgtgggggaccccgtgtacatcatcacggagctcatggccaagggcagcctgctggagctgctccgcgactctgatgagaaagtcctgcccgtttcggagctgctggacatcgcctggcaggtggctgagggcatgtgttacctggagtcgcagaattacatccaccgggacctggccgccaggaacatcctcgtcggggaaaacaccctctgcaaagttggggacttcgggttagccaggcttatcaaggaggacgtctacctctcccatgaccacaatatcccctacaagtggacggcccctgaagcgctctcccgaggccattactccaccaaatccgacgtctggtcctttgggattctcctgcatgagatgttcagcaggggtcaggtgccctacccaggcatgtccaaccatgaggccttcctgagggtggacgccggctaccgcatgccctgccctctggagtgcccgcccagcgtgcacaagctgatgctgacatgctggtgcagggaccccgagcagagaccctgcttcaaggccctgcgggagaggctctccagcttcaccagctacgagaacccgacctgagctgctgtggagcgggcatggccgggccctgctgaggaggggcctgggcagagggcctggacctgggatcaaggcccacgcgcttccctggggtttactgaggtgatgggtgcaggaaaggttcacaaatgtggagtgtctgcgtccaatacacgcgtgtgctcctctccttactccatcgtgtgtgccttgggtctcagctgctgacacgcagcctgctctggagcctgcagatgagatccgggagactgacacgaagccagcagaggtcagaggggactctgaccacagcccgctctctggctgtctgtctgcagtgcccggctgagggtgggaggcaaacacgccttgttcctgctcttcccagttcagcttggtgggagaaagtcattcgcgtggctcgggacgctcatgtaaatttggttttggtgctcaagggttctttcctcccaggggcaggtgtttctttcctgtttgtcttgtgtcttgagagcttggccttatgaccagtgagaactctctccctggtctctgccagcccaagcatcactgcccgaggcgccagctcagtttcaccgtccacgtccacaaggggcttttcccaccttcacctttgtcgctgggtcagtgctggaaagcgcccctcactcctgcgctgacaagggcccttctctactgtctgtggggtggttccgggctgggggggctgcctcctttgcacctgattttgaaggtgtctctttcatccatggttaagtcataaaaagcttattggttttggttttgactcacctgaaagtttttttggtttaaaagaagaataggcggggcacggtggctcatgcctgtaatcccagcactttgggaggctgaggcaggtggatcacgaggtcaggagatcgacaccatcctggctaacacggtgaaaccccgtctctactaaaaaatacaaaaaattagctgggtgtggtggtgggggtgggcgcctgtagtcccagctacgtgggaggctgaggcagcagactggtgtgaacccgggaggtggagcttgcagtgagccgagatcgcgccactgcactccagcctgggcgacagagcgagactccatctcaaaaaaaaaaaaaaaaaaaagaaagaaagaaaaataattttgggagtttctggaaaggtactaggatttctcaaaaggatttgtcttctgccttgtgaaagacagatgtcagactaatcaggcttatccgatgtgctacatgagatggaaagcgtgtgaaatagtaagtcacactaagtcttctggaggttctatttacgggtttggttttgatatgaatgttgcagaaactctataaaattcctagaaatctgatacgttatcctatgatatatatcctatctcacatgctattcctagaaatctggtgcaatgttatcagtcataattttggttattacattaaaatgctgcatgccacagaaataaccaagtttccttgccaaccgtgtcacgaatataataaactctcatcagatcctga

SEQ ID NO: 171539 - DNA, 3958 bp, Homo sapiens
  Payload ID: 13732
  Gene Symbol: PTK7
  Gene Name: protein tyrosine kinase 7 (inactive)
  Uniprot ID: Q13308
  ENST ID: ENST00000230418
  CDS Start-End: 148-2598
cgcctcgggacgcctcggggtcgggctccggctgcggctgctgctgcggcgcccgcgctccggtgcgctccgcctcctgtgcccgccgcggagcgcagtctgcgcgcccgccgtgcgccctcagctccttttcctgagcccgccgcgatgggagctgcgcggggatccccggccagaccccgccggttgcctctgctcagcgtcctgctgctgccgctgctgggcggtacccagacagccattgtcttcatcaagcagccgtcctcccaggatgcactgcaggggcgccgggcgctgcttcgctgtgaggttgaggctccgggcccggtacatgtgtactggctgctcgatggggcccctgtccaggacacggagcggcgtttcgcccagggcagcagcctgagctttgcagctgtggaccggctgcaggactctggcaccttccagtgtgtggctcgggatgatgtcactggagaagaagcccgcagtgccaacgcctccttcaacatcaaatggattgaggcaggtcctgtggtcctgaagcatccagcctcggaagctgagatccagccacagacccaggtcacacttcgttgccacattgatgggcaccctcggcccacctaccaatggttccgagatgggacccccctttctgatggtcagagcaaccacacagtcagcagcaaggagcggaacctgacgctccggccagctggtcctgagcatagtgggctgtattcctgctgcgcccacagtgcttttggccaggcttgcagcagccagaacttcaccttgagcattgctgatgaaagctttgccagggtggtgctggcaccccaggacgtggtagtagcgaggtatgaggaggccatgttccattgccagttctcagcccagccacccccgagcctgcagtggctctttgaggatgagactcccatcactaaccgcagtcgccccccacacctccgcagagccacagtgtttgccaacgggtctctgctgctgacccaggtccggccacgcaatgcagggatctaccgctgcattggccaggggcagaggggcccacccatcatcctggaagccacacttcacctagcagagattgaagacatgccgctatttgagccacgggtgtttacagctggcagcgaggagcgtgtgacctgccttccccccaagggtctgccagagcccagcgtgtggtgggagcacgcgggagtccggctgcccacccatggcagggtctaccagaagggccacgagctggtgttggccaatattgctgaaagtgatgctggtgtctacacctgccacgcggccaacctggctggtcagcggagacaggatgtcaacatcactgtggccactgtgccctcctggctgaagaagccccaagacagccagctggaggagggcaaacccggctacttggattgcctgacccaggccacaccaaaacctacagttgtctggtacagaaaccagatgctcatctcagaggactcacggttcgaggtcttcaagaatgggaccttgcgcatcaacagcgtggaggtgtatgatgggacatggtaccgttgtatgagcagcaccccagccggcagcatcgaggcgcaagcccgtgtccaagtgctggaaaagctcaagttcacaccaccaccccagccacagcagtgcatggagtttgacaaggaggccacggtgccctgttcagccacaggccgagagaagcccactattaagtgggaacgggcagatgggagcagcctcccagagtgggtgacagacaacgctgggaccctgcattttgcccgggtgactcgagatgacgctggcaactacacttgcattgcctccaacgggccgcagggccagattcgtgcccatgtccagctcactgtggcagtttttatcaccttcaaagtggaaccagagcgtacgactgtgtaccagggccacacagccctactgcagtgcgaggcccagggggaccccaagccgctgattcagtggaaaggcaaggaccgcatcctggaccccaccaagctgggacccaggatgcacatcttccagaatggctccctggtgatccatgacgtggcccctgaggactcaggccgctacacctgcattgcaggcaacagctgcaacatcaagcacacggaggcccccctctatgtcgtggacaagcctgtgccggaggagtcggagggccctggcagccctcccccctacaagatgatccagaccattgggttgtcggtgggtgccgctgtggcctacatcattgccgtgctgggcctcatgttctactgcaagaagcgctgcaaagccaagcggctgcagaagcagcccgagggcgaggagccagagatggaatgcctcaacggtgggcctttgcagaacgggcagccctcagcagagatccaagaagaagtggccttgaccagcttgggctccggccccgcggccaccaacaaacgccacagcacaagtgataagatgcacttcccacggtctagcctgcagcccatcaccacgctggggagacctcaagcagttcctgaggatttccaagagcaaggatgaaaaattgaagtcacagcccctcagcaccaagcagaaggtggccctatgcacccaggtagccctgggcatggagcacctgtccaacaaccgctttgtgcataaggacttggctgcgcgtaactgcctggtcagtgcccagagacaagtgaaggtgtctgccctgggcctcagcaaggatgtgtacaacagtgagtactaccacttccgccaggcctgggtgccgctgcgctggatgtcccccgaggccatcctggagggtgacttctctaccaagtctgatgtctgggccttcggtgtgctgatgtgggaagtgtttacacatggagagatgccccatggtgggcaggcagatgatgaagtactggcagatttgcaggctgggaaggctagacttcctcagcccgagggctgcccttccaaactctatcggctgatgcagcgctgctgggccctcagccccaaggaccggccctccttcagtgagattgccagcgccctgggagacagcaccgtggacagcaagccgtgaggagggagcccgctcaggatggcctgggcaggggaggacatctctagagggaagctcacagcatgatgggcaagatccctgtcctcctgggccctgaggcccctgccctagtgcaacaggcattgctgaggtctgagcagggcctggcctttcctcctcttcctcaccctcatcctttgggaggctgacttggacccaaactgggcgactagggctttgagctgggcagttttccctgccacctcttcctctatcagggacagtgtgggtgccacaggtaaccccaatttctggccttcaacttctccccttgaccgggtccaactctgccactcatctgccaactttgcctggggagggctaggcttgggatgagctgggtttgtggggagttccttaatattctcaagttctgggcacacagggttaatgagtctcttggcccactggtcccacttgggggtctagaccaggattatagaggacacagcaagtgagtcctccccactctgggcttgtgcacactgacccagacccacgtcttccccacccttctctcctttcctcatcctaagtgcctggcagatgaaggagttttcaggagcttttgacactatataaaccgccctttttgtatgcaccacgggcggcttttatatgtaattgcagcgtggggtgggtgggcatgggaggtaggggtgggccctggagatgaggagggtgggccatccttaccccacacttttattgttgtcgttttttgtttgttttgtttttttgtttttgtttttgtttttacactcgctgctctcaataaataagcctttttta

SEQ ID NO: 171540 - DNA, 4272 bp, Homo sapiens
  Payload ID: 13732
  Gene Symbol: PTK7
  Gene Name: protein tyrosine kinase 7 (inactive)
  Uniprot ID: Q13308
  ENST ID: ENST00000230419
  CDS Start-End: 222-3434
ggcggggcttggcggcggcggcggcggcgcgcggggactcggaggtactgggcgcgcgcggctccggctcgggacgcctcgggacgcctcggggtcgggctccggctgcggctgctgctgcggcgcccgcgctccggtgcgctccgcctcctgtgcccgccgcggagcgcagtctgcgcgcccgccgtgcgccctcagctccttttcctgagcccgccgcgatgggagctgcgcggggatccccggccagaccccgccggttgcctctgctcagcgtcctgctgctgccgctgctgggcggtacccagacagccattgtcttcatcaagcagccgtcctcccaggatgcactgcaggggcgccgggcgctgcttcgctgtgaggttgaggctccgggcccggtacatgtgtactggctgctcgatggggcccctgtccaggacacggagcggcgtttcgcccagggcagcagcctgagctttgcagctgtggaccggctgcaggactctggcaccttccagtgtgtggctcgggatgatgtcactggagaagaagcccgcagtgccaacgcctccttcaacatcaaatggattgaggcaggtcctgtggtcctgaagcatccagcctcggaagctgagatccagccacagacccaggtcacacttcgttgccacattgatgggcaccctcggcccacctaccaatggttccgagatgggacccccctttctgatggtcagagcaaccacacagtcagcagcaaggagcggaacctgacgctccggccagctggtcctgagcatagtgggctgtattcctgctgcgcccacagtgcttttggccaggcttgcagcagccagaacttcaccttgagcattgctgatgaaagctttgccagggtggtgctggcaccccaggacgtggtagtagcgaggtatgaggaggccatgttccattgccagttctcagcccagccacccccgagcctgcagtggctctttgaggatgagactcccatcactaaccgcagtcgccccccacacctccgcagagccacagtgtttgccaacgggtctctgctgctgacccaggtccggccacgcaatgcagggatctaccgctgcattggccaggggcagaggggcccacccatcatcctggaagccacacttcacctagcagagattgaagacatgccgctatttgagccacgggtgtttacagctggcagcgaggagcgtgtgacctgccttccccccaagggtctgccagagcccagcgtgtggtgggagcacgcgggagtccggctgcccacccatggcagggtctaccagaagggccacgagctggtgttggccaatattgctgaaagtgatgctggtgtctacacctgccacgcggccaacctggctggtcagcggagacaggatgtcaacatcactgtggccactgtgccctcctggctgaagaagccccaagacagccagctggaggagggcaaacccggctacttggattgcctgacccaggccacaccaaaacctacagttgtctggtacagaaaccagatgctcatctcagaggactcacggttcgaggtcttcaagaatgggaccttgcgcatcaacagcgtggaggtgtatgatgggacatggtaccgttgtatgagcagcaccccagccggcagcatcgaggcgcaagcccgtgtccaagtgctggaaaagctcaagttcacaccaccaccccagccacagcagtgcatggagtttgacaaggaggccacggtgccctgttcagccacaggccgagagaagcccactattaagtgggaacgggcagatgggagcagcctcccagagtgggtgacagacaacgctgggaccctgcattttgcccgggtgactcgagatgacgctggcaactacacttgcattgcctccaacgggccgcagggccagattcgtgcccatgtccagctcactgtggcagtttttatcaccttcaaagtggaaccagagcgtacgactgtgtaccagggccacacagccctactgcagtgcgaggcccagggggaccccaagccgctgattcagtggaaaggcaaggaccgcatcctggaccccaccaagctgggacccaggatgcacatcttccagaatggctccctggtgatccatgacgtggcccctgaggactcaggccgctacacctgcattgcaggcaacagctgcaacatcaagcacacggaggcccccctctatgtcgtggacaagcctgtgccggaggagtcggagggccctggcagccctcccccctacaagatgatccagaccattgggttgtcggtgggtgccgctgtggcctacatcattgccgtgctgggcctcatgttctactgcaagaagcgctgcaaagccaagcggctgcagaagcagcccgagggcgaggagccagagatggaatgcctcaacggtgggcctttgcagaacgggcagccctcagcagagatccaagaagaagtggccttgaccagcttgggctccggccccgcggccaccaacaaacgccacagcacaagtgataagatgcacttcccacggtctagcctgcagcccatcaccacgctggggaagagtgagtttggggaggtgttcctggcaaaggctcagggcttggaggagggagtggcagagaccctggtacttgtgaagagcctgcagagcaaggatgagcagcagcagctggacttccggagggagttggagatgtttgggaagctgaaccacgccaacgtggtgcggctcctggggctgtgccgggaggctgagccccactacatggtgctggaatatgtggatctgggagacctcaagcagttcctgaggatttccaagagcaaggatgaaaaattgaagtcacagcccctcagcaccaagcagaaggtggccctatgcacccaggtagccctgggcatggagcacctgtccaacaaccgctttgtgcataaggacttggctgcgcgtaactgcctggtcagtgcccagagacaagtgaaggtgtctgccctgggcctcagcaaggatgtgtacaacagtgagtactaccacttccgccaggcctgggtgccgctgcgctggatgtcccccgaggccatcctggagggtgacttctctaccaagtctgatgtctgggccttcggtgtgctgatgtgggaagtgtttacacatggagagatgccccatggtgggcaggcagatgatgaagtactggcagatttgcaggctgggaaggctagacttcctcagcccgagggctgcccttccaaactctatcggctgatgcagcgctgctgggccctcagccccaaggaccggccctccttcagtgagattgccagcgccctgggagacagcaccgtggacagcaagccgtgaggagggagcccgctcaggatggcctgggcaggggaggacatctctagagggaagctcacagcatgatgggcaagatccctgtcctcctgggccctgaggcccctgccctagtgcaacaggcattgctgaggtctgagcagggcctggcctttcctcctcttcctcaccctcatcctttgggaggctgacttggacccaaactgggcgactagggctttgagctgggcagttttccctgccacctcttcctctatcagggacagtgtgggtgccacaggtaaccccaatttctggccttcaacttctccccttgaccgggtccaactctgccactcatctgccaactttgcctggggagggctaggcttgggatgagctgggtttgtggggagttccttaatattctcaagttctgggcacacagggttaatgagtctcttggcccactggtcccacttgggggtctagaccaggattatagaggacacagcaagtgagtcctccccactctgggcttgtgcacactgacccagacccacgtcttccccacccttctctcctttcctcatcctaagtgcctggcagatgaaggagttttcaggagcttttgacactatataaaccgccctttttgtatgcaccacgggcggcttttatatgtaattgcagcgtggggtgggtgggcatgggaggtaggggtgggccctggagatgaggagggtgggccatccttaccccacacttttattgttgtcgttttttgtttgttttgtttttttgtttttgtttttgtttttacactcgctgctctcaataaataagccttttttacaacctg

SEQ ID NO: 171541 - DNA, 3801 bp, Homo sapiens
  Payload ID: 13732
  Gene Symbol: PTK7
  Gene Name: protein tyrosine kinase 7 (inactive)
  Uniprot ID: Q13308
  ENST ID: ENST00000349241
  CDS Start-End: 148-2970
cgcctcgggacgcctcggggtcgggctccggctgcggctgctgctgcggcgcccgcgctccggtgcgctccgcctcctgtgcccgccgcggagcgcagtctgcgcgcccgccgtgcgccctcagctccttttcctgagcccgccgcgatgggagctgcgcggggatccccggccagaccccgccggttgcctctgctcagcgtcctgctgctgccgctgctgggcggtacccagacagccattgtcttcatcaagcagccgtcctcccaggatgcactgcaggggcgccgggcgctgcttcgctgtgaggttgaggctccgggcccggtacatgtgtactggctgctcgatggggcccctgtccaggacacggagcggcgtttcgcccagggcagcagcctgagctttgcagctgtggaccggctgcaggactctggcaccttccagtgtgtggctcgggatgatgtcactggagaagaagcccgcagtgccaacgcctccttcaacatcaaatggattgaggcaggtcctgtggtcctgaagcatccagcctcggaagctgagatccagccacagacccaggtcacacttcgttgccacattgatgggcaccctcggcccacctaccaatggttccgagatgggacccccctttctgatggtcagagcaaccacacagtcagcagcaaggagcggaacctgacgctccggccagctggtcctgagcatagtgggctgtattcctgctgcgcccacagtgcttttggccaggcttgcagcagccagaacttcaccttgagcattgctgatgaaagctttgccagggtggtgctggcaccccaggacgtggtagtagcgaggtatgaggaggccatgttccattgccagttctcagcccagccacccccgagcctgcagtggctctttgaggatgagactcccatcactaaccgcagtcgccccccacacctccgcagagccacagtgtttgccaacgggtctctgctgctgacccaggtccggccacgcaatgcagggatctaccgctgcattggccaggggcagaggggcccacccatcatcctggaagccacacttcacctagcagagattgaagacatgccgctatttgagccacgggtgtttacagctggcagcgaggagcgtgtgacctgccttccccccaagggtctgccagagcccagcgtgtggtgggagcacgcgggagtccggctgcccacccatggcagggtctaccagaagggccacgagctggtgttggccaatattgctgaaagtgatgctggtgtctacacctgccacgcggccaacctggctggtcagcggagacaggatgtcaacatcactgtggccaatgggagcagcctcccagagtgggtgacagacaacgctgggaccctgcattttgcccgggtgactcgagatgacgctggcaactacacttgcattgcctccaacgggccgcagggccagattcgtgcccatgtccagctcactgtggcagtttttatcaccttcaaagtggaaccagagcgtacgactgtgtaccagggccacacagccctactgcagtgcgaggcccagggggaccccaagccgctgattcagtggaaaggcaaggaccgcatcctggaccccaccaagctgggacccaggatgcacatcttccagaatggctccctggtgatccatgacgtggcccctgaggactcaggccgctacacctgcattgcaggcaacagctgcaacatcaagcacacggaggcccccctctatgtcgtggacaagcctgtgccggaggagtcggagggccctggcagccctcccccctacaagatgatccagaccattgggttgtcggtgggtgccgctgtggcctacatcattgccgtgctgggcctcatgttctactgcaagaagcgctgcaaagccaagcggctgcagaagcagcccgagggcgaggagccagagatggaatgcctcaacggtgggcctttgcagaacgggcagccctcagcagagatccaagaagaagtggccttgaccagcttgggctccggccccgcggccaccaacaaacgccacagcacaagtgataagatgcacttcccacggtctagcctgcagcccatcaccacgctggggaagagtgagtttggggaggtgttcctggcaaaggctcagggcttggaggagggagtggcagagaccctggtacttgtgaagagcctgcagagcaaggatgagcagcagcagctggacttccggagggagttggagatgtttgggaagctgaaccacgccaacgtggtgcggctcctggggctgtgccgggaggctgagccccactacatggtgctggaatatgtggatctgggagacctcaagcagttcctgaggatttccaagagcaaggatgaaaaattgaagtcacagcccctcagcaccaagcagaaggtggccctatgcacccaggtagccctgggcatggagcacctgtccaacaaccgctttgtgcataaggacttggctgcgcgtaactgcctggtcagtgcccagagacaagtgaaggtgtctgccctgggcctcagcaaggatgtgtacaacagtgagtactaccacttccgccaggcctgggtgccgctgcgctggatgtcccccgaggccatcctggagggtgacttctctaccaagtctgatgtctgggccttcggtgtgctgatgtgggaagtgtttacacatggagagatgccccatggtgggcaggcagatgatgaagtactggcagatttgcaggctgggaaggctagacttcctcagcccgagggctgcccttccaaactctatcggctgatgcagcgctgctgggccctcagccccaaggaccggccctccttcagtgagattgccagcgccctgggagacagcaccgtggacagcaagccgtgaggagggagcccgctcaggatggcctgggcaggggaggacatctctagagggaagctcacagcatgatgggcaagatccctgtcctcctgggccctgaggcccctgccctagtgcaacaggcattgctgaggtctgagcagggcctggcctttcctcctcttcctcaccctcatcctttgggaggctgacttggacccaaactgggcgactagggctttgagctgggcagttttccctgccacctcttcctctatcagggacagtgtgggtgccacaggtaaccccaatttctggccttcaacttctccccttgaccgggtccaactctgccactcatctgccaactttgcctggggagggctaggcttgggatgagctgggtttgtggggagttccttaatattctcaagttctgggcacacagggttaatgagtctcttggcccactggtcccacttgggggtctagaccaggattatagaggacacagcaagtgagtcctccccactctgggcttgtgcacactgacccagacccacgtcttccccacccttctctcctttcctcatcctaagtgcctggcagatgaaggagttttcaggagcttttgacactatataaaccgccctttttgtatgcaccacgggcggcttttatatgtaattgcagcgtggggtgggtgggcatgggaggtaggggtgggccctggagatgaggagggtgggccatccttaccccacacttttattgttgtcgttttttgtttgttttgtttttttgtttttgtttttgtttttacactcgctgctctcaataaataagcctttttta

SEQ ID NO: 171542 - DNA, 4071 bp, Homo sapiens
  Payload ID: 13732
  Gene Symbol: PTK7
  Gene Name: protein tyrosine kinase 7 (inactive)
  Uniprot ID: Q13308
  ENST ID: ENST00000345201
  CDS Start-End: 148-3240
cgcctcgggacgcctcggggtcgggctccggctgcggctgctgctgcggcgcccgcgctccggtgcgctccgcctcctgtgcccgccgcggagcgcagtctgcgcgcccgccgtgcgccctcagctccttttcctgagcccgccgcgatgggagctgcgcggggatccccggccagaccccgccggttgcctctgctcagcgtcctgctgctgccgctgctgggcggtacccagacagccattgtcttcatcaagcagccgtcctcccaggatgcactgcaggggcgccgggcgctgcttcgctgtgaggttgaggctccgggcccggtacatgtgtactggctgctcgatggggcccctgtccaggacacggagcggcgtttcgcccagggcagcagcctgagctttgcagctgtggaccggctgcaggactctggcaccttccagtgtgtggctcgggatgatgtcactggagaagaagcccgcagtgccaacgcctccttcaacatcaaatggattgaggcaggtcctgtggtcctgaagcatccagcctcggaagctgagatccagccacagacccaggtcacacttcgttgccacattgatgggcaccctcggcccacctaccaatggttccgagatgggacccccctttctgatggtcagagcaaccacacagtcagcagcaaggagcggaacctgacgctccggccagctggtcctgagcatagtgggctgtattcctgctgcgcccacagtgcttttggccaggcttgcagcagccagaacttcaccttgagcattgctgatgaaagctttgccagggtggtgctggcaccccaggacgtggtagtagcgaggtatgaggaggccatgttccattgccagttctcagcccagccacccccgagcctgcagtggctctttgaggatgagactcccatcactaaccgcagtcgccccccacacctccgcagagccacagtgtttgccaacgggtctctgctgctgacccaggtccggccacgcaatgcagggatctaccgctgcattggccaggggcagaggggcccacccatcatcctggaagccacacttcacctagcagagattgaagacatgccgctatttgagccacgggtgtttacagctggcagcgaggagcgtgtgacctgccttccccccaagggtctgccagagcccagcgtgtggtgggagcacgcgggagtccggctgcccacccatggcagggtctaccagaagggccacgagctggtgttggccaatattgctgaaagtgatgctggtgtctacacctgccacgcggccaacctggctggtcagcggagacaggatgtcaacatcactgtggccactgtgccctcctggctgaagaagccccaagacagccagctggaggagggcaaacccggctacttggattgcctgacccaggccacaccaaaacctacagttgtctggtacagaaaccagatgctcatctcagaggactcacggttcgaggtcttcaagaatgggaccttgcgcatcaacagcgtggaggtgtatgatgggacatggtaccgttgtatgagcagcaccccagccggcagcatcgaggcgcaagcccgtgtccaagtgctggatgggagcagcctcccagagtgggtgacagacaacgctgggaccctgcattttgcccgggtgactcgagatgacgctggcaactacacttgcattgcctccaacgggccgcagggccagattcgtgcccatgtccagctcactgtggcagtttttatcaccttcaaagtggaaccagagcgtacgactgtgtaccagggccacacagccctactgcagtgcgaggcccagggggaccccaagccgctgattcagtggaaaggcaaggaccgcatcctggaccccaccaagctgggacccaggatgcacatcttccagaatggctccctggtgatccatgacgtggcccctgaggactcaggccgctacacctgcattgcaggcaacagctgcaacatcaagcacacggaggcccccctctatgtcgtggacaagcctgtgccggaggagtcggagggccctggcagccctcccccctacaagatgatccagaccattgggttgtcggtgggtgccgctgtggcctacatcattgccgtgctgggcctcatgttctactgcaagaagcgctgcaaagccaagcggctgcagaagcagcccgagggcgaggagccagagatggaatgcctcaacggtgggcctttgcagaacgggcagccctcagcagagatccaagaagaagtggccttgaccagcttgggctccggccccgcggccaccaacaaacgccacagcacaagtgataagatgcacttcccacggtctagcctgcagcccatcaccacgctggggaagagtgagtttggggaggtgttcctggcaaaggctcagggcttggaggagggagtggcagagaccctggtacttgtgaagagcctgcagagcaaggatgagcagcagcagctggacttccggagggagttggagatgtttgggaagctgaaccacgccaacgtggtgcggctcctggggctgtgccgggaggctgagccccactacatggtgctggaatatgtggatctgggagacctcaagcagttcctgaggatttccaagagcaaggatgaaaaattgaagtcacagcccctcagcaccaagcagaaggtggccctatgcacccaggtagccctgggcatggagcacctgtccaacaaccgctttgtgcataaggacttggctgcgcgtaactgcctggtcagtgcccagagacaagtgaaggtgtctgccctgggcctcagcaaggatgtgtacaacagtgagtactaccacttccgccaggcctgggtgccgctgcgctggatgtcccccgaggccatcctggagggtgacttctctaccaagtctgatgtctgggccttcggtgtgctgatgtgggaagtgtttacacatggagagatgccccatggtgggcaggcagatgatgaagtactggcagatttgcaggctgggaaggctagacttcctcagcccgagggctgcccttccaaactctatcggctgatgcagcgctgctgggccctcagccccaaggaccggccctccttcagtgagattgccagcgccctgggagacagcaccgtggacagcaagccgtgaggagggagcccgctcaggatggcctgggcaggggaggacatctctagagggaagctcacagcatgatgggcaagatccctgtcctcctgggccctgaggcccctgccctagtgcaacaggcattgctgaggtctgagcagggcctggcctttcctcctcttcctcaccctcatcctttgggaggctgacttggacccaaactgggcgactagggctttgagctgggcagttttccctgccacctcttcctctatcagggacagtgtgggtgccacaggtaaccccaatttctggccttcaacttctccccttgaccgggtccaactctgccactcatctgccaactttgcctggggagggctaggcttgggatgagctgggtttgtggggagttccttaatattctcaagttctgggcacacagggttaatgagtctcttggcccactggtcccacttgggggtctagaccaggattatagaggacacagcaagtgagtcctccccactctgggcttgtgcacactgacccagacccacgtcttccccacccttctctcctttcctcatcctaagtgcctggcagatgaaggagttttcaggagcttttgacactatataaaccgccctttttgtatgcaccacgggcggcttttatatgtaattgcagcgtggggtgggtgggcatgggaggtaggggtgggccctggagatgaggagggtgggccatccttaccccacacttttattgttgtcgttttttgtttgttttgtttttttgtttttgtttttgtttttacactcgctgctctcaataaataagcctttttta

SEQ ID NO: 171543 - DNA, 4023 bp, Homo sapiens
  Payload ID: 13732
  Gene Symbol: PTK7
  Gene Name: protein tyrosine kinase 7 (inactive)
  Uniprot ID: Q13308
  ENST ID: ENST00000352931
  CDS Start-End: 148-3192
cgcctcgggacgcctcggggtcgggctccggctgcggctgctgctgcggcgcccgcgctccggtgcgctccgcctcctgtgcccgccgcggagcgcagtctgcgcgcccgccgtgcgccctcagctccttttcctgagcccgccgcgatgggagctgcgcggggatccccggccagaccccgccggttgcctctgctcagcgtcctgctgctgccgctgctgggcggtacccagacagccattgtcttcatcaagcagccgtcctcccaggatgcactgcaggggcgccgggcgctgcttcgctgtgaggttgaggctccgggcccggtacatgtgtactggctgctcgatggggcccctgtccaggacacggagcggcgtttcgcccagggcagcagcctgagctttgcagctgtggaccggctgcaggactctggcaccttccagtgtgtggctcgggatgatgtcactggagaagaagcccgcagtgccaacgcctccttcaacatcaaatggattgaggcaggtcctgtggtcctgaagcatccagcctcggaagctgagatccagccacagacccaggtcacacttcgttgccacattgatgggcaccctcggcccacctaccaatggttccgagatgggacccccctttctgatggtcagagcaaccacacagtcagcagcaaggagcggaacctgacgctccggccagctggtcctgagcatagtgggctgtattcctgctgcgcccacagtgcttttggccaggcttgcagcagccagaacttcaccttgagcattgctgatgaaagctttgccagggtggtgctggcaccccaggacgtggtagtagcgaggtatgaggaggccatgttccattgccagttctcagcccagccacccccgagcctgcagtggctctttgaggatgagactcccatcactaaccgcagtcgccccccacacctccgcagagccacagtgtttgccaacgggtctctgctgctgacccaggtccggccacgcaatgcagggatctaccgctgcattggccaggggcagaggggcccacccatcatcctggaagccacacttcacctagcagagattgaagacatgccgctatttgagccacgggtgtttacagctggcagcgaggagcgtgtgacctgccttccccccaagggtctgccagagcccagcgtgtggtgggagcacgcgggagtccggctgcccacccatggcagggtctaccagaagggccacgagctggtgttggccaatattgctgaaagtgatgctggtgtctacacctgccacgcggccaacctggctggtcagcggagacaggatgtcaacatcactgtggccactgtgccctcctggctgaagaagccccaagacagccagctggaggagggcaaacccggctacttggattgcctgacccaggccacaccaaaacctacagttgtctggtacagaaaccagatgctcatctcagaggactcacggttcgaggtcttcaagaatgggaccttgcgcatcaacagcgtggaggtgtatgatgggacatggtaccgttgtatgagcagcaccccagccggcagcatcgaggcgcaagcccgtgtccaagtgctggaaaagctcaagttcacaccaccaccccagccacagcagtgcatggagtttgacaaggaggccacggtgccctgttcagccacaggccgagagaagcccactattaagtgggaacgggcagatgggagcagcctcccagagtgggtgacagacaacgctgggaccctgcattttgcccgggtgactcgagatgacgctggcaactacacttgcattgcctccaacgggccgcagggccagattcgtgcccatgtccagctcactgtggcagtttttatcaccttcaaagtggaaccagagcgtacgactgtgtaccagggccacacagccctactgcagtgcgaggcccagggggaccccaagccgctgattcagtggaaagacaagcctgtgccggaggagtcggagggccctggcagccctcccccctacaagatgatccagaccattgggttgtcggtgggtgccgctgtggcctacatcattgccgtgctgggcctcatgttctactgcaagaagcgctgcaaagccaagcggctgcagaagcagcccgagggcgaggagccagagatggaatgcctcaacggtgggcctttgcagaacgggcagccctcagcagagatccaagaagaagtggccttgaccagcttgggctccggccccgcggccaccaacaaacgccacagcacaagtgataagatgcacttcccacggtctagcctgcagcccatcaccacgctggggaagagtgagtttggggaggtgttcctggcaaaggctcagggcttggaggagggagtggcagagaccctggtacttgtgaagagcctgcagagcaaggatgagcagcagcagctggacttccggagggagttggagatgtttgggaagctgaaccacgccaacgtggtgcggctcctggggctgtgccgggaggctgagccccactacatggtgctggaatatgtggatctgggagacctcaagcagttcctgaggatttccaagagcaaggatgaaaaattgaagtcacagcccctcagcaccaagcagaaggtggccctatgcacccaggtagccctgggcatggagcacctgtccaacaaccgctttgtgcataaggacttggctgcgcgtaactgcctggtcagtgcccagagacaagtgaaggtgtctgccctgggcctcagcaaggatgtgtacaacagtgagtactaccacttccgccaggcctgggtgccgctgcgctggatgtcccccgaggccatcctggagggtgacttctctaccaagtctgatgtctgggccttcggtgtgctgatgtgggaagtgtttacacatggagagatgccccatggtgggcaggcagatgatgaagtactggcagatttgcaggctgggaaggctagacttcctcagcccgagggctgcccttccaaactctatcggctgatgcagcgctgctgggccctcagccccaaggaccggccctccttcagtgagattgccagcgccctgggagacagcaccgtggacagcaagccgtgaggagggagcccgctcaggatggcctgggcaggggaggacatctctagagggaagctcacagcatgatgggcaagatccctgtcctcctgggccctgaggcccctgccctagtgcaacaggcattgctgaggtctgagcagggcctggcctttcctcctcttcctcaccctcatcctttgggaggctgacttggacccaaactgggcgactagggctttgagctgggcagttttccctgccacctcttcctctatcagggacagtgtgggtgccacaggtaaccccaatttctggccttcaacttctccccttgaccgggtccaactctgccactcatctgccaactttgcctggggagggctaggcttgggatgagctgggtttgtggggagttccttaatattctcaagttctgggcacacagggttaatgagtctcttggcccactggtcccacttgggggtctagaccaggattatagaggacacagcaagtgagtcctccccactctgggcttgtgcacactgacccagacccacgtcttccccacccttctctcctttcctcatcctaagtgcctggcagatgaaggagttttcaggagcttttgacactatataaaccgccctttttgtatgcaccacgggcggcttttatatgtaattgcagcgtggggtgggtgggcatgggaggtaggggtgggccctggagatgaggagggtgggccatccttaccccacacttttattgttgtcgttttttgtttgttttgtttttttgtttttgtttttgtttttacactcgctgctctcaataaataagcctttttta

SEQ ID NO: 171544 - DNA, 902 bp, Homo sapiens
  Payload ID: 13732
  Gene Symbol: PTK7
  Gene Name: protein tyrosine kinase 7 (inactive)
  ENST ID: ENST00000476760
  CDS Start-End: 183-602
cggaggtactgggcgcgcgcggctccggctcgggacgcctcgggacgcctcggggtcgggctccggctgcggctgctgctgcggcgcccgcgctccggtgcgctccgcctcctgtgcccgccgcggagcgcagtctgcgcgcccgccgtgcgccctcagctccttttcctgagcccgccgcgatgggagctgcgcggggatccccggccagaccccgccggttgcctctgctcagcgtcctgctgctgccgctgctgggcggtacccagacagccattgtcttcatcaagcagccgtcctcccaggatgcactgcaggggcgccgggcgctgcttcgctgtgaggttgaggctccgggcccggtacatgtgtactggctgctcgatggggcccctgtccaggacacggagcggcgtttcgcccagggcagcagcctgagctttgcagctgtggaccggctgcaggactctggcaccttccagtgtgtggctcgggatgatgtcactggagaagaagcccgcagtgccaacgcctccttcaacatcaaatgtgagagccaggggggctgtgcccagtccccctgtcagaccctcaatgactgaggcctgggggatccctcccttacctcagcttctcccatttccagttaaacgggccaggcagaatgcatttatcatcagctttttttgctcatgtggataagaggaaattaaaagttatattttttccaaaattttttccttcaagtctgggacccatttatctgctgcatgcttgtgcaaatggaaagggcggccgagcccttggccaagtgtcagacttgacctgccagggaccaggcaggcacttagtatctggtaactgtagccccagcctcagcctccagggcttccttgtgtctg

SEQ ID NO: 171545 - DNA, 1035 bp, Homo sapiens
  Payload ID: 13732
  Gene Symbol: PTK7
  Gene Name: protein tyrosine kinase 7 (inactive)
  ENST ID: ENST00000461389
  CDS Start-End: 97-351
ttatttcatcatttgggcttgccctttcatgtggagcactgtgattggacccaagttggcaagagtggaagaccaggggacagaacagaaatccccatggtggccagagtgtcaggtctcatcgtgacgctcttgtcctcctccttcccaggtgggcctttgcagaacgggcagccctcagcagagatccaagaagaagtggccttgaccagcttgggctccggccccgcggccaccaacaaacgccacagcacaagtgataagatgcacttcccacggtctagcctgcagcccatcaccacgctggggagacctcaagcagttcctgaggatttccaagagcaaggatgaaaaattgaagtcacagcccctcagcaccaagcagaaggtggccctatgcacccaggtagccctgggcatggagcacctgtccaacaaccgctttgtgcataaggacttggctgcgcgtaactgcctggtcagtgcccagagacaagtgaaggtgtctgccctgggcctcagcaaggatgtgtacaacagtgagtactaccacttccgccaggcctgggtgccgctgcgctggatgtcccccgaggccatcctggagggtgacttctctaccaagtctgatgtctgggccttcggtgtgctgatgtgggaagtgtttacacatggagagatgccccatggtgggcaggcagatgatgaagtactggcagatttgcaggctgggaaggctagacttcctcagcccgagggctgcccttccaaactctatcggctgatgcagcgctgctgggccctcagccccaaggaccggccctccttcagtgagattgccagcgccctgggagacagcaccgtggacagcaagccgtgaggagggagcccgctcaggatggcctgggcaggggaggacatctctagagggaagctcacagcatgatgggcaagatccctgtcctcctgggccctgaggcccctgccctagtgcaacaggcattgctgaggtctgagcagggcctggcctttcct

SEQ ID NO: 171546 - DNA, 713 bp, Homo sapiens
  Payload ID: 13732
  Gene Symbol: PTK7
  Gene Name: protein tyrosine kinase 7 (inactive)
  ENST ID: ENST00000497957
  CDS Start-End: 1-76
agaacatggcacagaagccatttttgtggcagcggtggggattcggccgtctcaccatgctgctgcacagtcttagagtccttgctcagagccgggctgtcgtttatttaacatccaacgacaagcctgtgccggaggagtcggagggccctggcagccctcccccctacaagatgatccagaccattgggttgtcggtgggtgccgctgtggcctacatcattgccgtgctgggcctcatgttctactgcaagaagcgctgcaaagccaagcggctgcagaagcagcccgagggcgaggagccagagatggaatgcctcaacggtgggcctttgcagaacgggcagccctcagcagagatccaagaagaagtggccttgaccagcttgggctccggccccgcggccaccaacaaacgccacagcacaagtgataagatgcacttcccacggtctagcctgcagcccatcaccacgctggggaagagtgagtttggggaggtgttcctggcaaaggctcagggcttggaggagggagtggcagagaccctggtacttgtgaagagcctgcagagcaaggatgagcagcagcagctggacttccggagggagttggagatgtttgggaagctgaaccacgccaacgtggtgcggctcctggggctgtgccgggaggctgagccccactacatggtgctggaatatgtggatctg

SEQ ID NO: 171547 - DNA, 546 bp, Homo sapiens
  Payload ID: 13732
  Gene Symbol: PTK7
  Gene Name: protein tyrosine kinase 7 (inactive)
  ENST ID: ENST00000461100
  CDS Start-End: 1-78
acagaacatggcacagaagccatttttgtggcagcggtggggattcggccgtctcaccatgctgctgcacagtcttagagtccttgctcagagccgggctgtcgtttatttaacatccaacggtcgacaagcctgtgccggaggagtcggagggccctggcagccctcccccctacaagatgatccagaccattgggttgtcggtgggtgccgctgtggcctacatcattgccgtgctgggcctcatgttctactgcaagaagcgctgcaaagccaagcggctgcagaagcagcccgagggcgaggagccagagatggaatgcctcaacggtgggcctttgcagaacgggcagccctcagcagagatccaagaagaagtggccttgaccagcttgggctccggccccgcggccaccaacaaacgccacagcacaagtgataagatgcacttcccacggtctagcctgcagcccatcaccacgctggggaagagtgagtttggggaggtgttcctggcaaaggctcagggcttggaggagggagtgg

SEQ ID NO: 171548 - DNA, 3436 bp, Homo sapiens
  Payload ID: 13732
  Gene Symbol: PTK7
  Gene Name: protein tyrosine kinase 7 (inactive)
  Uniprot ID: Q13308
  ENST ID: ENST00000481273
  CDS Start-End: 71-3307
cctgagtttttctggtctgagccgagagtttgctcgagaactgccgagagttgctggctctcgggcccagatggggagtttcttgtcgggggagaaaagaccatccgcacccaccgtggggagcgcgatggagaaaaaggaattccccaccccacccggcagggtcggcccaggtacccagacagccattgtcttcatcaagcagccgtcctcccaggatgcactgcaggggcgccgggcgctgcttcgctgtgaggttgaggctccgggcccggtacatgtgtactggctgctcgatggggcccctgtccaggacacggagcggcgtttcgcccagggcagcagcctgagctttgcagctgtggaccggctgcaggactctggcaccttccagtgtgtggctcgggatgatgtcactggagaagaagcccgcagtgccaacgcctccttcaacatcaaatggattgaggcaggtcctgtggtcctgaagcatccagcctcggaagctgagatccagccacagacccaggtcacacttcgttgccacattgatgggcaccctcggcccacctaccaatggttccgagatgggacccccctttctgatggtcagagcaaccacacagtcagcagcaaggagcggaacctgacgctccggccagctggtcctgagcatagtgggctgtattcctgctgcgcccacagtgcttttggccaggcttgcagcagccagaacttcaccttgagcattgctgatgaaagctttgccagggtggtgctggcaccccaggacgtggtagtagcgaggtatgaggaggccatgttccattgccagttctcagcccagccacccccgagcctgcagtggctctttgaggatgagactcccatcactaaccgcagtcgccccccacacctccgcagagccacagtgtttgccaacgggtctctgctgctgacccaggtccggccacgcaatgcagggatctaccgctgcattggccaggggcagaggggcccacccatcatcctggaagccacacttcacctagcagagattgaagacatgccgctatttgagccacgggtgtttacagctggcagcgaggagcgtgtgacctgccttccccccaagggtctgccagagcccagcgtgtggtgggagcacgcgggagtccggctgcccacccatggcagggtctaccagaagggccacgagctggtgttggccaatattgctgaaagtgatgctggtgtctacacctgccacgcggccaacctggctggtcagcggagacaggatgtcaacatcactgtggccactgtgccctcctggctgaagaagccccaagacagccagctggaggagggcaaacccggctacttggattgcctgacccaggccacaccaaaacctacagttgtctggtacagaaaccagatgctcatctcagaggactcacggttcgaggtcttcaagaatgggaccttgcgcatcaacagcgtggaggtgtatgatgggacatggtaccgttgtatgagcagcaccccagccggcagcatcgaggcgcaagcccgtgtccaagtgctggaaaagctcaagttcacaccaccaccccagccacagcagtgcatggagtttgacaaggaggccacggtgccctgttcagccacaggccgagagaagcccactattaagtgggaacgggcagatgggagcagcctcccagagtgggtgacagacaacgctgggaccctgcattttgcccgggtgactcgagatgacgctggcaactacacttgcattgcctccaacgggccgcagggccagattcgtgcccatgtccagctcactgtggcagtttttatcaccttcaaagtggaaccagagcgtacgactgtgtaccagggccacacagccctactgcagtgcgaggcccagggggaccccaagccgctgattcagtggaaaggcaaggaccgcatcctggaccccaccaagctgggacccaggatgcacatcttccagaatggctccctggtgatccatgacgtggcccctgaggactcaggccgctacacctgcattgcaggcaacagctgcaacatcaagcacacggaggcccccctctatgtcgtggacaagcctgtgccggaggagtcggagggccctggcagccctcccccctacaagatgatccagaccattgggttgtcggtgggtgccgctgtggcctacatcattgccgtgctgggcctcatgttctactgcaagaagcgctgcaaagccaagcggctgcagaagcagcccgagggcgaggagccagagatggaatgcctcaacggtgggcctttgcagaacgggcagccctcagcagagatccaagaagaagtggccttgaccagcttgggctccggccccgcggccaccaacaaacgccacagcacaagtgataagatgcacttcccacggtctagcctgcagcccatcaccacgctggggaagagtgagtttggggaggtgttcctggcaaaggctcagggcttggaggagggagtggcagagaccctggtacttgtgaagagcctgcagagcaaggatgagcagcagcagctggacttccggagggagttggagatgtttgggaagctgaaccacgccaacgtggtgcggctcctggggctgtgccgggaggctgagccccactacatggtgctggaatatgtggatctgggagacctcaagcagttcctgaggatttccaagagcaaggatgaaaaattgaagtcacagcccctcagcaccaagcagaaggtggccctatgcacccaggtagccctgggcatggagcacctgtccaacaaccgctttgtgcataaggacttggctgcgcgtaactgcctggtcagtgcccagagacaagtgaaggtgtctgccctgggcctcagcaaggatgtgtacaacagtgagtactaccacttccgccaggcctgggtgccgctgcgctggatgtcccccgaggccatcctggagggtgacttctctaccaagtctgatgtctgggccttcggtgtgctgatgtgggaagtgtttacacatggagagatgccccatggtgggcaggcagatgatgaagtactggcagatttgcaggctgggaaggctagacttcctcagcccgagggctgcccttccaaactctatcggctgatgcagcgctgctgggccctcagccccaaggaccggccctccttcagtgagattgccagcgccctgggagacagcaccgtggacagcaagccgtgaggagggagcccgctcaggatggcctgggcaggggaggacatctctagagggaagctcacagcatgatgggcaagatccctgtcctcctgggccctgaggcccctgccctagtgcaacaggcattgctga

SEQ ID NO: 171549 - DNA, 2412 bp, Homo sapiens
  Payload ID: 13732
  Gene Symbol: PTK7
  Gene Name: protein tyrosine kinase 7 (inactive)
  ENST ID: ENST00000471863
  CDS Start-End: 151-1530
ggacgcctcgggacgcctcggggtcgggctccggctgcggctgctgctgcggcgcccgcgctccggtgcgctccgcctcctgtgcccgccgcggagcgcagtctgcgcgcccgccgtgcgccctcagctccttttcctgagcccgccgcgatgggagctgcgcggggatccccggccagaccccgccggttgcctctgctcagcgtcctgctgctgccgctgctgggcggtacccagacagccattgtcttcatcaagcagccgtcctcccaggatgcactgcaggggcgccgggcgctgcttcgctgtgaggttgaggctccgggcccggtacatgtgtactggctgctcgatggggcccctgtccaggacacggagcggcgtttcgcccagggcagcagcctgagctttgcagctgtggaccggctgcaggactctggcaccttccagtgtgtggctcgggatgatgtcactggagaagaagcccgcagtgccaacgcctccttcaacatcaaatggattgaggcaggtcctgtggtcctgaagcatccagcctcggaagctgagatccagccacagacccaggtcacacttcgttgccacattgatgggcaccctcggcccacctaccaatggttccgagatgggacccccctttctgatggtcagagcaaccacacagtcagcagcaaggagcggaacctgacgctccggccagctggtcctgagcatagtgggctgtattcctgctgcgcccacagtgcttttggccaggcttgcagcagccagaacttcaccttgagcattgctgatgaaagctttgccagggtggtgctggcaccccaggacgtggtagtagcgaggtatgaggaggccatgttccattgccagttctcagcccagccacccccgagcctgcagtggctctttgaggatgagactcccatcactaaccgcagtcgccccccacacctccgcagagccacagtgtttgccaacgggtctctgctgctgacccaggtccggccacgcaatgcagggatctaccgctgcattggccaggggcagaggggcccacccatcatcctggaagccacacttcacctagcagagattgaagacatgccgctatttgagccacgggtgtttacagctggcagcgaggagcgtgtgacctgccttccccccaagggtctgccagagcccagcgtgtggtgggagcacgcgggagtccggctgcccacccatggcagggtctaccagaagggccacgagctggtgttggccaatattgctgaaagtgatgctggtgtctacacctgccacgcggccaacctggctggtcagcggagacaggatgtcaacatcactgtggccagtgagcacctttgccctgaaggtcaaggagaggtggaggggaacacaggtctgggtgtgatggacagaggcttccctggtactcacctgaggtcctctcagttctgggccctgcaggcttgggaatcagttcactactgggagtcggtgtagacagtagagagccaggcacaggggttagggtgggtgctccagaggaaatagtgacagccctcacagaaaaatggtcctctgggtacagaggaaagagcaatagactaggaatctagagacctgggtcccactatgctcccaatgcacagagtgacgatggtagcaaatcacccaccttactggggttcagtctcctcatccataaaatggagccagtaatctactacctaccccacaaggtggttggaaaggtcaaatgaagtagatgaaaatgatttttctttttttcttttttgggaggtaatagtggacaaaattataggtgatttttaatttgttttagtttgttatgctttccaaatttctttactaaacatattacttatgaaaaaaaagagggggagaaaagcaagacatatgactgaaagtacacatgataaaccctttatatcaggctgggcgcggtggctcatgcctgtaatcccagcactttgggaggccgagccgggcggatcacaaggtcaggagttggagaccagcctgaccaacatggtgaaaccccatctctactaaaaatacaaaaattagctgggcgtggtggggcacacctgtaatcccagctactcaggaggctgagggaggaaaattgcttgaacccaggaggcagaggttgcaatgagctgagatcgcaccgttgctcttcagcccgggcaacagagtgagactccatctcaaaacaaaacaaaacaaaccttatatcctcactacaggcatagggatttatttgtttacttatttctttataccatgccttgttccaaaccttttgtggtagtttaaaaggatacacaataaaaattacaatatgcacacagagacaca

SEQ ID NO: 171550 - DNA, 576 bp, Homo sapiens
  Payload ID: 13732
  Gene Symbol: PTK7
  Gene Name: protein tyrosine kinase 7 (inactive)
  ENST ID: ENST00000494146
  CDS Start-End: 1-78
acagaacatggcacagaagccatttttgtggcagcggtggggattcggccgtctcaccatgctgctgcacagtcttagagtccttgctcagagccgggctgtcgtttatttaacatccaacgcccctgcccagacccatctgtgtgtctctcagacaagcctgtgccggaggagtcggagggccctggcagccctcccccctacaagatgatccagaccattgggttgtcggtgggtgccgctgtggcctacatcattgccgtgctgggcctcatgttctactgcaagaagcgctgcaaagccaagcggctgcagaagcagcccgagggcgaggagccagagatggaatgcctcaacggtgggcctttgcagaacgggcagccctcagcagagatccaagaagaagtggccttgaccagcttgggctccggccccgcggccaccaacaaacgccacagcacaagtgataagatgcacttcccacggtctagcctgcagcccatcaccacgctggggaagagtgagtttggggaggtgttcctggcaaaggctcagggcttggaggagggagtggca

SEQ ID NO: 171551 - DNA, 807 bp, Homo sapiens
  Payload ID: 13732
  Gene Symbol: PTK7
  Gene Name: protein tyrosine kinase 7 (inactive)
  ENST ID: ENST00000481946
  CDS Start-End: 1-807
ttctcagcccagccacccccgagcctgcagtggctctttgaggatgagactcccatcactaaccgcagtcgccccccacacctccgcagagccacagtgtttgccaacgggtctctgctgctgacccaggtccggccacgcaatgcagggatctaccgctgcattggccaggggcagaggggcccacccatcatcctggaagccacacttcacctagcagagattgaagacatgccgctatttgagccacgggtgtttacagctggcagcgaggagcgtgtgacctgccttccccccaagggtctgccagagcccagcgtgtggtgggagcacgcgggagtccggctgcccacccatggcagggtctaccagaagggccacgagctggtgttggccaatattgctgaaagtgatgctggtgtctacacctgccacgcggccaacctggctggtcagcggagacaggatgtcaacatcactgtggccagtgagcacctttgccctgaaggtcaaggagaggtggaggggaacacaggtctgggtgtgatggacagaggcttccctgctgtgccctcctggctgaagaagccccaagacagccagctggaggagggcaaacccggctacttggattgcctgacccaggccacaccaaaacctacagttgtctggtacagaaaccagatgctcatctcagaggactcacggttcgaggtcttcaagaatgggaccttgcgcatcaacagcgtggaggtgtatgatgggacatggtaccgttgtatgagcagcaccccagccggcagcatc

SEQ ID NO: 171552 - DNA, 870 bp, Homo sapiens
  Payload ID: 13732
  Gene Symbol: PTK7
  Gene Name: protein tyrosine kinase 7 (inactive)
  ENST ID: ENST00000473339
  CDS Start-End: 98-870
attatttcatcatttgggcttgccctttcatgtggagcactgtgattggacccaagttggcaagagtggaagaccaggggacagaacagaaatccccatggtggccagagtgtcaggtctcatcgtgacgctcttgtcctcctccttcccaggtgggcctttgcagaacgggcagccctcagcagagatccaagaagaagtggccttgaccagcttgggctccggccccgcggccaccaacaaacgccacagcacaagtgataagatgcacttcccacggtctagcctgcagcccatcaccacgctggggaagagtgagtttggggaggtgttcctggcaaaggctcagggcttggaggagggagtggcagagaccctggtacttgtgaagagcctgcagagcaaggatgagcagcagcagctggacttccggagggagttggagatgtttgggaagctgaaccacgccaacgtggtgcggctcctggggctgtgccgggaggctgagccccactacatggtgctggaatatgtggatctgggagacctcaagcagttcctgaggatttccaagagcaaggatgaaaaattgaagtcacagcccctcagcaccaagcagaaggtggccctatgcacccaggtagccctgggcatggagcacctgtccaacaaccgctttgtgcataaggacttggctgcgcgtaactgcctggtcagtgcccagagacaagtgaaggtgtctgccctgggcctcagcaaggatgtgtacaacagtgagtactaccacttccgccaggcctgggtgccgctgcgctggatgtcccccgaggccatcctggagggtgacttctctaccaagtctgatgtctg

SEQ ID NO: 171553 - DNA, 4016 bp, Homo sapiens
  Payload ID: 13732
  Gene Symbol: PTK7
  Gene Name: protein tyrosine kinase 7 (inactive)
  ENST ID: ENST00000470019
  CDS Start-End: 157-630
ggctcgggacgcctcgggacgcctcggggtcgggctccggctgcggctgctgctgcggcgcccgcgctccggtgcgctccgcctcctgtgcccgccgcggagcgcagtctgcgcgcccgccgtgcgccctcagctccttttcctgagcccgccgcgatgggagctgcgcggggatccccggccagaccccgccggttgcctctgctcagcgtcctgctgctgccgctgctgggcggtacccagacagccattgtcttcatcaagcagccgtcctcccaggatgcactgcaggggcgccgggcgctgcttcgctgtgaggttgaggctccgggcccggtacatgtgtactggctgctcgatggggcccctgtccaggacacggagcggcgtttcgcccagggcagcagcctgagctttgcagctgtggaccggctgcaggactctggcaccttccagtgtgtggctcgggatgatgtcactggagaagaagcccgcagtgccaacgcctccttcaacatcaaatggattgaggcaggtcctgtggtcctgaagcatccagcctcggaagctgagatccagccacagacccaggtcacacttcgttgccacattgatgggcaccctcgatgaaagctttgccagggtggtgctggcaccccaggacgtggtagtagcgaggtatgaggaggccatgttccattgccagttctcagcccagccacccccgagcctgcagtggctctttgaggatgagactcccatcactaaccgcagtcgccccccacacctccgcagagccacagtgtttgccaacgggtctctgctgctgacccaggtccggccacgcaatgcagggatctaccgctgcattggccaggggcagaggggcccacccatcatcctggaagccacacttcacctagcagagattgaagacatgccgctatttgagccacgggtgtttacagctggcagcgaggagcgtgtgacctgccttccccccaagggtctgccagagcccagcgtgtggtgggagcacgcgggagtccggctgcccacccatggcagggtctaccagaagggccacgagctggtgttggccaatattgctgaaagtgatgctggtgtctacacctgccacgcggccaacctggctggtcagcggagacaggatgtcaacatcactgtggccactgtgccctcctggctgaagaagccccaagacagccagctggaggagggcaaacccggctacttggattgcctgacccaggccacaccaaaacctacagttgtctggtacagaaaccagatgctcatctcagaggactcacggttcgaggtcttcaagaatgggaccttgcgcatcaacagcgtggaggtgtatgatgggacatggtaccgttgtatgagcagcaccccagccggcagcatcgaggcgcaagcccgtgtccaagtgctggaaaagctcaagttcacaccaccaccccagccacagcagtgcatggagtttgacaaggaggccacggtgccctgttcagccacaggccgagagaagcccactattaagtgggaacgggcagatgggagcagcctcccagagtgggtgacagacaacgctgggaccctgcattttgcccgggtgactcgagatgacgctggcaactacacttgcattgcctccaacgggccgcagggccagattcgtgcccatgtccagctcactgtggcagtttttatcaccttcaaagtggaaccagagcgtacgactgtgtaccagggccacacagccctactgcagtgcgaggcccagggggaccccaagccgctgattcagtggaaaggcaaggaccgcatcctggaccccaccaagctgggacccaggatgcacatcttccagaatggctccctggtgatccatgacgtggcccctgaggactcaggccgctacacctgcattgcaggcaacagctgcaacatcaagcacacggaggcccccctctatgtcgtggacaagcctgtgccggaggagtcggagggccctggcagccctcccccctacaagatgatccagaccattgggttgtcggtgggtgccgctgtggcctacatcattgccgtgctgggcctcatgttctactgcaagaagcgctgcaaagccaagcggctgcagaagcagcccgagggcgaggagccagagatggaatgcctcaacggtgggcctttgcagaacgggcagccctcagcagagatccaagaagaagtggccttgaccagcttgggctccggccccgcggccaccaacaaacgccacagcacaagtgataagatgcacttcccacggtctagcctgcagcccatcaccacgctggggaagagtgagtttggggaggtgttcctggcaaaggctcagggcttggaggagggagtggcagagaccctggtacttgtgaagagcctgcagagcaaggatgagcagcagcagctggacttccggagggagttggagatgtttgggaagctgaaccacgccaacgtggtgcggctcctggggctgtgccgggaggctgagccccactacatggtgctggaatatgtggatctgggagacctcaagcagttcctgaggatttccaagagcaaggatgaaaaattgaagtcacagcccctcagcaccaagcagaaggtggccctatgcacccaggtagccctgggcatggagcacctgtccaacaaccgctttgtgcataaggacttggctgcgcgtaactgcctggtcagtgcccagagacaagtgaaggtgtctgccctgggcctcagcaaggatgtgtacaacagtgagtactaccacttccgccaggcctgggtgccgctgcgctggatgtcccccgaggccatcctggagggtgacttctctaccaagtctgatgtctgggccttcggtgtgctgatgtgggaagtgtttacacatggagagatgccccatggtgggcaggcagatgatgaagtactggcagatttgcaggctgggaaggctagacttcctcagcccgagggctgcccttccaaactctatcggctgatgcagcgctgctgggccctcagccccaaggaccggccctccttcagtgagattgccagcgccctgggagacagcaccgtggacagcaagccgtgaggagggagcccgctcaggatggcctgggcaggggaggacatctctagagggaagctcacagcatgatgggcaagatccctgtcctcctgggccctgaggcccctgccctagtgcaacaggcattgctgaggtctgagcagggcctggcctttcctcctcttcctcaccctcatcctttgggaggctgacttggacccaaactgggcgactagggctttgagctgggcagttttccctgccacctcttcctctatcagggacagtgtgggtgccacaggtaaccccaatttctggccttcaacttctccccttgaccgggtccaactctgccactcatctgccaactttgcctggggagggctaggcttgggatgagctgggtttgtggggagttccttaatattctcaagttctgggcacacagggttaatgagtctcttggcccactggtcccacttgggggtctagaccaggattatagaggacacagcaagtgagtcctccccactctgggcttgtgcacactgacccagacccacgtcttccccacccttctctcctttcctcatcctaagtgcctggcagatgaaggagttttcaggagcttttgacactatataaaccgccctttttgtatgcaccacgggcggcttttatatgtaattgcagcgtggggtgggtgggcatgggaggtaggggtgggccctggagatgaggagggtgggccatccttaccccacacttttattgttgtcgttttttgtttgttttgtttttttgtttttgtttttgtttttacactcgctgctctcaataaataagccttttttacaacctg

SEQ ID NO: 171554 - DNA, 1935 bp, Homo sapiens
  Payload ID: 13732
  Gene Symbol: PTK7
  Gene Name: protein tyrosine kinase 7 (inactive)
  ENST ID: ENST00000489707
  CDS Start-End: 1-1097
gggagcacgcgggagtccggctgcccacccatggcagggtctaccagaagggccacgagctggtgttggccaatattgctgaaagtgatgctggtgtctacacctgccacgcggccaacctggctggtcagcggagacaggatgtcaacatcactgtggccactgtgccctcctggctgaagaagccccaagacagccagctggaggagggcaaacccggctacttggattgcctgacccaggccacaccaaaacctacagttgtctggtacagaaaccagatgctcatctcagaggactcacggttcgaggtgttcctggcaaaggctcagggcttggaggagggagtggcagagaccctggtacttgtgaagagcctgcagagcaaggatgagcagcagcagctggacttccggagggagttggagatgtttgggaagctgaaccacgccaacgtggtgcggctcctggggctgtgccgggaggctgagccccactacatggtgctggaatatgtggatctgggagacctcaagcagttcctgaggatttccaagagcaaggatgaaaaattgaagtcacagcccctcagcaccaagcagaaggtggccctatgcacccaggtagccctgggcatggagcacctgtccaacaaccgctttgtgcataaggacttggctgcgcgtaactgcctggtcagtgcccagagacaagtgaaggtgtctgccctgggcctcagcaaggatgtgtacaacagtgagtactaccacttccgccaggcctgggtgccgctgcgctggatgtcccccgaggccatcctggagggtgacttctctaccaagtctgatgtctgggccttcggtgtgctgatgtgggaagtgtttacacatggagagatgccccatggtgggcaggcagatgatgaagtactggcagatttgcaggctgggaaggctagacttcctcagcccgagggctgcccttccaaactctatcggctgatgcagcgctgctgggccctcagccccaaggaccggccctccttcagtgagattgccagcgccctgggagacagcaccgtggacagcaagccgtgaggagggagcccgctcaggatggcctgggcaggggaggacatctctagagggaagctcacagcatgatgggcaagatccctgtcctcctgggccctgaggcccctgccctagtgcaacaggcattgctgaggtctgagcagggcctggcctttcctcctcttcctcaccctcatcctttgggaggctgacttggacccaaactgggcgactagggctttgagctgggcagttttccctgccacctcttcctctatcagggacagtgtgggtgccacaggtaaccccaatttctggccttcaacttctccccttgaccgggtccaactctgccactcatctgccaactttgcctggggagggctaggcttgggatgagctgggtttgtggggagttccttaatattctcaagttctgggcacacagggttaatgagtctcttggcccactggtcccacttgggggtctagaccaggattatagaggacacagcaagtgagtcctccccactctgggcttgtgcacactgacccagacccacgtcttccccacccttctctcctttcctcatcctaagtgcctggcagatgaaggagttttcaggagcttttgacactatataaaccgccctttttgtatgcaccacgggcggcttttatatgtaattgcagcgtggggtgggtgggcatgggaggtaggggtgggccctggagatgaggagggtgggccatccttaccccacacttttattgttgtcgttttttgtttgttttgtttttttgtttttgtttttgtttttacactcgctgctctcaataaataagccttttttacaacctg

SEQ ID NO: 171555 - DNA, 4398 bp, Homo sapiens
  Payload ID: 13733
  Gene Symbol: PTPDC1
  Gene Name: protein tyrosine phosphatase domain containing 1
  Uniprot ID: A2A3K4
  ENST ID: ENST00000288976
  CDS Start-End: 68-2488
agtgaaagttcctcactgagtgagtggggctgactcttcctgcctccggctcttgcctcccagtgccatgcaggtgcaggatgcaaccaggcggccctcagccgtgcgcttcctcagctcctttctccagggccgccggcactccacctcagacccagtactgcggctgcagcaggcccggcggggctctggcttgggctccggctctgccacgaagctgctgtcctcgtcctctctccaggtgatggtggctgtttcctcagtcagccatgcagagggaaacccaactttccccgaaagaaaaagaaatttagaacgtccaacaccaaagtacacaaaagtaggggagcgtttacggcatgtcattcctggacacatggcatgttccatggcgtgtggcggtagagcttgcaagtatgagaacccagcccgctggagtgagcaggagcaagccattaagggggtttactcatcctgggtcactgataatatactggccatggcccgcccatcctctgagctcctggagaagtaccacatcattgatcagttcctcagccatggcataaaaacaataatcaacctccagcgccctggtgagcatgctagctgtgggaaccctctggaacaagaaagtggcttcacataccttcctgaggctttcatggaggctggcatttacttctacaatttcggatggaaggattatggtgtagcgtctcttactactatcctagatatggtgaaggtgatgacatttgccttacaggaaggaaaagtagctatccattgtcatgcagggcttggtcgaacaggtgttttaatagcctgttacttagtttttgcaacgagaatgactgctgaccaagcaattatatttgtgcgggcaaagcgacccaattccatacaaaccagaggacagctcctctgtgtaagggaatttactcagtttctaactcctctccgcaatatattctcttgctgtgatcccaaagcacatgctgtcaccttacctcaatatctaattcgccagcgtcatctgcttcatggttatgaggcacgacttctgaaacacgtgccaaaaattatccacctagtttgcaaattgctgctggacttagcggagaacaggccagtgatgatgaaggatgtgtccgaaggacctggtctctctgctgaaatagaaaagacaatgtctgagatggtcaccatgcagctggataaagagttactgaggcatgacagtgatgtgtccaacccgcctaaccccactgcagtggcagcagattttgacaatcgaggcatgattttctccaatgagcaacagtttgaccctctttggaaaaggcggaatgttgagtgccttcaacccctgactcatctgaaaaggcggctcagctacagtgactcagatttaaagagggccgagaacctcctggagcaaggggagactccacagacagtgcctgcccagatcttggttggccacaagcccaggcagcagaagctcataagccattgttacatcccacagtctccagaaccagacttacacaaggaagccttggttcgcagcacactttctttctggagtcagtcaaagtttggaggcctggaaggactcaaagataatgggtcaccaattttccatggaaggatcattccaaaggaagcacagcagagtggagctttctctgcagatgtttcaggctcacacagccctggggagccagtttcacccagctttgcaaatgtccataaggatccaaaccctgctcaccagcaagtgtctcactgtcagtgtaaaactcatggtgttgggagccctggctctgtcaggcagaacagcaggacaccccgaagccctctggactgtggctccagtcccaaagcacagttcttggttgaacatgaaacccaggacagtaaagatctgtctgaagcagcttcacactctgcattacagtctgaattgagtgctgaggcaagaagaatactggcggccaaagccctagcaaatttaaatgaatctgtagaaaaggaggaactaaaaaggaaggtagaaatgtggcagaaagagcttaattcccgagatggagcttgggaaagaatatgtggcgagagggaccctttcatcctatgcagcttgatgtggtcttgggtggagcaactgaaggagcctgtaatcaccaaagaggatgtggacatgttggttgacaggcgagcagatgccgcagaagcactttttttattagagaagggacagcaccagactattctctgcgtgttgcactgcatagtgaacctgcagacaattcccgtggatgtggaggaagctttccttgcccatgccattaaggcattcactaaggttaattttgattctgaaaatggaccaacagtttacaacaccctgaagaaaatatttaagcacacgctggaagaaaaaagaaaaatgacaaaagatggccctaagcctggcctctagctttcactcgtggtgaatatttcagacctaaagatccagatagtatctctgttcatatgtgaataagttgaagattgtggggctactttttctcatagcactttattttgaatgttgttagtttgtgctgagaatggtcgtccgtatttgaaccaattatttattttaaaatatatttaagctacatttttgttttgaaaaattgccataaatttggtgccactttcttttatttatttgactgagttaatattattgtattaacattttaagtatatggtgtttacattcttatttcttttgacattttggaaataatcataacttgtctttccaaaataaccattttcttgatggaactcttcctagagtttttaccaaatagctaactttagtagtaaaacctcattgtgtatccattcccccacagatgaactaagaaagtcaccaagtgtcttaagctgttttatatttgttacgaagaaggctattgctacaatatttttaaaggtttcttttttaactttgaaattttttgtttttccttttctttttataaatgtaacagagggtttcaaagcatattatttttcagagagatttagttttactttaatggagtgactgtgaagtggttgggattttttgcttgtagaaagtagacttgctctttgtcagatttccaaacaaccttgccagccttggctgtcaaaaggaggcaggagcagttctcaacacaccaagccttattcccactcccttgggttgctgctgagccaaatagcatctttacagaggaagtgggatcagaggcaggaagtgtggaaagttgctaagaagcagggcttgcctctgtcctcccggggactccacagggatattcgtgcagggcaggggctctgtgccagccctgctctctcagatgccacagccactctgcagaggtgactcttggagctggaggaagtcaaaactgggccactgtttgtactgatggtgtattagcatgagcagcgtggccctggccccacactcccaaatctgccactccatagacccacttgcctcaaggctttatatttggctgctttcttacaatgagaattaagatttttaaactgaagttgaccatacaggttgcattagccctaactggcttcatgtaagaagggtgactgcctaaactagttccttgtaagctgaaccatcaattatcagttgaagccatacttttatttaaattaatatacgtagataccagaggccaagccacagagaggataatagttcttcccaataaaggtgatattaatcagactaatttcgaactaaagaagttactgcttaaagacggaatttcaggggaagcaagactcatttagaacaaatgaaatttctccagtcctacatttctgaattgacttctagcacatcaaaaatatttcagtcattatcagtctcattaactgaaatgccaaatgctaaatgcagtgttctttcacactgttttaattttcttgggaaattgagtccagtggatgttaatggagtgggttgcccatccctgaaatgtcttattttcaagtgcctggcctgggaaagaaggggaagaaacaattgcattatatccaaagatacactataaaaatagagtttttaccaaaaaaagatgtttgttctcatctcagtaggcctcatttgggcaagtgacccacaggtcttttggcgagtttgctatttgcctgttgaaatacttgtttcaacttagagaacagttatgatgtgaccatagcatggcacaactaaaaatctaagcctgaaacctgaaaaaagagatatgacaagggaaattaatcaggctatacataagtattgtatttatttgaataaaaataaaaagagcaacccat

SEQ ID NO: 171556 - DNA, 4517 bp, Homo sapiens
  Payload ID: 13733
  Gene Symbol: PTPDC1
  Gene Name: protein tyrosine phosphatase domain containing 1
  Uniprot ID: A2A3K4
  ENST ID: ENST00000375360
  CDS Start-End: 341-2605
gggcgggcgcgctgagggcagcgccggggacgcggcctcagcaggggcgccccgccacggggagcagcccaggcgctcgccccaggacgttgtccggcgggctgggctgggacccctctgcctccagggcgcgtcgggagcagcagggatcggtgccgcgccgtgagggtgcgcagaggctgccctcgggcccgctacccacagaccctccgcggggcagcgtctccgggccggccgcgccctggtccgccgaccgcagacgacttgtgacacggacggcgcgtcctgctgaccccagccggcgccgagggcttggaatctcgagcgggaaaagactaccatggctgcaggagtcttgcctcagaatgaacaaccatattctaccttggtgaataacagcgagtgtgttgcaaacatgaaaggaaatttagaacgtccaacaccaaagtacacaaaagtaggggagcgtttacggcatgtcattcctggacacatggcatgttccatggcgtgtggcggtagagcttgcaagtatgagaacccagcccgctggagtgagcaggagcaagccattaagggggtttactcatcctgggtcactgataatatactggccatggcccgcccatcctctgagctcctggagaagtaccacatcattgatcagttcctcagccatggcataaaaacaataatcaacctccagcgccctggtgagcatgctagctgtgggaaccctctggaacaagaaagtggcttcacataccttcctgaggctttcatggaggctggcatttacttctacaatttcggatggaaggattatggtgtagcgtctcttactactatcctagatatggtgaaggtgatgacatttgccttacaggaaggaaaagtagctatccattgtcatgcagggcttggtcgaacaggtgttttaatagcctgttacttagtttttgcaacgagaatgactgctgaccaagcaattatatttgtgcgggcaaagcgacccaattccatacaaaccagaggacagctcctctgtgtaagggaatttactcagtttctaactcctctccgcaatatattctcttgctgtgatcccaaagcacatgctgtcaccttacctcaatatctaattcgccagcgtcatctgcttcatggttatgaggcacgacttctgaaacacgtgccaaaaattatccacctagtttgcaaattgctgctggacttagcggagaacaggccagtgatgatgaaggatgtgtccgaaggacctggtctctctgctgaaatagaaaagacaatgtctgagatggtcaccatgcagctggataaagagttactgaggcatgacagtgatgtgtccaacccgcctaaccccactgcagtggcagcagattttgacaatcgaggcatgattttctccaatgagcaacagtttgaccctctttggaaaaggcggaatgttgagtgccttcaacccctgactcatctgaaaaggcggctcagctacagtgactcagatttaaagagggccgagaacctcctggagcaaggggagactccacagacagtgcctgcccagatcttggttggccacaagcccaggcagcagaagctcataagccattgttacatcccacagtctccagaaccagacttacacaaggaagccttggttcgcagcacactttctttctggagtcagtcaaagtttggaggcctggaaggactcaaagataatgggtcaccaattttccatggaaggatcattccaaaggaagcacagcagagtggagctttctctgcagatgtttcaggctcacacagccctggggagccagtttcacccagctttgcaaatgtccataaggatccaaaccctgctcaccagcaagtgtctcactgtcagtgtaaaactcatggtgttgggagccctggctctgtcaggcagaacagcaggacaccccgaagccctctggactgtggctccagtcccaaagcacagttcttggttgaacatgaaacccaggacagtaaagatctgtctgaagcagcttcacactctgcattacagtctgaattgagtgctgaggcaagaagaatactggcggccaaagccctagcaaatttaaatgaatctgtagaaaaggaggaactaaaaaggaaggtagaaatgtggcagaaagagcttaattcccgagatggagcttgggaaagaatatgtggcgagagggaccctttcatcctatgcagcttgatgtggtcttgggtggagcaactgaaggagcctgtaatcaccaaagaggatgtggacatgttggttgacaggcgagcagatgccgcagaagcactttttttattagagaagggacagcaccagactattctctgcgtgttgcactgcatagtgaacctgcagacaattcccgtggatgtggaggaagctttccttgcccatgccattaaggcattcactaaggttaattttgattctgaaaatggaccaacagtttacaacaccctgaagaaaatatttaagcacacgctggaagaaaaaagaaaaatgacaaaagatggccctaagcctggcctctagctttcactcgtggtgaatatttcagacctaaagatccagatagtatctctgttcatatgtgaataagttgaagattgtggggctactttttctcatagcactttattttgaatgttgttagtttgtgctgagaatggtcgtccgtatttgaaccaattatttattttaaaatatatttaagctacatttttgttttgaaaaattgccataaatttggtgccactttcttttatttatttgactgagttaatattattgtattaacattttaagtatatggtgtttacattcttatttcttttgacattttggaaataatcataacttgtctttccaaaataaccattttcttgatggaactcttcctagagtttttaccaaatagctaactttagtagtaaaacctcattgtgtatccattcccccacagatgaactaagaaagtcaccaagtgtcttaagctgttttatatttgttacgaagaaggctattgctacaatatttttaaaggtttcttttttaactttgaaattttttgtttttccttttctttttataaatgtaacagagggtttcaaagcatattatttttcagagagatttagttttactttaatggagtgactgtgaagtggttgggattttttgcttgtagaaagtagacttgctctttgtcagatttccaaacaaccttgccagccttggctgtcaaaaggaggcaggagcagttctcaacacaccaagccttattcccactcccttgggttgctgctgagccaaatagcatctttacagaggaagtgggatcagaggcaggaagtgtggaaagttgctaagaagcagggcttgcctctgtcctcccggggactccacagggatattcgtgcagggcaggggctctgtgccagccctgctctctcagatgccacagccactctgcagaggtgactcttggagctggaggaagtcaaaactgggccactgtttgtactgatggtgtattagcatgagcagcgtggccctggccccacactcccaaatctgccactccatagacccacttgcctcaaggctttatatttggctgctttcttacaatgagaattaagatttttaaactgaagttgaccatacaggttgcattagccctaactggcttcatgtaagaagggtgactgcctaaactagttccttgtaagctgaaccatcaattatcagttgaagccatacttttatttaaattaatatacgtagataccagaggccaagccacagagaggataatagttcttcccaataaaggtgatattaatcagactaatttcgaactaaagaagttactgcttaaagacggaatttcaggggaagcaagactcatttagaacaaatgaaatttctccagtcctacatttctgaattgacttctagcacatcaaaaatatttcagtcattatcagtctcattaactgaaatgccaaatgctaaatgcagtgttctttcacactgttttaattttcttgggaaattgagtccagtggatgttaatggagtgggttgcccatccctgaaatgtcttattttcaagtgcctggcctgggaaagaaggggaagaaacaattgcattatatccaaagatacactataaaaatagagtttttaccaaaaaaagatgtttgttctcatctcagtaggcctcatttgggcaagtgacccacaggtcttttggcgagtttgctatttgcctgttgaaatacttgtttcaacttagagaacagttatgatgtgaccatagcatggcacaactaaaaatctaagcctgaaacctgaaaaaagagatatgacaagggaaattaatcaggctatacataagtattgtatttatttgaataaaaataaaaagagcaacccataa

SEQ ID NO: 171557 - DNA, 4437 bp, Homo sapiens
  Payload ID: 13733
  Gene Symbol: PTPDC1
  Gene Name: protein tyrosine phosphatase domain containing 1
  ENST ID: ENST00000620992
  CDS Start-End: 103-2529
agatcatacagaacgatgcaatgctccctgctctcagtgaaagttcctcactgagtgagtggggctgactcttcctgcctccggctcttgcctcccagtgccatgcaggtgcaggatgcaaccaggcggccctcagccgtgcgcttcctcagctcctttctccagggccgccggcactccacctcagacccagtactgcggctgcagcaggcccggcggggctctggcttgggctccggctctgccacgaagctgctgtcctcgtcctctctccaggtgatggtggctgtttcctcagtcagccatgcagagggaaacccaactttccccgaaagaaaaagtaaaggaaatttagaacgtccaacaccaaagtacacaaaagtaggggagcgtttacggcatgtcattcctggacacatggcatgttccatggcgtgtggcggtagagcttgcaagtatgagaacccagcccgctggagtgagcaggagcaagccattaagggggtttactcatcctgggtcactgataatatactggccatggcccgcccatcctctgagctcctggagaagtaccacatcattgatcagttcctcagccatggcataaaaacaataatcaacctccagcgccctggtgagcatgctagctgtgggaaccctctggaacaagaaagtggcttcacataccttcctgaggctttcatggaggctggcatttacttctacaatttcggatggaaggattatggtgtagcgtctcttactactatcctagatatggtgaaggtgatgacatttgccttacaggaaggaaaagtagctatccattgtcatgcagggcttggtcgaacaggtgttttaatagcctgttacttagtttttgcaacgagaatgactgctgaccaagcaattatatttgtgcgggcaaagcgacccaattccatacaaaccagaggacagctcctctgtgtaagggaatttactcagtttctaactcctctccgcaatatattctcttgctgtgatcccaaagcacatgctgtcaccttacctcaatatctaattcgccagcgtcatctgcttcatggttatgaggcacgacttctgaaacacgtgccaaaaattatccacctagtttgcaaattgctgctggacttagcggagaacaggccagtgatgatgaaggatgtgtccgaaggacctggtctctctgctgaaatagaaaagacaatgtctgagatggtcaccatgcagctggataaagagttactgaggcatgacagtgatgtgtccaacccgcctaaccccactgcagtggcagcagattttgacaatcgaggcatgattttctccaatgagcaacagtttgaccctctttggaaaaggcggaatgttgagtgccttcaacccctgactcatctgaaaaggcggctcagctacagtgactcagatttaaagagggccgagaacctcctggagcaaggggagactccacagacagtgcctgcccagatcttggttggccacaagcccaggcagcagaagctcataagccattgttacatcccacagtctccagaaccagacttacacaaggaagccttggttcgcagcacactttctttctggagtcagtcaaagtttggaggcctggaaggactcaaagataatgggtcaccaattttccatggaaggatcattccaaaggaagcacagcagagtggagctttctctgcagatgtttcaggctcacacagccctggggagccagtttcacccagctttgcaaatgtccataaggatccaaaccctgctcaccagcaagtgtctcactgtcagtgtaaaactcatggtgttgggagccctggctctgtcaggcagaacagcaggacaccccgaagccctctggactgtggctccagtcccaaagcacagttcttggttgaacatgaaacccaggacagtaaagatctgtctgaagcagcttcacactctgcattacagtctgaattgagtgctgaggcaagaagaatactggcggccaaagccctagcaaatttaaatgaatctgtagaaaaggaggaactaaaaaggaaggtagaaatgtggcagaaagagcttaattcccgagatggagcttgggaaagaatatgtggcgagagggaccctttcatcctatgcagcttgatgtggtcttgggtggagcaactgaaggagcctgtaatcaccaaagaggatgtggacatgttggttgacaggcgagcagatgccgcagaagcactttttttattagagaagggacagcaccagactattctctgcgtgttgcactgcatagtgaacctgcagacaattcccgtggatgtggaggaagctttccttgcccatgccattaaggcattcactaaggttaattttgattctgaaaatggaccaacagtttacaacaccctgaagaaaatatttaagcacacgctggaagaaaaaagaaaaatgacaaaagatggccctaagcctggcctctagctttcactcgtggtgaatatttcagacctaaagatccagatagtatctctgttcatatgtgaataagttgaagattgtggggctactttttctcatagcactttattttgaatgttgttagtttgtgctgagaatggtcgtccgtatttgaaccaattatttattttaaaatatatttaagctacatttttgttttgaaaaattgccataaatttggtgccactttcttttatttatttgactgagttaatattattgtattaacattttaagtatatggtgtttacattcttatttcttttgacattttggaaataatcataacttgtctttccaaaataaccattttcttgatggaactcttcctagagtttttaccaaatagctaactttagtagtaaaacctcattgtgtatccattcccccacagatgaactaagaaagtcaccaagtgtcttaagctgttttatatttgttacgaagaaggctattgctacaatatttttaaaggtttcttttttaactttgaaattttttgtttttccttttctttttataaatgtaacagagggtttcaaagcatattatttttcagagagatttagttttactttaatggagtgactgtgaagtggttgggattttttgcttgtagaaagtagacttgctctttgtcagatttccaaacaaccttgccagccttggctgtcaaaaggaggcaggagcagttctcaacacaccaagccttattcccactcccttgggttgctgctgagccaaatagcatctttacagaggaagtgggatcagaggcaggaagtgtggaaagttgctaagaagcagggcttgcctctgtcctcccggggactccacagggatattcgtgcagggcaggggctctgtgccagccctgctctctcagatgccacagccactctgcagaggtgactcttggagctggaggaagtcaaaactgggccactgtttgtactgatggtgtattagcatgagcagcgtggccctggccccacactcccaaatctgccactccatagacccacttgcctcaaggctttatatttggctgctttcttacaatgagaattaagatttttaaactgaagttgaccatacaggttgcattagccctaactggcttcatgtaagaagggtgactgcctaaactagttccttgtaagctgaaccatcaattatcagttgaagccatacttttatttaaattaatatacgtagataccagaggccaagccacagagaggataatagttcttcccaataaaggtgatattaatcagactaatttcgaactaaagaagttactgcttaaagacggaatttcaggggaagcaagactcatttagaacaaatgaaatttctccagtcctacatttctgaattgacttctagcacatcaaaaatatttcagtcattatcagtctcattaactgaaatgccaaatgctaaatgcagtgttctttcacactgttttaattttcttgggaaattgagtccagtggatgttaatggagtgggttgcccatccctgaaatgtcttattttcaagtgcctggcctgggaaagaaggggaagaaacaattgcattatatccaaagatacactataaaaatagagtttttaccaaaaaaagatgtttgttctcatctcagtaggcctcatttgggcaagtgacccacaggtcttttggcgagtttgctatttgcctgttgaaatacttgtttcaacttagagaacagttatgatgtgaccatagcatggcacaactaaaaatctaagcctgaaacctgaaaaaagagatatgacaagggaaattaatcaggctatacataagtattgtatttatttgaataaaaataaaaagagcaaccc

SEQ ID NO: 171558 - DNA, 5088 bp, Homo sapiens
  Payload ID: 13734
  Gene Symbol: PTP4A1
  Gene Name: protein tyrosine phosphatase type IVA, member 1
  Uniprot ID: Q93096
  ENST ID: ENST00000370651
  CDS Start-End: 1154-1675
aaagatgaccgtggttaaggcagtagaaagcaggctcgacactgagacgcggttccagccctagaaggattgcattttacgattcaggcaaacttcgagtctcctcatgtgacatgtgtgcactcctggaccgttttaattatgagaaacgtggtttgcagcatgattccttccagtcgataaatcggaatctctctcgctcccaccccttcttaacttcaggcttcctgcatcccggagcactcccggcagccccttccctcccccgccccggggatgctccgactcggcgcttagccattcatcaaccggttcacaccggcggcggccgccgcggagtgacgtccggagggggcgggcctccgcccccgcctgtcggctcctggcccgcggttccaggccgcgattggtggctggagggttgcacgtcgcgccggctataaaggggagggcttgtgacgcaagggcgcctcggcgcgtgtattggctccttcggctgcgggccggctcggctacgcgctctgctccgagccgctcactgcatggtagagtctggtgcccccgccgccgcctgcatcgccgccaccgccgctccgccacgaccaccgccgcctcctgccctgcagccaccgccaccgcctgtgtcgccgccgcctcgggaccggctgtatgattaggccacaatcttcaatgagtaaacatattcctcaattctgtggtgttcttggtcacacatttatggagtttctgaagggcagtggagattactgccaggcacagcacgacctctatgcagacaagtgaactgtagaaactgattactgctccaccaagaagcccccataagagtggttatcctggacacagaagtgttgaattgaaatccacagagcattttacaagagttctgacctggatggggtaaacctcagtgcacttcttttctgttggcctcagtattactggattgaagaattgctgcttcttgttaggaggttcatttcacttatcattacttacaacttcatactcaaagcactgagaatttcaagtggagtatattgaagtagacttcagtttctttgcatcatttctgtattcaatttttttaattatttcataaccctattgagtgttttttaactaaattaacatggctcgaatgaaccgcccagctcctgtggaagtcacatacaagaacatgagatttcttattacacacaatccaaccaatgcgaccttaaacaaatttatagaggaacttaagaagtatggagttaccacaatagtaagagtatgtgaagcaacttatgacactactcttgtggagaaagaaggtatccatgttcttgattggccttttgatgatggtgcaccaccatccaaccagattgttgatgactggttaagtcttgtgaaaattaagtttcgtgaagaacctggttgttgtattgctgttcattgcgttgcaggccttgggagagctccagtacttgttgccctagcattaattgaaggtggaatgaaatacgaagatgcagtacaattcataagacaaaagcggcgtggagcttttaacagcaagcaacttctgtatttggagaagtatcgtcctaaaatgcggctgcgtttcaaagattccaacggtcatagaaacaactgttgcattcaataaaattggggtgcctaatgctactggaagtggaacttgagatagggcctaatttgttatacatattagccaacatgttggcttagtaagtctaatgaagcttccataggagtattgaaaggcagttttaccaggcctcaagctagacagatttggcaacctctgtatttgggttacagtcaacctatttggatacttggcaaaagattcttgctgtcagcatataaaatgtgcttgtcatttgtatcaattgacctttccccaaatcatgcagtattgagttatgacttgttaaatctattcccatgccagaatcttatcaatacataagaaatttaggaagattaggtgccaaaatacccagcacaatacttgtatatttttagtaccatacagaagtaaaatcccaggaactatgaacactagaccttatgtggtttattccttcaatcatttcaaacattgaaagtagggcctacatggttatttgcctgctcactttatgtttacatctcccacattcataccaatatacgtcaggtttgcttaaccattgatttttttttttttttaccaagtcttacagtgattattttacgtgtttccatgtatctcactttgtgctgtattaaaaaaacctccattttgaaaatctacgttgtacagaagcacatgtctttaatgtcttcagacaaaaaagccttacattaatttaatgtttgcactctgaggtgcaacttaacagggagggcctgagaaaagaatgggagggggctattaattatttttagcaaaatgttgcctttgtcttgtgcaaacatgtagaatatgctctttaatttagtaaaatatttttttaaaaggtagagatgctttgttattgtaatcataaacttcctgaaattcttgtaatttttttcccatacttatcagaagtgtgtttaccaacttatttttgtttgaaagtgtgattttttttttccttcccaacctctcttgcaaaaaaagaaatgggtttctgctaatgaattgagcagacatctaatattttatatgccttttgagctgtgtaacttaatatttggatacttgacaatttgttttattatgtaattgataaaatggtgatgtgtattaatgttagttcaaccatatatttatactgtctggggatgtgtggttatagttctgtgggagaaataattttgtcagtgttcaccagcttgtaaaaacttagtgcgagagctgaaacatctaaataaataatgacatgcatttatcatcattgagattggtttgcttaaaattaacttattttgtagaagacaaaatgaattgcacttcacttaatgtgtgtcctcatctttttacaaataaatgaaggattataaatgatgtcagcattttagtaaacttttagacaaaatttgttagggtcattcatgaaaactttaatactaaaagcactttccattatatactttttaaaggtctagataattttgaaccaatttattattgtgtactgaggagaaataatgtatagtagaggacagccttggtttgtaaagctcagttccactagttcatggttttgtgcaacttctgagcctcagttttctcctttgcaaattaataattacatacctttatagattttgaaattaatttaaatattagtatttggtacatgaaggcttaatgttaagtttcctttaatgatccacaataatccctttgatcacgttaatctaaatctagatgtctttgtctaattttttttgaatagcagttataaatgtaaaggactcaaagtttaagtaaaaagtgatactccaccttgtgtttcaaagaatttagttccacctcttcataccagtttaacacttaatatatttcattggattttagacagggcaaaaggaagaacaggggcctctggaggcccttggttatttaaatcttggattatttgtgatagtaatcacaaatttttggctaatttttaacctgaggttttgttttttttttaaaggaaatgcagcctagtcttgagaacataattttatataatcaattactaaatgttaaactattaccacacagcccataaaacagcatttgcgtttattgagagagaggatgtgccatcatgattaatgaaaactatcttttgagtttgaaaagaaattaatttgcagtgtttggattgtatatatggtgctaaaaataaattaatttactttataaaccttatctgtacattatacgatgtgatgaaatttgctttttatccaaatattttgtatcttgtaaatatggctaattataggaatgcctataatacatcttagattccttatatctaataagagttcaaagagttatgagttgaagtcttgaatgcaggaaactatctgatagtgttctaaaatttggttacttgggtttggatacccttagtgggatgatgtaaatagaggctagctacctaggcttgtctatagcaaccataatgttgatgtaagtaatgcggttactgaatcataagaaaatgccatctctttttagttgaaggaaaactctggaagtaggtgccattggtcattctgcagtgcactgcaaccattgtttcccctagtgccctcttttccctagggcattgctctcctattcccacgccttaacacagctctatacctagaagcagccagcccaggcatgcagtcacatttaatcacatcccccttctagagtgcttcaaaatgatgtagtccctcaacttggctaaagaatctcaatctcttgaaatttatttttttaatgtcatattcatctggtaaatatctactgtttgccaggcatttaagaatatggcaaagaacataaaagatggtgtcaccagattttggtcaccaatgagtacccgacccgttgccatgattaagagagaatgctttctattggagtttcaggaaatataatttgagaatactttaaagggaagtggaagtataagtgaatgatatttttcttttacatgtaaacaatgaagttatttcaaagttaagttttaaacaaaatacatgaagtagtgtctgccatacatgttaatattctacattcttgcttccttaaattaatatgtttgtgtgtatatatgtgcctcacacctgaattgaaaattaaagactggtttaaaagtggtttaaaagtgacatttaatgtttctccattacgtttggggtaaccagcctaagtggaatcttggaaggaaagtaagggaaaaacttgtatttgccttcaatgaattaaaccagtgatatgtgttaacgtatgaatgaaaggattgatggtgattttataattatatatattgccgcagtaaccagttaataaattgatagctaccattt

SEQ ID NO: 171559 - DNA, 135 bp, Homo sapiens
  Payload ID: 13734
  Gene Symbol: PTP4A1
  Gene Name: protein tyrosine phosphatase type IVA, member 1
  ENST ID: ENST00000578299
  CDS Start-End: 1-135
atgattaggccacaatcttcaatgagtaaacatattcctcaattctgtggtgttcttggtcacacatttatggagtttctgaagggcagtggagattactgccaggcacagcacgacctctatgcagacaagtga

SEQ ID NO: 171560 - DNA, 2203 bp, Homo sapiens
  Payload ID: 13734
  Gene Symbol: PTP4A1
  Gene Name: protein tyrosine phosphatase type IVA, member 1
  Uniprot ID: Q93096
  ENST ID: ENST00000626021
  CDS Start-End: 394-915
gagattactgccaggcacagcacgacctctatgcagacaagtgaactgtagaaactgattactgctccaccaagaagcccccataagagtggttatcctggacacagaagtgttgaattgaaatccacagagcattttacaagagttctgacctggatggggtaaacctcagtgcacttcttttctgttggcctcagtattactggattgaagaattgctgcttcttgttaggaggttcatttcacttatcattacttacaacttcatactcaaagcactgagaatttcaagtggagtatattgaagtagacttcagtttctttgcatcatttctgtattcaatttttttaattatttcataaccctattgagtgttttttaactaaattaacatggctcgaatgaaccgcccagctcctgtggaagtcacatacaagaacatgagatttcttattacacacaatccaaccaatgcgaccttaaacaaatttatagaggaacttaagaagtatggagttaccacaatagtaagagtatgtgaagcaacttatgacactactcttgtggagaaagaaggtatccatgttcttgattggccttttgatgatggtgcaccaccatccaaccagattgttgatgactggttaagtcttgtgaaaattaagtttcgtgaagaacctggttgttgtattgctgttcattgcgttgcaggccttgggagagctccagtacttgttgccctagcattaattgaaggtggaatgaaatacgaagatgcagtacaattcataagacaaaagcggcgtggagcttttaacagcaagcaacttctgtatttggagaagtatcgtcctaaaatgcggctgcgtttcaaagattccaacggtcatagaaacaactgttgcattcaataaaattggggtgcctaatgctactggaagtggaacttgagatagggcctaatttgttatacatattagccaacatgttggcttagtaagtctaatgaagcttccataggagtattgaaaggcagttttaccaggcctcaagctagacagatttggcaacctctgtatttgggttacagtcaacctatttggatacttggcaaaagattcttgctgtcagcatataaaatgtgcttgtcatttgtatcaattgacctttccccaaatcatgcagtattgagttatgacttgttaaatctattcccatgccagaatcttatcaatacataagaaatttaggaagattaggtgccaaaatacccagcacaatacttgtatatttttagtaccatacagaagtaaaatcccaggaactatgaacactagaccttatgtggtttattccttcaatcatttcaaacattgaaagtagggcctacatggttatttgcctgctcactttatgtttacatctcccacattcataccaatatacgtcaggtttgcttaaccattgatttttttttttttttaccaagtcttacagtgattattttacgtgtttccatgtatctcactttgtgctgtattaaaaaaacctccattttgaaaatctacgttgtacagaagcacatgtctttaatgtcttcagacaaaaaagccttacattaatttaatgtttgcactctgaggtgcaacttaacagggagggcctgagaaaagaatgggagggggctattaattatttttagcaaaatgttgcctttgtcttgtgcaaacatgtagaatatgctctttaatttagtaaaatatttttttaaaaggtagagatgctttgttattgtaatcataaacttcctgaaattcttgtaatttttttcccatacttatcagaagtgtgtttaccaacttatttttgtttgaaagtgtgattttttttttccttcccaacctctcttgcaaaaaaagaaatgggtttctgctaatgaattgagcagacatctaatattttatatgccttttgagctgtgtaacttaatatttggatacttgacaatttgttttattatgtaattgataaaatggtgatgtgtattaatgttagttcaaccatatatttatactgtctggggatgtgtggttatagttctgtgggagaaataattttgtcagtgttcaccagcttgtaaaaacttagtgcgagagctgaaacatctaaataaataatgacatgcatttatcatcattgaga

SEQ ID NO: 171561 - DNA, 447 bp, Homo sapiens
  Payload ID: 13734
  Gene Symbol: PTP4A1
  Gene Name: protein tyrosine phosphatase type IVA, member 1
  ENST ID: ENST00000627002
  CDS Start-End: 1-447
atggctcgaatgaaccgcccagctcctgtggaagtcacatacaagaacatgagatttcttattacacacaatccaaccaatgcgaccttaaacaaatttatagaggaacttaagaagtatggagttaccacaatagtaagagtatgtgaagcaacttatgacactactcttgtggagaaagaaggtatccatgttcttgattggccttttgatgatggtgcaccaccatccaaccagattgttgatgactggttaagtcttgtgaaaattaagtttcgtgaagaacctggttgttgtattgctgttcattgcgttgcaggccttgggagaaagcggcgtggagcttttaacagcaagcaacttctgtatttggagaagtatcgtcctaaaatgcggctgcgtttcaaagattccaacggtcatagaaacaactgttgcattcaataa

SEQ ID NO: 171562 - DNA, 3929 bp, Homo sapiens
  Payload ID: 13735
  Gene Symbol: PTP4A2
  Gene Name: protein tyrosine phosphatase type IVA, member 2
  Uniprot ID: Q12974
  ENST ID: ENST00000344035
  CDS Start-End: 995-1498
gcggcggcgggagctggttccggctgcgcgcgcagcggtggtggtggcggcgcgatcggccgggctgtaaccgtcgtctgtccgggagcggctggagcggcagcggcggccgggcacggcgcgaggtgacgccacagggcagcggcggcagcggaggcagcggcggcagcaggagacgcagcggcggccgcagcagcagcagcaagacggactcgtggagacgcgccgccgccgccgccgccgggccgggccgggtgtcgcgcgccgaggctgggggggagtcgtcgccgccgccgccaccgctaccgccgccgccgccgccgccgaggtgactgaggagagaggcgcctcctcgctcccgccaccgccggacttcaatgcccagtccccagctcgccagcgtttttcgttggaatatacgttgcacatttatggcgattctgagtgtgagggcagacttctgccaggctcagcacagcattttcgctgacaagtgagcttggaggttctatgtgccataattaacattgccttgaagactcctggacaccgagactggcctcagaaatagttggctttttttttttttaattgcaagcatatttcttttaatgactccagtaaaattaagcatcaagtaaacaagtggaaagtgacctacacttttaacttgtctcactagtgcctaaatgtagtaaaggctgcttaagttttgtatgtagttggattttttggagtccgaaggtatccatctgcagaaattgaggcccaaattgaatttggattcaagtggattctaaatactttgcttatcttgaagagagaagcttcataaggaataaacaagttgaatagagaaaacactgattgataataggcattttagtggtctttttaatgttttctgctgtgaaacatttcaagatttattgatttttttttttcactttccccatcacactcacacgcacgctcacactttttatttgccataatgaaccgtccagcccctgtggagatctcctatgagaacatgcgttttctgataactcacaaccctaccaatgctactctcaacaagttcacagaggaacttaagaagtatggagtgacgactttggttcgagtttgtgatgctacatatgataaagctccagttgaaaaagaaggaatccacgttctagattggccatttgatgatggagctccaccccctaatcagatagtagatgattggttaaacctgttaaaaaccaaatttcgtgaagagccaggttgctgtgttgcagtgcattgtgttgcaggattgggaagggcacctgtgctggttgcacttgctttgattgaatgtggaatgaagtacgaagatgcagttcagtttataagacaaaaaagaaggggagcgttcaattccaaacagctgctttatttggagaaataccgacctaagatgcgattacgcttcagagataccaatgggcattgctgtgttcagtagaaggaaatgtaaacgaaggctgacttgattgtgccatttagagggaactcttggtacctggaaatgtgaatctggaatattacctgtgtcatcaaagtagtgatggattcagtactcctcaaccactctcctaatgattggaacaaaagcaaacaaaaaagaaatctctctataaaatgaataaaatgtttaagaaaagagaaagagaaaaggaattaattcagtgaaggatgattttgctcctagttttggagtttgaatttctgccaggattgaattattttgaaatctcctgtctttttaaactttttcaaaataggtctctaaggaaaaccagcagaacattagcctgtgcaaaaccatctgtttggggagcacactcttccattatgcttggcacatagatctccctgtggtgggattttttttttccctttttttgtgggggagggttggtggtatatttttcccctcttttttccttcctctcctacatctcccttttcccccgatccaagttgtagatggaatagaagcccttgttgctgtagatgtgcgtgcagtctggcagccttaagcccacctgggcacttttagataaaaaaaaaaaaaaaacaaaaaacaacaccaaaaaaacagcagtgatatatatatatatatatatatatatatatatatatatatatatatatatatatatatatatatataatataatatatatatatatatatatattttccaggtggtttttagtctttactgatgaaagggtgttcatgttagtttcttcaaaaccctatctaatactaggcaaagtagccaagagccttttgttttgtttttattttgataaattagtggagaaatggcattttaagaggagtctcttctcaacttacctgagagtcgaattcttctcttccctaaccaatgaagctaagtggttatcccagaaacttgtcttctaaaagggaggactccaggccatcaataaagatgtccaggcagtgagcgtactttttacaccctgtagaattgtgggctgtagcgttactctgattttctgtctagtatcagagaatgctggtagcttaaaatttttattttaggacttgtactctgaattttcaggaaccgtcaaaggagcagcagcaaattcacatattttcgacttgagaaatgcttgtggtatgtgttttccaaactgccccctatatgtaaagttcagtttaaccactgattgccttgttattactaggttttttgagattaaaaaaaaaaaatccctggtttaaaaccaacaatgatgcctagtgagtatgtgtccacaggccataacagggtagaagagagacatcgtgcaacccaatgagtagtgaagggactgtgttgcttgtgaagcggtgtagtagcatttttgcagattcttggctgggtttagtgtactgatctagaaaagctgtttttctgctcctttgtggaaggcagttatgatcaggctgcatggacaaagcaggtagaggggcaccatcaggggctcttgcactattttcacctctaaatattacgtactcagtagtgccctgcttctagggctctgaatacgggcttaaagtcatcttgtcctgctggaatttgctgtgcagagccataagcctcccattttgttagcgtcagctaggccaataggaacagaccgggaccttgtctcacactgatgatacctcacatgttgaccggctatgtgaactgcctatttcctatgctggagttttgatttttaactaaacgcaaatctgtagattctctcctctcccatcccagaaaacaaaacaaaataatgcttttcgaaattgtttctaggactttaaaacataatggtatatccaaaattctttatttcagaatgcaacaatagattccattaatatagactcaagatcaaaacagcatacctgctaagctaagatagatggtgttgattccactgggttttgatcaatacaataacaaacctttttcctttgacatactctgaattttgttgtttggggggagggggtgtgtgtgtgtgtgtgtgtgtgtgtgtgtgtatgtgtgtgtgtgtgtgtgcacgcgcagtgtccatcagtatcagtgcctgcctgagttaggaaaattacattcctggttctgtattgaggagaaggatgtataaagcaacatgaaacattagccctccttttattttaaagactaatgttaattgttcttaaaactggattttttttccttaaagcaatttttttcttttcgatttaatgaagtattgctagctgaagccagtttgacatagagagatgtcagattgatttgaaaggtgtgcagcctgatttaaaaccaaaccctgaacccttttaaagaacaataaaacatattttacacgctc

SEQ ID NO: 171563 - DNA, 1032 bp, Homo sapiens
  Payload ID: 13735
  Gene Symbol: PTP4A2
  Gene Name: protein tyrosine phosphatase type IVA, member 2
  Uniprot ID: Q12974
  ENST ID: ENST00000457805
  CDS Start-End: 304-714
gtagtaaaggctgcttaagttttgtatgtagttggattttttggagtccgaaggtatccatctgcagaaattgaggcccaaattgaatttggattcaagtggattctaaatactttgcttatcttgaagagagaagcttcataaggaataaacaagttgaatagagaaaacactgattgataataggcattttagtggtctttttaatgttttctgctgtgaaacatttcaagatttattgatttttttttttcactttccccatcacactcacacgcacgctcacactttttatttgccataatgaaccgtccagcccctgtggagatctcctatgagaacatgcgttttctgataactcacaaccctaccaatgctactctcaacaagttcacagaggattggccatttgatgatggagctccaccccctaatcagatagtagatgattggttaaacctgttaaaaaccaaatttcgtgaagagccaggttgctgtgttgcagtgcattgtgttgcaggattgggaagggcacctgtgctggttgcacttgctttgattgaatgtggaatgaagtacgaagatgcagttcagtttataagacaaaaaagaaggggagcgttcaattccaaacagctgctttatttggagaaataccgacctaagatgcgattacgcttcagagataccaatgggcattgctgtgttcagtagaaggaaatgtaaacgaaggctgacttgattgtgccatttagagggaactcttggtacctggaaatgtgaatctggaatattacctgtgtcatcaaagtagtgatggattcagtactcctcaaccactctcctaatgattggaacaaaagcaaacaaaaaagaaatctctctataaaatgaataaaatgtttaagaaaagagaaagagaaaaggaattaattcagtgaaggatgattttgctcctagttttggagtttgaatttctgccaggattgaattattttgaaatctcctgtctttttaaactttttcaaaata

SEQ ID NO: 171564 - DNA, 911 bp, Homo sapiens
  Payload ID: 13735
  Gene Symbol: PTP4A2
  Gene Name: protein tyrosine phosphatase type IVA, member 2
  ENST ID: ENST00000532001
  CDS Start-End: 295-495
gctgcttaagttttgtatgtagttggattttttggagtccgaaggtatccatctgcagaaattgaggcccaaattgaatttggattcaagtggattctaaatactttgcttatcttgaagagagaagcttcataaggaataaacaagttgaatagagaaaacactgattgataataggcattttagtggtctttttaatgttttctgctgtgaaacatttcaagatttattgatttttttttttcactttccccatcacactcacacgcacgctcacactttttatttgccataatgaaccgtccagcccctgtggagatctcctatgagaacatgcgttttctgataactcacaaccctaccaatgctactctcaacaagttcacagaggaacttaagaagtatggagtgacgactttggttcgagtttgtgatgctacatatgataaagctccagttgaaaaagaaggaatccacgttctaatggcagagtgagaaaatgactggattgaccatagtctgtttgagtcagtaatgttggtgcattttagggagtattagaggaagtaagctcttgactaaggattggccatttgatgatggagctccaccccctaatcagatagtagatgattggttaaacctgttaaaaaccaaatttcgtgaagagccaggttgctgtgttgcagtgcattgtgttgcaggattgggaagggcacctgtgctggttgcacttgctttgattgaatgtggaatgaagtacgaagatgcagttcagtttataagacaaaaaagaaggggagcgttcaattccaaacagctgctttatttggagaaataccgacctaagatgcgattacgcttcagagataccaatgggcattgctgtgttcagtagaaggaaatgtaaa

SEQ ID NO: 171565 - DNA, 900 bp, Homo sapiens
  Payload ID: 13735
  Gene Symbol: PTP4A2
  Gene Name: protein tyrosine phosphatase type IVA, member 2
  ENST ID: ENST00000534796
  CDS Start-End: 835-900
gggggagagtgagttggtgaagggagggcgtgagcttgatcctggatagtgtttgtatgatgtgcacacgtctctgcaaatgcttgtttgaagattggctgtgctgcattttggtataattgggaggtgacatattgtcccttatctcagtaaacatttggaggaagaggacgagaaagattgaattttgcattctttaattgggaagaaaaggaaggtgaatccatgttgagctgagctagtttttcgttggaatatacgttgcacatttatggcgattctgagtgtgagggcagacttctgccaggctcagcacagcattttcgctgacaagtgagcttggaggttctatgtgccataattaacattgccttgaagactcctggacaccgagactggcctcagaaatagttggctttttttttttttaattgcaagcatatttcttttaatgactccagtaaaattaagcatcaagtaaacaagtggaaagtgacctacacttttaacttgtctcactagtgcctaaatgtagtaaaggctgcttaagttttgtatgtagttggattttttggagtccgaaggtatccatctgcagaaattgaggcccaaattgaatttggattcaagtggattctaaatactttgcttatcttgaagagagaagcttcataaggaataaacaagttgaatagagaaaacactgattgataataggcattttagtggtctttttaatgttttctgctgtgaaacatttcaagatttattgatttttttttttcactttccccatcacactcacacgcacgctcacactttttatttgccataatgaaccgtccagcccctgtggagatctcctatgagaacatgcgttttctgataactcacaaccct

SEQ ID NO: 171566 - DNA, 806 bp, Homo sapiens
  Payload ID: 13735
  Gene Symbol: PTP4A2
  Gene Name: protein tyrosine phosphatase type IVA, member 2
  ENST ID: ENST00000528253
  CDS Start-End: 400-609
aagcatatttcttttaatgactccagtaaaattaagcatcaagtaaacaagtggaaagtgacctacacttttaacttgtctcactagtgcctaaatgtagtaaaggctgcttaagttttgtatgtagttggattttttggagtccgaaggtatccatctgcagaaattgaggcccaaattgaatttggattcaagtggattctaaatactttgcttatcttgaagagagaagcttcataaggaataaacaagttgaatagagaaaacactgattgataataggcattttagtggtctttttaatgttttctgctgtgaaacatttcaagatttattgatttttttttttcactttccccatcacactcacacgcacgctcacactttttatttgccataatgaaccgtccagcccctgtggagatctcctatgagaacatgcgttttctgataactcacaaccctaccaatgctactctcaacaagttcacagaggaacttaagaagtatggagtgacgactttggttcgagtttgtgatgctacatatgataaagctccagttgaaaaagaaggaatccacgttctagtgcattttagggagtattagaggaagtaagctcttgactaaggattggccatttgatgatggagctccaccccctaatcagatagtagatgattggttaaacctgttaaaaaccaaatttcgtgaagagccaggttgctgtgttgcagtgcattgtgttgcaggattgggaagggcacctgtgctggttgcacttgctttgattgaatgtggaatga

SEQ ID NO: 171567 - DNA, 575 bp, Homo sapiens
  Payload ID: 13735
  Gene Symbol: PTP4A2
  Gene Name: protein tyrosine phosphatase type IVA, member 2
  ENST ID: ENST00000470404
  CDS Start-End: 59-280
ttttttttcactttccccatcacactcacacgcacgctcacactttttatttgccataatgaaccgtccagcccctgtggagatctcctatgagaacatgcgttttctgataactcacaaccctaccaatgctactctcaacaagttcacagaggaacttaagaagtatggagtgacgactttggttcgagtttgtgatgctacatatgataaagctccagttgaaaaagaaggaatccacgttctaggcacctgtgctggttgcacttgctttgattgaatgtggaatgaagtacgaagatgcagttcagtttataagacaaaaaagaaggggagcgttcaattccaaacagctgctttatttggagaaataccgacctaagatgcgattacgcttcagagataccaatgggcattgctgtgttcagtagaaggaaatgtaaacgaaggctgacttgattgtgccatttagagggaactcttggtacctggaaatgtgaatctggaatattacctgtgtcatcaaagtagtgatggattcagtactcctcaaccactctcctaatgattggaac

SEQ ID NO: 171568 - DNA, 830 bp, Homo sapiens
  Payload ID: 13735
  Gene Symbol: PTP4A2
  Gene Name: protein tyrosine phosphatase type IVA, member 2
  ENST ID: ENST00000468531
  CDS Start-End: 642-830
agtaaaaccatgttacagccttctgtgggaagccatttggatgtcggggtttttcgttggaatatacgttgcacatttatggcgattctgagtgtgagggcagacttctgccaggctcagcacagcattttcgctgacaagtgagcttggaggttctatgtgccataattaacattgccttgaagactcctggacaccgagactggcctcagaaatagttggctttttttttttttaattgcaagcatatttcttttaatgactccagtaaaattaagcatcaagtaaacaagtggaaagtgacctacacttttaacttgtctcactagtgcctaaatgtagtaaaggctgcttaagttttgtatgtagttggattttttggagtccgaaggtatccatctgcagaaattgaggcccaaattgaatttggattcaagtggattctaaatactttgcttatcttgaagagagaagcttcataaggaataaacaagttgaatagagaaaacactgattgataataggcattttagtggtctttttaatgttttctgctgtgaaacatttcaagatttattgatttttttttttcactttccccatcacactcacacgcacgctcacactttttatttgccataatgaaccgtccagcccctgtggagatctcctatgagaacatgcgttttctgataactcacaaccctaccaatgctactctcaacaagttcacagaggaacttaagaagtatggagtgacgactttggttcgagtttgtgatgctacatatgataaagctccagttgaaaaagaaggaatccacgttcta

SEQ ID NO: 171569 - DNA, 3353 bp, Homo sapiens
  Payload ID: 13735
  Gene Symbol: PTP4A2
  Gene Name: protein tyrosine phosphatase type IVA, member 2
  Uniprot ID: Q12974
  ENST ID: ENST00000602725
  CDS Start-End: 419-922
tttttttttttttaattgcaagcatatttcttttaatgactccagtaaaattaagcatcaagtaaacaagtggaaagtgacctacacttttaacttgtctcactagtgcctaaatgtagtaaaggctgcttaagttttgtatgtagttggattttttggagtccgaaggtatccatctgcagaaattgaggcccaaattgaatttggattcaagtggattctaaatactttgcttatcttgaagagagaagcttcataaggaataaacaagttgaatagagaaaacactgattgataataggcattttagtggtctttttaatgttttctgctgtgaaacatttcaagatttattgatttttttttttcactttccccatcacactcacacgcacgctcacactttttatttgccataatgaaccgtccagcccctgtggagatctcctatgagaacatgcgttttctgataactcacaaccctaccaatgctactctcaacaagttcacagaggaacttaagaagtatggagtgacgactttggttcgagtttgtgatgctacatatgataaagctccagttgaaaaagaaggaatccacgttctagattggccatttgatgatggagctccaccccctaatcagatagtagatgattggttaaacctgttaaaaaccaaatttcgtgaagagccaggttgctgtgttgcagtgcattgtgttgcaggattgggaagggcacctgtgctggttgcacttgctttgattgaatgtggaatgaagtacgaagatgcagttcagtttataagacaaaaaagaaggggagcgttcaattccaaacagctgctttatttggagaaataccgacctaagatgcgattacgcttcagagataccaatgggcattgctgtgttcagtagaaggaaatgtaaacgaaggctgacttgattgtgccatttagagggaactcttggtacctggaaatgtgaatctggaatattacctgtgtcatcaaagtagtgatggattcagtactcctcaaccactctcctaatgattggaacaaaagcaaacaaaaaagaaatctctctataaaatgaataaaatgtttaagaaaagagaaagagaaaaggaattaattcagtgaaggatgattttgctcctagttttggagtttgaatttctgccaggattgaattattttgaaatctcctgtctttttaaactttttcaaaataggtctctaaggaaaaccagcagaacattagcctgtgcaaaaccatctgtttggggagcacactcttccattatgcttggcacatagatctccctgtggtgggattttttttttccctttttttgtgggggagggttggtggtatatttttcccctcttttttccttcctctcctacatctcccttttcccccgatccaagttgtagatggaatagaagcccttgttgctgtagatgtgcgtgcagtctggcagccttaagcccacctgggcacttttagataaaaaaaaaaaaaaaacaaaaaacaacaccaaaaaaacagcagtgatatatatatatatatatatatatatatatatatatatatatatatatatatatatatatatatataatataatatatatatatatatatatattttccaggtggtttttagtctttactgatgaaagggtgttcatgttagtttcttcaaaaccctatctaatactaggcaaagtagccaagagccttttgttttgtttttattttgataaattagtggagaaatggcattttaagaggagtctcttctcaacttacctgagagtcgaattcttctcttccctaaccaatgaagctaagtggttatcccagaaacttgtcttctaaaagggaggactccaggccatcaataaagatgtccaggcagtgagcgtactttttacaccctgtagaattgtgggctgtagcgttactctgattttctgtctagtatcagagaatgctggtagcttaaaatttttattttaggacttgtactctgaattttcaggaaccgtcaaaggagcagcagcaaattcacatattttcgacttgagaaatgcttgtggtatgtgttttccaaactgccccctatatgtaaagttcagtttaaccactgattgccttgttattactaggttttttgagattaaaaaaaaaaaatccctggtttaaaaccaacaatgatgcctagtgagtatgtgtccacaggccataacagggtagaagagagacatcgtgcaacccaatgagtagtgaagggactgtgttgcttgtgaagcggtgtagtagcatttttgcagattcttggctgggtttagtgtactgatctagaaaagctgtttttctgctcctttgtggaaggcagttatgatcaggctgcatggacaaagcaggtagaggggcaccatcaggggctcttgcactattttcacctctaaatattacgtactcagtagtgccctgcttctagggctctgaatacgggcttaaagtcatcttgtcctgctggaatttgctgtgcagagccataagcctcccattttgttagcgtcagctaggccaataggaacagaccgggaccttgtctcacactgatgatacctcacatgttgaccggctatgtgaactgcctatttcctatgctggagttttgatttttaactaaacgcaaatctgtagattctctcctctcccatcccagaaaacaaaacaaaataatgcttttcgaaattgtttctaggactttaaaacataatggtatatccaaaattctttatttcagaatgcaacaatagattccattaatatagactcaagatcaaaacagcatacctgctaagctaagatagatggtgttgattccactgggttttgatcaatacaataacaaacctttttcctttgacatactctgaattttgttgtttggggggagggggtgtgtgtgtgtgtgtgtgtgtgtgtgtgtgtatgtgtgtgtgtgtgtgtgcacgcgcagtgtccatcagtatcagtgcctgcctgagttaggaaaattacattcctggttctgtattgaggagaaggatgtataaagcaacatgaaacattagccctccttttattttaaagactaatgttaattgttcttaaaactggattttttttccttaaagcaatttttttcttttcgatttaatgaagtattgctagctgaagccagtttgacatagagagatgtcagattgatttgaaaggtgtgcagcctgatttaaaaccaaaccctgaacccttttaaagaacaataaaacatattttacacgctc

SEQ ID NO: 171570 - DNA, 667 bp, Homo sapiens
  Payload ID: 13735
  Gene Symbol: PTP4A2
  Gene Name: protein tyrosine phosphatase type IVA, member 2
  Uniprot ID: Q12974
  ENST ID: ENST00000602683
  CDS Start-End: 45-473
ccccatcacactcacacgcacgctcacactttttatttgccataatgaaccgtccagcccctgtggagatctcctatgagaacatgcgttttctgataactcacaaccctaccaatgctactctcaacaagttcacagaggaacttaagaagtatggagtgacgactttggttcgagtttgtgatgctacatatgataaagctccagttgaaaaagaaggaatccacgttctagattggccatttgatgatggagctccaccccctaatcagatagtagatgattggttaaacctgttaaaaaccaaatttcgtgaagagccaggttgctgtgttgcagtgcattgtgttgcaggattgggaagaaaaagaaggggagcgttcaattccaaacagctgctttatttggagaaataccgacctaagatgcgattacgcttcagagataccaatgggcattgctgtgttcagtagaaggaaatgtaaacgaaggctgacttgattgtgccatttagagggaactcttggtacctggaaatgtgaatctggaatattacctgtgtcatcaaagtagtgatggattcagtactcctcaaccactctcctaatgattggaacaaaagcaaacaaaaaagaaatctctctataaaatgaataaaatgtttaag

SEQ ID NO: 171571 - DNA, 615 bp, Homo sapiens
  Payload ID: 13735
  Gene Symbol: PTP4A2
  Gene Name: protein tyrosine phosphatase type IVA, member 2
  ENST ID: ENST00000627328
  CDS Start-End: 406-615
aattgcaagcatatttcttttaatgactccagtaaaattaagcatcaagtaaacaagtggaaagtgacctacacttttaacttgtctcactagtgcctaaatgtagtaaaggctgcttaagttttgtatgtagttggattttttggagtccgaaggtatccatctgcagaaattgaggcccaaattgaatttggattcaagtggattctaaatactttgcttatcttgaagagagaagcttcataaggaataaacaagttgaatagagaaaacactgattgataataggcattttagtggtctttttaatgttttctgctgtgaaacatttcaagatttattgatttttttttttcactttccccatcacactcacacgcacgctcacactttttatttgccataatgaaccgtccagcccctgtggagatctcctatgagaacatgcgttttctgataactcacaaccctaccaatgctactctcaacaagttcacagaggaacttaagaagtatggagtgacgactttggttcgagtttgtgatgctacatatgataaagctccagttgaaaaagaaggaatccacgttctagtgcattttagggagtattag

SEQ ID NO: 171572 - DNA, 606 bp, Homo sapiens
  Payload ID: 13735
  Gene Symbol: PTP4A2
  Gene Name: protein tyrosine phosphatase type IVA, member 2
  ENST ID: ENST00000626355
  CDS Start-End: 406-606
aattgcaagcatatttcttttaatgactccagtaaaattaagcatcaagtaaacaagtggaaagtgacctacacttttaacttgtctcactagtgcctaaatgtagtaaaggctgcttaagttttgtatgtagttggattttttggagtccgaaggtatccatctgcagaaattgaggcccaaattgaatttggattcaagtggattctaaatactttgcttatcttgaagagagaagcttcataaggaataaacaagttgaatagagaaaacactgattgataataggcattttagtggtctttttaatgttttctgctgtgaaacatttcaagatttattgatttttttttttcactttccccatcacactcacacgcacgctcacactttttatttgccataatgaaccgtccagcccctgtggagatctcctatgagaacatgcgttttctgataactcacaaccctaccaatgctactctcaacaagttcacagaggaacttaagaagtatggagtgacgactttggttcgagtttgtgatgctacatatgataaagctccagttgaaaaagaaggaatccacgttctaatggcagagtga

SEQ ID NO: 171573 - DNA, 2710 bp, Homo sapiens
  Payload ID: 13736
  Gene Symbol: PTP4A3
  Gene Name: protein tyrosine phosphatase type IVA, member 3
  Uniprot ID: O75365
  ENST ID: ENST00000349124
  CDS Start-End: 854-1300
atgctgtgtgctgtggacccacctggggttcatggagtgggccacggggcccagccctaagcactgctgcgcccagggtcgccgcgcctcctgctgaggggtccccgtgccactggctctcaccattgccctcgcctgccgatggcctctgctgcccagcctggggccagctctaccgcctgagccccctgccccactccaggactcaccgtaccccgatggggtaacgtgacacaggccccacacgtcagaggccgctgtccccacggccactgcccgtgacccctggcccaaggcagctggagttggttcagttcaagttcattcttcctctggcccttgggggcttggggcccacctctgagtgaagggggctgtctgcccatccaccaatgtggagagggcgcccccggtgtggggtccagctctggacactgcttggcggccgggttcactttgagtttttaagttttctttgctgagcttttttggttgttctttttattttttgcctctttatgactatccagctctgagagacgggagtttggagttgcccgctttactttggttgggttggggggggcggcgggctgttttgttccttttcttttttaagagttgggttttcttttttaattatccaaacagtgggcagcttcctcccccacacccaagtatttgcacaatatttgtgcggggtatgggggtgggtttttaaatctcgtttctcttggacaagcacagggatctcgttctcctcattttttgggggtgtgtggggacttctcaggtcgtgtccccagccttctctgcagtcccttctgccctgccgggcccgtcgggaggcgccatggctcggatgaaccgcccggccccggtggaggtgagctacaaacacatgcgcttcctcatcacccacaaccccaccaacgccacgctcagcaccttcattgaggacctgaagaagtacggggctaccactgtggtgcgtgtgtgtgaagtgacctatgacaaaacgccgctggagaaggatggcatcaccgttgtggactggccgtttgacgatggggcgcccccgcccggcaaggtagtggaagactggctgagcctggtgaaggccaagttctgtgaggcccccggcagctgcgtggctgtgcactgcgtggcgggcctgggccggaagcgccgcggagccatcaacagcaagcagctcacctacctggagaaataccggcccaaacagaggctgcggttcaaagacccacacacgcacaagacccggtgctgcgttatgtagctcaggaccttggctgggcctggtcgtcatgtaggtcaggaccttggctggacctggaggccctgcccagccctgctctgcccagcccagcaggggctccaggccttggctggccccacatcgccttttcctccccgacacctccgtgcacttgtgtccgaggagcgaggagcccctcgggccctgggtggcctctgggccctttctcctgtctccgccactccctctggcggcgctggccgtggctctgtctctctgaggtgggtcgggcgccctctgcccgccccctcccacaccagccaggctggtctcctctagcctgtttgttgtggggtgggggtatattttgtaaccactgggcccccagcccctcttttgcgaccccttgtcctgacctgttctcggcaccttaaattattagaccccggggcagtcaggtgctccggacacccgaaggcaataaaacaggagccgtggccgtgtgtgtggagtgggctacagcgtcaggcggggcgggctggtggcctgggggccccagaggctgctgtctggatcctgggctggtgcccaggatggggctcccgcgtgctcttgcgctgccctctggtggccgctctgggtccttgcaccccgacccaggggccagcctgccctgtcctgtcctgataccgaggtgggagccctgccttggccagggtggccgtgttgacggttcttgggactgtgacattggaaggcgaggcaggtcaccagcactgtcctctgcaggatgggctgggattcatttggcagcttctcagggcctgtgtccggctggttggtccctgtgctgcccaaaccaggtgtccacatttccggctccgaggcgcagagaagggggcaggtggtggcttgggtggaggaagtcaccatccatcagcccagggagggagggtgccacctgggcacctggggctggatgtgagaggcctggaccagggcccgccggagggcgtggaccagatgctcatgtgttcctgggtgcagtgtctgtgttgggggctggccccaccctgggccggggtgcatggagggcatggccccagcggggaggaaggtgggcctagggctggctccagggtgtggagagcctgggagtggtctccgtcctggggccccaggaggttcccgcaaggagcgactggggcaggtgctggaggaggtcagtggacaagatggggagatgtggaaaccccaaaagccccttctcaggcagccctgcccccaagaccgacagatggctaagggggccgcagacctggctcccccagctcctgtgtggagaaagggcaacagctgtcccggatggttattctctcctttcctcaaacacatttggaactcaagtaaatccaatgcatgttgggtgaa

SEQ ID NO: 171574 - DNA, 2785 bp, Homo sapiens
  Payload ID: 13736
  Gene Symbol: PTP4A3
  Gene Name: protein tyrosine phosphatase type IVA, member 3
  Uniprot ID: O75365
  ENST ID: ENST00000329397
  CDS Start-End: 854-1375
atgctgtgtgctgtggacccacctggggttcatggagtgggccacggggcccagccctaagcactgctgcgcccagggtcgccgcgcctcctgctgaggggtccccgtgccactggctctcaccattgccctcgcctgccgatggcctctgctgcccagcctggggccagctctaccgcctgagccccctgccccactccaggactcaccgtaccccgatggggtaacgtgacacaggccccacacgtcagaggccgctgtccccacggccactgcccgtgacccctggcccaaggcagctggagttggttcagttcaagttcattcttcctctggcccttgggggcttggggcccacctctgagtgaagggggctgtctgcccatccaccaatgtggagagggcgcccccggtgtggggtccagctctggacactgcttggcggccgggttcactttgagtttttaagttttctttgctgagcttttttggttgttctttttattttttgcctctttatgactatccagctctgagagacgggagtttggagttgcccgctttactttggttgggttggggggggcggcgggctgttttgttccttttcttttttaagagttgggttttcttttttaattatccaaacagtgggcagcttcctcccccacacccaagtatttgcacaatatttgtgcggggtatgggggtgggtttttaaatctcgtttctcttggacaagcacagggatctcgttctcctcattttttgggggtgtgtggggacttctcaggtcgtgtccccagccttctctgcagtcccttctgccctgccgggcccgtcgggaggcgccatggctcggatgaaccgcccggccccggtggaggtgagctacaaacacatgcgcttcctcatcacccacaaccccaccaacgccacgctcagcaccttcattgaggacctgaagaagtacggggctaccactgtggtgcgtgtgtgtgaagtgacctatgacaaaacgccgctggagaaggatggcatcaccgttgtggactggccgtttgacgatggggcgcccccgcccggcaaggtagtggaagactggctgagcctggtgaaggccaagttctgtgaggcccccggcagctgcgtggctgtgcactgcgtggcgggcctgggccgggctccagtccttgtggcgctggcccttattgagagcgggatgaagtacgaggacgccatccagttcatccgccagaagcgccgcggagccatcaacagcaagcagctcacctacctggagaaataccggcccaaacagaggctgcggttcaaagacccacacacgcacaagacccggtgctgcgttatgtagctcaggaccttggctgggcctggtcgtcatgtaggtcaggaccttggctggacctggaggccctgcccagccctgctctgcccagcccagcaggggctccaggccttggctggccccacatcgccttttcctccccgacacctccgtgcacttgtgtccgaggagcgaggagcccctcgggccctgggtggcctctgggccctttctcctgtctccgccactccctctggcggcgctggccgtggctctgtctctctgaggtgggtcgggcgccctctgcccgccccctcccacaccagccaggctggtctcctctagcctgtttgttgtggggtgggggtatattttgtaaccactgggcccccagcccctcttttgcgaccccttgtcctgacctgttctcggcaccttaaattattagaccccggggcagtcaggtgctccggacacccgaaggcaataaaacaggagccgtggccgtgtgtgtggagtgggctacagcgtcaggcggggcgggctggtggcctgggggccccagaggctgctgtctggatcctgggctggtgcccaggatggggctcccgcgtgctcttgcgctgccctctggtggccgctctgggtccttgcaccccgacccaggggccagcctgccctgtcctgtcctgataccgaggtgggagccctgccttggccagggtggccgtgttgacggttcttgggactgtgacattggaaggcgaggcaggtcaccagcactgtcctctgcaggatgggctgggattcatttggcagcttctcagggcctgtgtccggctggttggtccctgtgctgcccaaaccaggtgtccacatttccggctccgaggcgcagagaagggggcaggtggtggcttgggtggaggaagtcaccatccatcagcccagggagggagggtgccacctgggcacctggggctggatgtgagaggcctggaccagggcccgccggagggcgtggaccagatgctcatgtgttcctgggtgcagtgtctgtgttgggggctggccccaccctgggccggggtgcatggagggcatggccccagcggggaggaaggtgggcctagggctggctccagggtgtggagagcctgggagtggtctccgtcctggggccccaggaggttcccgcaaggagcgactggggcaggtgctggaggaggtcagtggacaagatggggagatgtggaaaccccaaaagccccttctcaggcagccctgcccccaagaccgacagatggctaagggggccgcagacctggctcccccagctcctgtgtggagaaagggcaacagctgtcccggatggttattctctcctttcctcaaacacatttggaactcaagtaaatccaatgcatgttgggtgaa

SEQ ID NO: 171575 - DNA, 558 bp, Homo sapiens
  Payload ID: 13736
  Gene Symbol: PTP4A3
  Gene Name: protein tyrosine phosphatase type IVA, member 3
  ENST ID: ENST00000523147
  CDS Start-End: 348-558
gtgcgcgagggcgcgcgcgtcccgagccctccacccgtcgtgccggcgccgcccggaccgccagatgctgtgtgctgtggacccacctggggttcatggagtgggccacggggcccagccctaagcactgctgcgcccagggtcgccgcgcctcctgctgaggggtccccgtgccactggctctcaccattgccctcgcctgccgatggcctctgctgcccagcctggggccagctctaccgcctgagccccctgccccactccaggactcaccgtaccccgatggggtcgtgtccccagccttctctgcagtcccttctgccctgccgggcccgtcgggaggcgccatggctcggatgaaccgcccggccccggtggaggtgagctacaaacacatgcgcttcctcatcacccacaaccccaccaacgccacgctcagcaccttcattgaggacctgaagaagtacggggctaccactgtggtgcgtgtgtgtgaagtgacctatgacaaaacgccgctggagaaggatggcatcaccgttgtggactggccgtttg

SEQ ID NO: 171576 - DNA, 1866 bp, Homo sapiens
  Payload ID: 13736
  Gene Symbol: PTP4A3
  Gene Name: protein tyrosine phosphatase type IVA, member 3
  Uniprot ID: O75365
  ENST ID: ENST00000520105
  CDS Start-End: 944-1390
aagccggtggagccgcggccgcgcctgtgcgcgagggcgcgcgcgtcccgagccctccacccgtcgtgccggcgccgcccggaccgccagatgctgtgtgctgtggacccacctggggttcatggagtgggccacggggcccagccctaagcactgctgcgcccagggtcgccgcgcctcctgctgaggggtccccgtgccactggctctcaccattgccctcgcctgccgatggcctctgctgcccagcctggggccagctctaccgcctgagccccctgccccactccaggactcaccgtaccccgatggggtaacgtgacacaggccccacacgtcagaggccgctgtccccacggccactgcccgtgacccctggcccaaggcagctggagttggttcagttcaagttcattcttcctctggcccttgggggcttggggcccacctctgagtgaagggggctgtctgcccatccaccaatgtggagagggcgcccccggtgtggggtccagctctggacactgcttggcggccgggttcactttgagtttttaagttttctttgctgagcttttttggttgttctttttattttttgcctctttatgactatccagctctgagagacgggagtttggagttgcccgctttactttggttgggttggggggggcggcgggctgttttgttccttttcttttttaagagttgggttttcttttttaattatccaaacagtgggcagcttcctcccccacacccaagtatttgcacaatatttgtgcggggtatgggggtgggtttttaaatctcgtttctcttggacaagcacagggatctcgttctcctcattttttgggggtgtgtggggacttctcaggtcgtgtccccagccttctctgcagtcccttctgccctgccgggcccgtcgggaggcgccatggctcggatgaaccgcccggccccggtggaggtgagctacaaacacatgcgcttcctcatcacccacaaccccaccaacgccacgctcagcaccttcattgaggacctgaagaagtacggggctaccactgtggtgcgtgtgtgtgaagtgacctatgacaaaacgccgctggagaaggatggcatcaccgttgtggactggccgtttgacgatggggcgcccccgcccggcaaggtagtggaagactggctgagcctggtgaaggccaagttctgtgaggcccccggcagctgcgtggctgtgcactgcgtggcgggcctgggccggaagcgccgcggagccatcaacagcaagcagctcacctacctggagaaataccggcccaaacagaggctgcggttcaaagacccacacacgcacaagacccggtgctgcgttatgtagctcaggaccttggctgggcctggtcgtcatgtaggtcaggaccttggctggacctggaggccctgcccagccctgctctgcccagcccagcaggggctccaggccttggctggccccacatcgccttttcctccccgacacctccgtgcacttgtgtccgaggagcgaggagcccctcgggccctgggtggcctctgggccctttctcctgtctccgccactccctctggcggcgctggccgtggctctgtctctctgaggtgggtcgggcgccctctgcccgccccctcccacaccagccaggctggtctcctctagcctgtttgttgtggggtgggggtatattttgtaaccactgggcccccagcccctcttttgcgaccccttgtcctgacctgttctcggcaccttaaattattagaccccggggcagtcaggtgctccggacacccgaaggcaataaaacaggagccgtg

SEQ ID NO: 171577 - DNA, 1717 bp, Homo sapiens
  Payload ID: 13736
  Gene Symbol: PTP4A3
  Gene Name: protein tyrosine phosphatase type IVA, member 3
  Uniprot ID: O75365
  ENST ID: ENST00000521578
  CDS Start-End: 946-1467
ctaagccggtggagccgcggccgcgcctgtgcgcgagggcgcgcgcgtcccgagccctccacccgtcgtgccggcgccgcccggaccgccagatgctgtgtgctgtggacccacctggggttcatggagtgggccacggggcccagccctaagcactgctgcgcccagggtcgccgcgcctcctgctgaggggtccccgtgccactggctctcaccattgccctcgcctgccgatggcctctgctgcccagcctggggccagctctaccgcctgagccccctgccccactccaggactcaccgtaccccgatggggtaacgtgacacaggccccacacgtcagaggccgctgtccccacggccactgcccgtgacccctggcccaaggcagctggagttggttcagttcaagttcattcttcctctggcccttgggggcttggggcccacctctgagtgaagggggctgtctgcccatccaccaatgtggagagggcgcccccggtgtggggtccagctctggacactgcttggcggccgggttcactttgagtttttaagttttctttgctgagcttttttggttgttctttttattttttgcctctttatgactatccagctctgagagacgggagtttggagttgcccgctttactttggttgggttggggggggcggcgggctgttttgttccttttcttttttaagagttgggttttcttttttaattatccaaacagtgggcagcttcctcccccacacccaagtatttgcacaatatttgtgcggggtatgggggtgggtttttaaatctcgtttctcttggacaagcacagggatctcgttctcctcattttttgggggtgtgtggggacttctcaggtcgtgtccccagccttctctgcagtcccttctgccctgccgggcccgtcgggaggcgccatggctcggatgaaccgcccggccccggtggaggtgagctacaaacacatgcgcttcctcatcacccacaaccccaccaacgccacgctcagcaccttcattgaggacctgaagaagtacggggctaccactgtggtgcgtgtgtgtgaagtgacctatgacaaaacgccgctggagaaggatggcatcaccgttgtggactggccgtttgacgatggggcgcccccgcccggcaaggtagtggaagactggctgagcctggtgaaggccaagttctgtgaggcccccggcagctgcgtggctgtgcactgcgtggcgggcctgggccgggctccagtccttgtggcgctggcccttattgagagcgggatgaagtacgaggacgccatccagttcatccgccagaagcgccgcggagccatcaacagcaagcagctcacctacctggagaaataccggcccaaacagaggctgcggttcaaagacccacacacgcacaagacccggtgctgcgttatgtagctcaggaccttggctgggcctggtcgtcatgtaggtcaggaccttggctggacctggaggccctgcccagccctgctctgcccagcccagcaggggctccaggccttggctggccccacatcgccttttcctccccgacacctccgtgcacttgtgtccgaggagcgaggagcccctcgggccctgggtggcctctgggccctttctcctgtctccgccactccctctggcggcgctggccgtggctctg

SEQ ID NO: 171578 - DNA, 963 bp, Homo sapiens
  Payload ID: 13736
  Gene Symbol: PTP4A3
  Gene Name: protein tyrosine phosphatase type IVA, member 3
  ENST ID: ENST00000524028
  CDS Start-End: 224-487
cttttttaattatccaaacagtgggcagcttcctcccccacacccaagtatttgcacaatatttgtgcggggtatgggggtgggtttttaaatctcgtttctcttggacaagcacagggatctcgttctcctcattttttgggggtgtgtggggacttctcaggtcgtgtccccagccttctctgcagtcccttctgccctgccgggcccgtcgggaggcgccatggctcggatgaaccgcccggccccggtggaggtgagctacaaacacatgcgcttcctcatcacccacaaccccaccaacgccacgctcagcaccttcattgagagcgggatgaagtacgaggacgccatccagttcatccgccagaagcgccgcggagccatcaacagcaagcagctcacctacctggagaaataccggcccaaacagaggctgcggttcaaagacccacacacgcacaagacccggtgctgcgttatgtagctcaggaccttggctgggcctggtcgtcatgtaggtcaggaccttggctggacctggaggccctgcccagccctgctctgcccagcccagcaggggctccaggccttggctggccccacatcgccttttcctccccgacacctccgtgcacttgtgtccgaggagcgaggagcccctcgggccctgggtggcctctgggccctttctcctgtctccgccactccctctggcggcgctggccgtggctctgtctctctgaggtgggtcgggcgccctctgcccgccccctcccacaccagccaggctggtctcctctagcctgtttgttgtggggtgggggtatattttgtaaccactgggcccccagcccctcttttgcgaccccttgtcctgacctgttctcggcaccttaaattattagaccccggggcagtcaggtgctccggacacccgaaggcaataaaacaggagccgtg

SEQ ID NO: 171579 - DNA, 2710 bp, Homo sapiens; identical to SEQ ID NO: 171573
  Payload ID: 13736
  Gene Symbol: PTP4A3
  Gene Name: protein tyrosine phosphatase type IVA, member 3
  Uniprot ID: O75365
  ENST ID: ENST00000614325
  CDS Start-End: 854-1300

SEQ ID NO: 171580 - DNA, 2785 bp, Homo sapiens; identical to SEQ ID NO: 171574
  Payload ID: 13736
  Gene Symbol: PTP4A3
  Gene Name: protein tyrosine phosphatase type IVA, member 3
  Uniprot ID: O75365
  ENST ID: ENST00000622569
  CDS Start-End: 854-1375

SEQ ID NO: 171581 - DNA, 1717 bp, Homo sapiens; identical to SEQ ID NO: 171577
  Payload ID: 13736
  Gene Symbol: PTP4A3
  Gene Name: protein tyrosine phosphatase type IVA, member 3
  Uniprot ID: O75365
  ENST ID: ENST00000633518
  CDS Start-End: 946-1467

SEQ ID NO: 171582 - DNA, 1866 bp, Homo sapiens; identical to SEQ ID NO: 171576
  Payload ID: 13736
  Gene Symbol: PTP4A3
  Gene Name: protein tyrosine phosphatase type IVA, member 3
  Uniprot ID: O75365
  ENST ID: ENST00000633621
  CDS Start-End: 944-1390

SEQ ID NO: 171583 - DNA, 558 bp, Homo sapiens; identical to SEQ ID NO: 171575
  Payload ID: 13736
  Gene Symbol: PTP4A3
  Gene Name: protein tyrosine phosphatase type IVA, member 3
  ENST ID: ENST00000633262
  CDS Start-End: 348-558

SEQ ID NO: 171584 - DNA, 928 bp, Homo sapiens
  Payload ID: 13737
  Gene Symbol: PTPMT1
  Gene Name: protein tyrosine phosphatase, mitochondrial 1
  Uniprot ID: Q8WUK0
  ENST ID: ENST00000326656
  CDS Start-End: 25-438
gggtcgccgctgcgccgggccgggatggcggccaccgcgctgctggaggccggcctggcgcgggtgctcttctacccgacgctgctctacaccctgttccgcgggaaggtgccgggtcgggcgcaccgggactggtaccaccgcatcgaccccaccgtgctgctgggcgcgctgccgttgcggagcttgacgcgccagctggtacaggacgagaacgtgcgcggggtgatcaccatgaacgaggagtacgagacgaggttcctgtgcaactcttcacaggtgcacaaatggagtccagaggaggctgtaagagccatcgccaagatccggtcatacatccacatcaggcctggccagctggatgttcttaaagagttccacaagcagattactgcacgggcaacaaaggatgggacttttgtcatttcaaagacatgatgtatggggattagaaagaactcaagacactcctgcttgatacagaacaaaaagagcttaacaggaccaacagggcttaagcccagacttgacgtaacagaaatgtgccaataggtaataggtaatttttctttctctgacttgttttgttttcttgaaataacactgttgtgtggctagaaaggaaaagatttagtgtggcttgtattcatgggatacaggacagggatggggctatcatcttttcttgaatagggctaaagaagtattttaacaaaaatctattatgtacctaatattgtgcctaataatatttagcaccacaactcaaaaaacatttagcacttgaaaaaaggagactcacctctggctctttgccactgtcagaatctgaatctcactggccctgtggagtagggatcctatctggagaagtgggagcatgggctgcagtcaggactgctgcagactgagccatgtgatggtacgt

SEQ ID NO: 171585 - DNA, 768 bp, Homo sapiens
  Payload ID: 13737
  Gene Symbol: PTPMT1
  Gene Name: protein tyrosine phosphatase, mitochondrial 1
  Uniprot ID: Q8WUK0
  ENST ID: ENST00000326674
  CDS Start-End: 23-628
gtcgccgctgcgccgggccgggatggcggccaccgcgctgctggaggccggcctggcgcgggtgctcttctacccgacgctgctctacaccctgttccgcgggaaggtgccgggtcgggcgcaccgggactggtaccaccgcatcgaccccaccgtgctgctgggcgcgctgccgttgcggagcttgacgcgccagctggtacaggacgagaacgtgcgcggggtgatcaccatgaacgaggagtacgagacgaggttcctgtgcaactcttcacaggagtggaagagactaggagtcgagcagctgcggctcagcacagtagacatgactgggatccccaccttggacaacctccagaagggagtccaatttgctctcaagtaccagtcgctgggccagtgtgtttacgtgcattgtaaggctgggcgctccaggagtgccactatggtggcagcatacctgattcaggtgcacaaatggagtccagaggaggctgtaagagccatcgccaagatccggtcatacatccacatcaggcctggccagctggatgttcttaaagagttccacaagcagattactgcacgggcaacaaaggatgggacttttgtcatttcaaagacatgatgtatggggattagaaagaactcaagacactcctgcttgatacagaacaaaaagagcttaacaggaccaacagggcttaagcccagacttgacgtaacagaaatgtgccaataggtaataggtaatttttctttctctga

SEQ ID NO: 171586 - DNA, 1014 bp, Homo sapiens
  Payload ID: 13737
  Gene Symbol: PTPMT1
  Gene Name: protein tyrosine phosphatase, mitochondrial 1
  Uniprot ID: Q8WUK0
  ENST ID: ENST00000426530
  CDS Start-End: 194-649
ctccgaggccgccgggccctcctccagagtcccgccagtcccccagagtccaggccagtccccgccgtcacccggtgcgagcccgcgagaggcctagtgcagctggcagccccgccccggcacccgcctgctcttctcgcgggtccggaccgcgagcgcgggggccgacgggtcgccgctgcgccgggccgggatggcggccaccgcgctgctggaggccggcctggcgcgggtgctcttctacccgacgctgctctacaccctgttccgcgggaaggtgccgggtcgggcgcaccgggactggtaccaccgcatcgaccccaccgtgctgctgggcgcgctgccgttgcggagcttgacgcgccaggtgagccgggccggggagcccgggcccctgccccgtccccgccgctccgtccctgtcgggccgctggggtctccaccgtctttgctgagccacctctttgcctcggcagctggtacaggacgagaacgtgcgcggggtgatcaccatgaacgaggagtacgagacgaggttcctgtgcaactcttcacaggtgcacaaatggagtccagaggaggctgtaagagccatcgccaagatccggtcatacatccacatcaggcctggccagctggatgttcttaaagagttccacaagcagattactgcacgggcaacaaaggatgggacttttgtcatttcaaagacatgatgtatggggattagaaagaactcaagacactcctgcttgatacagaacaaaaagagcttaacaggaccaacagggcttaagcccagacttgacgtaacagaaatgtgccaataggtaataggtaatttttctttctctgacttgttttgttttcttgaaataacactgttgtgtggctagaaaggaaaagatttagtgtggcttgtattcatgggatacaggacagggatggggctatcatcttttcttgaatagggctaaagaagtattttaacaaaaatctattatgtacctaata

SEQ ID NO: 171587 - DNA, 1611 bp, Homo sapiens
  Payload ID: 13737
  Gene Symbol: PTPMT1
  Gene Name: protein tyrosine phosphatase, mitochondrial 1
  ENST ID: ENST00000534775
  CDS Start-End: 166-672
gtcccgccagtcccccagagtccaggccagtccccgccgtcacccggtgcgagcccgcgagaggcctagtgcagctggcagccccgccccggcacccgcctgctcttctcgcgggtccggaccgcgagcgcgggggccgacgggtcgccgctgcgccgggccgggatggcggccaccgcgctgctggaggccggcctggcgcgggtgctcttctacccgacgctgctctacaccctgttccgcgggaaggtgccgggtcgggcgcaccgggactggtaccaccgcatcgaccccaccgtgctgctgggcgcgctgccgttgcggagcttgacgcgccaggtgagccgggccggggagcccgggcccctgccccgtccccgccgctccgtccctgtcgggccgctggggtctccaccgtctttgctgagccacctctttgcctcggcagctggtacaggacgagaacgtgcgcggggtgatcaccatgaacgaggagtacgagacgaggttcctgtgcaactcttcacaggagtggaagagactaggagtcgagcagctgcggctcagcacagtagacatgactgggatccccaccttggacaacctccagaagggagtccaatttgctctcaagtaccagtcgctgggccagtgtgtttacgtgcattgtaaggctgggcgctccaggagtgccactatggtggcagcatacctgattcaggtgcacaaatggagtccagaggaggctgtaagagccatcgccaagatccggtcatacatccacatcaggcctggccagctggatgttcttaaagagttccacaagcagattactgcacgggcaacaaaggatgggacttttgtcatttcaaagacatgatgtatggggattagaaagaactcaagacactcctgcttgatacagaacaaaaagagcttaacaggaccaacagggcttaagcccagacttgacgtaacagaaatgtgccaataggtaataggtaatttttctttctctgacttgttttgttttcttgaaataacactgttgtgtggctagaaaggaaaagatttagtgtggcttgtattcatgggatacaggacagggatggggctatcatcttttcttgaatagggctaaagaagtattttaacaaaaatctattatgtacctaatattgtgcctaataatatttagcaccacaactcaaaaaacatttagcacttgaaaaaaggagactcacctctggctctttgccactgtcagaatctgaatctcactggccctgtggagtagggatcctatctggagaagtgggagcatgggctgcagtcaggactgctgcagactgagccatgtgatggtacgtaatgagttcccctgagggaatgaaacaccctcaccccttcaaagtcacccctttggaattcaacacagacacacatatcccttcaaaaacttttatttgtatcaacagttcctagctcttgacttagcttagagcttttaaaagagcagacaccttatatatttgagattgaaaaagtttctgctattaatcagaaataatcatttctattttctggcttaccccttggaataagccaaaa

SEQ ID NO: 171588 - DNA, 4008 bp, Homo sapiens
  Payload ID: 13738
  Gene Symbol: PTPN1
  Gene Name: protein tyrosine phosphatase, non-receptor type 1
  Uniprot ID: P18031
  ENST ID: ENST00000371621
  CDS Start-End: 175-1482
gtgatgcgtagttccggctgccggttgacatgaagaagcagcagcggctagggcggcggtagctgcaggggtcggggattgcagcgggcctcggggctaagagcgcgacgcggcctagagcggcagacggcgcagtgggccgagaaggaggcgcagcagccgccctggcccgtcatggagatggaaaaggagttcgagcagatcgacaagtccgggagctgggcggccatttaccaggatatccgacatgaagccagtgacttcccatgtagagtggccaagcttcctaagaacaaaaaccgaaataggtacagagacgtcagtccctttgaccatagtcggattaaactacatcaagaagataatgactatatcaacgctagtttgataaaaatggaagaagcccaaaggagttacattcttacccagggccctttgcctaacacatgcggtcacttttgggagatggtgtgggagcagaaaagcaggggtgtcgtcatgctcaacagagtgatggagaaaggttcgttaaaatgcgcacaatactggccacaaaaagaagaaaaagagatgatctttgaagacacaaatttgaaattaacattgatctctgaagatatcaagtcatattatacagtgcgacagctagaattggaaaaccttacaacccaagaaactcgagagatcttacatttccactataccacatggcctgactttggagtccctgaatcaccagcctcattcttgaactttcttttcaaagtccgagagtcagggtcactcagcccggagcacgggcccgttgtggtgcactgcagtgcaggcatcggcaggtctggaaccttctgtctggctgatacctgcctcttgctgatggacaagaggaaagacccttcttccgttgatatcaagaaagtgctgttagaaatgaggaagtttcggatggggctgatccagacagccgaccagctgcgcttctcctacctggctgtgatcgaaggtgccaaattcatcatgggggactcttccgtgcaggatcagtggaaggagctttcccacgaggacctggagcccccacccgagcatatccccccacctccccggccacccaaacgaatcctggagccacacaatgggaaatgcagggagttcttcccaaatcaccagtgggtgaaggaagagacccaggaggataaagactgccccatcaaggaagaaaaaggaagccccttaaatgccgcaccctacggcatcgaaagcatgagtcaagacactgaagttagaagtcgggtcgtggggggaagtcttcgaggtgcccaggctgcctccccagccaaaggggagccgtcactgcccgagaaggacgaggaccatgcactgagttactggaagcccttcctggtcaacatgtgcgtggctacggtcctcacggccggcgcttacctctgctacaggttcctgttcaacagcaacacatagcctgaccctcctccactccacctccacccactgtccgcctctgcccgcagagcccacgcccgactagcaggcatgccgcggtaggtaagggccgccggaccgcgtagagagccgggccccggacggacgttggttctgcactaaaacccatcttccccggatgtgtgtctcacccctcatccttttactttttgccccttccactttgagtaccaaatccacaagccattttttgaggagagtgaaagagagtaccatgctggcggcgcagagggaaggggcctacacccgtcttggggctcgccccacccagggctccctcctggagcatcccaggcgggcggcacgccaacagccccccccttgaatctgcagggagcaactctccactccatatttatttaaacaattttttccccaaaggcatccatagtgcactagcattttcttgaaccaataatgtattaaaattttttgatgtcagccttgcatcaagggctttatcaaaaagtacaataataaatcctcaggtagtactgggaatggaaggctttgccatgggcctgctgcgtcagaccagtactgggaaggaggacggttgtaagcagttgttatttagtgatattgtgggtaacgtgagaagatagaacaatgctataatatataatgaacacgtgggtatttaataagaaacatgatgtgagattactttgtcccgcttattctcctccctgttatctgctagatctagttctcaatcactgctcccccgtgtgtattagaatgcatgtaaggtcttcttgtgtcctgatgaaaaatatgtgcttgaaatgagaaactttgatctctgcttactaatgtgccccatgtccaagtccaacctgcctgtgcatgacctgatcattacatggctgtggttcctaagcctgttgctgaagtcattgtcgctcagcaatagggtgcagttttccaggaataggcatttgcctaattcctggcatgacactctagtgacttcctggtgaggcccagcctgtcctggtacagcagggtcttgctgtaactcagacattccaagggtatgggaagccatattcacacctcacgctctggacatgatttagggaagcagggacaccccccgccccccacctttgggatcagcctccgccattccaagtcaacactcttcttgagcagaccgtgatttggaagagaggcacctgctggaaaccacacttcttgaaacagcctgggtgacggtcctttaggcagcctgccgccgtctctgtcccggttcaccttgccgagagaggcgcgtctgccccaccctcaaaccctgtggggcctgatggtgctcacgactcttcctgcaaagggaactgaagacctccacattaagtggctttttaacatgaaaaacacggcagctgtagctcccgagctactctcttgccagcattttcacattttgcctttctcgtggtagaagccagtacagagaaattctgtggtgggaacattcgaggtgtcaccctgcagagctatggtgaggtgtggataaggcttaggtgccaggctgtaagcattctgagctgggcttgttgtttttaagtcctgtatatgtatgtagtagtttgggtgtgtatatatagtagcatttcaaaatggacgtactggtttaacctcctatccttggagagcagctggctctccaccttgttacacattatgttagagaggtagcgagctgctctgctatatgccttaagccaatatttactcatcaggtcattattttttacaatggccatggaataaaccatttttacaaaaataaaaacaaaaaaagcaaggtgttttggtataataccttttcaggtgtgtgtggatacgtggctgcatgaccgggtgggtgggggggagtgtctcagggtcttctgtgacctcacagaactgtcagactgtacagttttccaacttgccatattcatgatgggtttgcattttagctgcaacaataaaatttttttctaaagaacatgaatttggggtgcttcccatttttttctttgcttaatagagctaaaccaggatgagtaactcctgtttctttctatccctgctgatgtgaaacagatgttgtcaatcagctggggttagagttttccacttctaagaattaacctcagcatccctgcattgccagcaccctcaggctggagcgctttccttgactgtgagcttgttgaacaccttaggcctcagcccatttccttcccaaattgacgctttgcctgtgtagggccctcagataacttaacaaacttaccagtgttgtttgaagaacagtgttttgagttgtaatctcaaaaccatatcccttacccaattacctgtaagacacaatggttaccacatctcagtacgtaaagtccacttgatatagaattgacttagaaataagacagattagtatagtttttcatttgtgtacaaaattaaacaatgtaaattccccccaaa

SEQ ID NO: 171589 - DNA, 3469 bp, Homo sapiens
  Payload ID: 13738
  Gene Symbol: PTPN1
  Gene Name: protein tyrosine phosphatase, non-receptor type 1
  ENST ID: ENST00000541713
  CDS Start-End: 336-1424
ccttctgcttcaggggcggagcccctggcaggcgtgatgcgtagttccggctgccggttgacatgaagaagcagcagcggctagggcggcggtagctgcaggggtcggggattgcagcgggcctcggggctaagagcgcgacgcggcctagagcggcagacggcgcagtgggccgagaaggaggcgcagcagccgccctggcccgtcatggagatggaaaaggagttcgagcagatcgacaagtccgggagctgggcggccatttaccagttgaccatagtcggattaaactacatcaagaagataatgactatatcaacgctagtttgataaaaatggaagaagcccaaaggagttacattcttacccagggccctttgcctaacacatgcggtcacttttgggagatggtgtgggagcagaaaagcaggggtgtcgtcatgctcaacagagtgatggagaaaggttcgttaaaatgcgcacaatactggccacaaaaagaagaaaaagagatgatctttgaagacacaaatttgaaattaacattgatctctgaagatatcaagtcatattatacagtgcgacagctagaattggaaaaccttacaacccaagaaactcgagagatcttacatttccactataccacatggcctgactttggagtccctgaatcaccagcctcattcttgaactttcttttcaaagtccgagagtcagggtcactcagcccggagcacgggcccgttgtggtgcactgcagtgcaggcatcggcaggtctggaaccttctgtctggctgatacctgcctcttgctgatggacaagaggaaagacccttcttccgttgatatcaagaaagtgctgttagaaatgaggaagtttcggatggggctgatccagacagccgaccagctgcgcttctcctacctggctgtgatcgaaggtgccaaattcatcatgggggactcttccgtgcaggatcagtggaaggagctttcccacgaggacctggagcccccacccgagcatatccccccacctccccggccacccaaacgaatcctggagccacacaatgggaaatgcagggagttcttcccaaatcaccagtgggtgaaggaagagacccaggaggataaagactgccccatcaaggaagaaaaaggaagccccttaaatgccgcaccctacggcatcgaaagcatgagtcaagacactgaagttagaagtcgggtcgtggggggaagtcttcgaggtgcccaggctgcctccccagccaaaggggagccgtcactgcccgagaaggacgaggaccatgcactgagttactggaagcccttcctggtcaacatgtgcgtggctacggtcctcacggccggcgcttacctctgctacaggttcctgttcaacagcaacacatagcctgaccctcctccactccacctccacccactgtccgcctctgcccgcagagcccacgcccgactagcaggcatgccgcggtaggtaagggccgccggaccgcgtagagagccgggccccggacggacgttggttctgcactaaaacccatcttccccggatgtgtgtctcacccctcatccttttactttttgccccttccactttgagtaccaaatccacaagccattttttgaggagagtgaaagagagtaccatgctggcggcgcagagggaaggggcctacacccgtcttggggctcgccccacccagggctccctcctggagcatcccaggcgggcggcacgccaacagccccccccttgaatctgcagggagcaactctccactccatatttatttaaacaattttttccccaaaggcatccatagtgcactagcattttcttgaaccaataatgtattaaaattttttgatgtcagccttgcatcaagggctttatcaaaaagtacaataataaatcctcaggtagtactgggaatggaaggctttgccatgggcctgctgcgtcagaccagtactgggaaggaggacggttgtaagcagttgttatttagtgatattgtgggtaacgtgagaagatagaacaatgctataatatataatgaacacgtgggtatttaataagaaacatgatgtgagattactttgtcccgcttattctcctccctgttatctgctagatctagttctcaatcactgctcccccgtgtgtattagaatgcatgtaaggtcttcttgtgtcctgatgaaaaatatgtgcttgaaatgagaaactttgatctctgcttactaatgtgccccatgtccaagtccaacctgcctgtgcatgacctgatcattacatggctgtggttcctaagcctgttgctgaagtcattgtcgctcagcaatagggtgcagttttccaggaataggcatttgcctaattcctggcatgacactctagtgacttcctggtgaggcccagcctgtcctggtacagcagggtcttgctgtaactcagacattccaagggtatgggaagccatattcacacctcacgctctggacatgatttagggaagcagggacaccccccgccccccacctttgggatcagcctccgccattccaagtcaacactcttcttgagcagaccgtgatttggaagagaggcacctgctggaaaccacacttcttgaaacagcctgggtgacggtcctttaggcagcctgccgccgtctctgtcccggttcaccttgccgagagaggcgcgtctgccccaccctcaaaccctgtggggcctgatggtgctcacgactcttcctgcaaagggaactgaagacctccacattaagtggctttttaacatgaaaaacacggcagctgtagctcccgagctactctcttgccagcattttcacattttgcctttctcgtggtagaagccagtacagagaaattctgtggtgggaacattcgaggtgtcaccctgcagagctatggtgaggtgtggataaggcttaggtgccaggctgtaagcattctgagctgggcttgttgtttttaagtcctgtatatgtatgtagtagtttgggtgtgtatatatagtagcatttcaaaatggacgtactggtttaacctcctatccttggagagcagctggctctccaccttgttacacattatgttagagaggtagcgagctgctctgctatatgccttaagccaatatttactcatcaggtcattattttttacaatggccatggaataaaccatttttacaaaaataaaaacaaaaaaagcaaggtgttttggtataataccttttcaggtgtgtgtggatacgtggctgcatgaccgggtgggtgggggggagtgtctcagggtcttctgtgacctcacagaactgtcagactgtacagttttccaacttgccatattcatgatgggtttgcattttagctgcaacaataaaatttttttctaaagaacatg

SEQ ID NO: 171590 - DNA, 6101 bp, Homo sapiens
  Payload ID: 13739
  Gene Symbol: PTPN11
  Gene Name: protein tyrosine phosphatase, non-receptor type 11
  Uniprot ID: Q06124
  ENST ID: ENST00000351677
  CDS Start-End: 199-1980
ggaggagcgagccgggccggggggcagctgcacagtctccgggatccccaggcctggaggggggtctgtgcgcggccggctggctctgccccgcgtccggtcccgagcgggcctccctcgggccagcccgatgtgaccgagcccagcggagcctgagcaaggagcgggtccgtcgcggagccggagggcgggaggaacatgacatcgcggagatggtttcacccaaatatcactggtgtggaggcagaaaacctactgttgacaagaggagttgatggcagttttttggcaaggcctagtaaaagtaaccctggagacttcacactttccgttagaagaaatggagctgtcacccacatcaagattcagaacactggtgattactatgacctgtatggaggggagaaatttgccactttggctgagttggtccagtattacatggaacatcacgggcaattaaaagagaagaatggagatgtcattgagcttaaatatcctctgaactgtgcagatcctacctctgaaaggtggtttcatggacatctctctgggaaagaagcagagaaattattaactgaaaaaggaaaacatggtagttttcttgtacgagagagccagagccaccctggagattttgttctttctgtgcgcactggtgatgacaaaggggagagcaatgacggcaagtctaaagtgacccatgttatgattcgctgtcaggaactgaaatacgacgttggtggaggagaacggtttgattctttgacagatcttgtggaacattataagaagaatcctatggtggaaacattgggtacagtactacaactcaagcagccccttaacacgactcgtataaatgctgctgaaatagaaagcagagttcgagaactaagcaaattagctgagaccacagataaagtcaaacaaggcttttgggaagaatttgagacactacaacaacaggagtgcaaacttctctacagccgaaaagagggtcaaaggcaagaaaacaaaaacaaaaatagatataaaaacatcctgccctttgatcataccagggttgtcctacacgatggtgatcccaatgagcctgtttcagattacatcaatgcaaatatcatcatgcctgaatttgaaaccaagtgcaacaattcaaagcccaaaaagagttacattgccacacaaggctgcctgcaaaacacggtgaatgacttttggcggatggtgttccaagaaaactcccgagtgattgtcatgacaacgaaagaagtggagagaggaaagagtaaatgtgtcaaatactggcctgatgagtatgctctaaaagaatatggcgtcatgcgtgttaggaacgtcaaagaaagcgccgctcatgactatacgctaagagaacttaaactttcaaaggttggacaagggaatacggagagaacggtctggcaataccactttcggacctggccggaccacggcgtgcccagcgaccctgggggcgtgctggacttcctggaggaggtgcaccataagcaggagagcatcatggatgcagggccggtcgtggtgcactgcagtgctggaattggccggacagggacgttcattgtgattgatattcttattgacatcatcagagagaaaggtgttgactgcgatattgacgttcccaaaaccatccagatggtgcggtctcagaggtcagggatggtccagacagaagcacagtaccgatttatctatatggcggtccagcattatattgaaacactacagcgcaggattgaagaagagcagaaaagcaagaggaaagggcacgaatatacaaatattaagtattctctagcggaccagacgagtggagatcagagccctctcccgccttgtactccaacgccaccctgtgcagaaatgagagaagacagtgctagagtctatgaaaacgtgggcctgatgcaacagcagaaaagtttcagatgagaaaacctgccaaaacttcagcacagaaatagatgtggactttcaccctctccctaaaaagatcaagaacagacgcaagaaagtttatgtgaagacagaatttggatttggaaggcttgcaatgtggttgactaccttttgataagcaaaatttgaaaccatttaaagaccactgtattttaactcaacaatacctgcttcccaattactcatttcctcagataagaagaaatcatctctacaatgtagacaacattatattttatagaatttgtttgaaattgaggaagcagttaaattgtgcgctgtattttgcagattatggggattcaaattctagtaataggcttttttatttttatttttatacccttaaccagtttaattttttttttcctcattgttggggatgatgagaagaaatgatttgggaaaattaagtaacaacgacctagaaaagtgagaacaatctcatttaccatcatgtatccagtagtggataattcattttgatggcttctatttttggccaaatgagaattaagccagtgcctgagactgtcagaagttgacctttgcactggcattaaagagtcatagaaaaagaatcatggatatttatgaattaaggtaagaggtgtggcttttttttttttcttttttccagccgttgaccaattatagttcggctgttgactgagaagtttgtggtgggaaaacgtttgccatattttctttgcatttgaataattgtcttgtacttagaaaaaaggcgtctatgaatgaccagtgtttttggtcgccaaatgttgctgacaaacttatcccaaaactttagtggcttaaaaaaacctgcccccaactgttagtcaatctgagctgggctcagctgggctgttcttctgccagcctgcaggtggccactcatgtggtcagcaggtcggcggagagactgggatggctgggcttctctctctgcctgcagtcctgagtctctccttcttcgtgtagtctctttcagtggcctggctggcagggtagctagacctctcacatgcagctcagagctcccaagagctcaaaagcagaaatggccaggccttctgaaaacttaagtccagaattgtcacagtgtcccttctacttccctctattgatgatgatgatgatgatgatgatgatgatgatgatgatgatgatggttttttctaatcagaagaaagctggggtatgccctctacttactaaacaagtcacaagcccagctcagattcaagaaaagggtgtgaagtagaggtgcagttaagtggggggccactagtctaacagacggtcacaaccagtgccatggaaaaccaaggatattagcaaaagcagaagttgctagtgaccttgggaagccgaagctgcttacagtagctgggacaagctgaaagtcagactaagaaataaagagagggccttcaagaagcttcctgaatgatttctgctagccctgagcctatttttggaaccagcacttggggaaactgatcttgtgaggatggatgtgtttagggacacagggcttttgagagcagcaccaccccactggggcatccccagacttgggaaacgtgactctttcttaatgccactgggttttagtcaggccacagtgagaaggaacagccctaacaggcctccagccaggttgaatgagctcatttttgttgtagccaaccagtaagatttgctaatgttctacattaagtgccttctccaaagacatccctctttgcctcatatgttgaatcatccagtgcggatatttcaatgaaaatatcattggttgacttttgtgatggtaataatgctatggcatctttgccatgaagttgtggcctccttggattcttctgactttggcttctgaaaggaaggcctagatccagccctggtggtagttcctttctgaggtctctcagtcccttgagactttggggtagtttggctgccattctcactgacaaaatgtatatcagcccccacctccaccccccaatattccttgaactttgaattgcttcagaacacaggtgtggcctgaaggtattcccttattagggaagtgtcactgctgtcttctagtcaaacttgtaaagaaaaagattccagttcagtatttgcagcaagaagcttgaatgctgttctttttatcgcattgttacatcgactcattctccattttgctttggttttgtcttgacttgacttgactttgggggtaaagtctttcaccagcacacaagagtttgattgtacaaatatatcttctgcattaacatctctgcctgttgcttaagatcagttgcttttatactcagaatggaaatacctgatcttggctagttttgttataagatattgatttcatttagatttccctccacgaggtcagcaaactatcatgttcttatgtaaacttaggccaaggccagagttatcatagtccctaggttgctacggcttatcatgtgcttggtaaaaggtgatcgcaggttctcagacgagtttactttacatgagatggaatcaggcagagaggctgggatgatggagaaagctcgaggtgaagttttaaaaaaaaagttgtggaaaggaaagttccaaagaggtggtttctgaggaagtcagagcgcccagggccagagcagtcagtaatgggtgaatgaggttgtttggaaagtcggtgtgacagacacatggatgccatctacttctaggttgctggtgggtattaaatatgcacaatattccatagctcactgaggattttaaaattataagcataggattttatattttggggtgaaagaattatctggcacattaggtattggagtttaaaaaaaaagccaaatttcacagtcttaataactttttttaaaaaaaactaaaaggcgcttcatgtccagtgtgtggcccttctgaaacttatggtcatctctcccactgaaaccaaggtcttttcaaatgtggctaaatggggatgaggagacacgggtaggactttcttggtgtgtgtgcattctttaaagagccaagttgcttcggggaaacagccaggaaaatggtcaagattatttttagaggttattttattggggattttaagaactaataacatcttgagttatttttaattcagggggatgtggaaaggtttgcaattgtcaagtgttttgttgtagcttagtatccataagggaaacttagactatagacataactacaaagccagtgcagcttttgttttctgtatgttgttgggggatcaactttcacacatagcaagcacatggcctccctgatgtcaggatgcctttgttaggatctgtatttgcccttaattttgttgaaatcttttttccttcttcctcttgaaaagttccaaaatatagtttattgtatctttcatcactaaaaatttgttcctttttcactatgggcagttcacacaaggcaaaaactattgaacagttggttttagtgtgttgtataactttgctgtatatcaaactaattttgacaagttttcatcctaagcctcaaatcatgtaattaataatttgcctgtttatttatgacctaattgtgattcttttattaataaaagctaatgggaaaaggatccctgattaagctgatgactagacctacaattaattttcctgcagtatatgaagtattgtaccagagtattaaaagatatgtaatattttattgataaatctatcctttaaaaggaatacgttttaggatgtcatcattttgatgtgaatcatgtaaatgttgataatatgctgtttattatacatttagtgtttcaagagattcacttaattgcctttttgcccacgtatattatgtagtctatttgcaactgttcttaaaaaaatgacattaaaagaatagtttatgtagagaaacattagtggatgttaattgtctccccacctatatttatgggtgttagcgcaactgctttgctagttgcaaagctgtattatcagagtaaaagtgtatttgtaaactgtatgggaactaaaaattaggaataaaaccattttcttatatga

SEQ ID NO: 171591 - DNA, 1876 bp, Homo sapiens
  Payload ID: 13739
  Gene Symbol: PTPN11
  Gene Name: protein tyrosine phosphatase, non-receptor type 11
  Uniprot ID: Q06124
  ENST ID: ENST00000392597
  CDS Start-End: 204-1586
gcggaggaggagcgagccgggccggggggcagctgcacagtctccgggatccccaggcctggaggggggtctgtgcgcggccggctggctctgccccgcgtccggtcccgagcgggcctccctcgggccagcccgatgtgaccgagcccagcggagcctgagcaaggagcgggtccgtcgcggagccggagggcgggaggaacatgacatcgcggagatggtttcacccaaatatcactggtgtggaggcagaaaacctactgttgacaagaggagttgatggcagttttttggcaaggcctagtaaaagtaaccctggagacttcacactttccgttagaagaaatggagctgtcacccacatcaagattcagaacactggtgattactatgacctgtatggaggggagaaatttgccactttggctgagttggtccagtattacatggaacatcacgggcaattaaaagagaagaatggagatgtcattgagcttaaatatcctctgaactgtgcagatcctacctctgaaaggtggtttcatggacatctctctgggaaagaagcagagaaattattaactgaaaaaggaaaacatggtagttttcttgtacgagagagccagagccaccctggagattttgttctttctgtgcgcactggtgatgacaaaggggagagcaatgacggcaagtctaaagtgacccatgttatgattcgctgtcaggaactgaaatacgacgttggtggaggagaacggtttgattctttgacagatcttgtggaacattataagaagaatcctatggtggaaacattgggtacagtactacaactcaagcagccccttaacacgactcgtataaatgctgctgaaatagaaagcagagttcgagaactaagcaaattagctgagaccacagataaagtcaaacaaggcttttgggaagaatttgagacactacaacaacaggagtgcaaacttctctacagccgaaaagagggtcaaaggcaagaaaacaaaaacaaaaatagatataaaaacatcctgccctttgatcataccagggttgtcctacacgatggtgatcccaatgagcctgtttcagattacatcaatgcaaatatcatcatgcctgaatttgaaaccaagtgcaacaattcaaagcccaaaaagagttacattgccacacaaggctgcctgcaaaacacggtgaatgacttttggcggatggtgttccaagaaaactcccgagtgattgtcatgacaacgaaagaagtggagagaggaaagagtaaatgtgtcaaatactggcctgatgagtatgctctaaaagaatatggcgtcatgcgtgttaggaacgtcaaagaaagcgccgctcatgactatacgctaagagaacttaaactttcaaaggttggacaagggaatacggagagaacggtctggcaataccactttcggacctggccggaccacggcgtgcccagcgaccctgggggcgtgctggacttcctggaggaggtgcaccataagcaggagagcatcatggatgcagggccggtcgtggtgcactgcaggtgacagctcctgctgcccctctaggccacagcctgtccctgtctcctagcgcccagggcttgcttttacctacccactcctagctctttaactgtaggaagaatttaatatctgtttgaggcatagagcaactgcattgagggacattttgatcccaaggcatatttctcctagaccctacagcactgccattggccatggccatggcaacatgctcagttaaaacagcaaagactaagtcagcattatctctgagtccaccagaagttgtgcattaaacaacttcatcctgg

SEQ ID NO: 171592 - DNA, 486 bp, Homo sapiens
  Payload ID: 13739
  Gene Symbol: PTPN11
  Gene Name: protein tyrosine phosphatase, non-receptor type 11
  ENST ID: ENST00000530818
  CDS Start-End: 1-326
acaaaggggagagcaatgacggcaagtctaaagtgacccatgttatgattcgctgtcaggaactgaaatacgacgttggtggaggagaacggtttgattctttgacagatcttgtggaacattataagaagaatcctatggtggaaacattgggtacagtactacaactcaagcagccccttaacacgactcgtataaatgctgctgaaatagaaagcagagttcgagaactaagcaaattagctgagaccacagataaagtcaaacaaggcttttgggaagaatttgagtttgctgagaatgatggtttccagcttcatccatgaccctgcaaaggacatgaactcattctttttttatggctgcatagtattccatggtgtgtatgtgccacattttctttatccggtctatcattgatgggcatttgggttggttccaagtctttgctattgtaaatagtgctgcaataaacatatgtgtgca

SEQ ID NO: 171593 - DNA, 588 bp, Homo sapiens
  Payload ID: 13739
  Gene Symbol: PTPN11
  Gene Name: protein tyrosine phosphatase, non-receptor type 11
  ENST ID: ENST00000635652
  CDS Start-End: 1-588
acggtgaatgacttttggcggatggtgttccaagaaaactcccgagtgattgtcatgacaacgaaagaagtggagagaggaaagagtaaatgtgtcaaatactggcctgatgagtatgctctaaaagaatatggcgtcatgcgtgttaggaacgtcaaagaaagcgccgctcatgactatacgctaagagaacttaaactttcaaaggttggacaatttttcttggctctactccaggggaatacggagagaacggtctggcaataccactttcggacctggccggaccacggcgtgcccagcgaccctgggggcgtgctggacttcctggaggaggtgcaccataagcaggagagcatcatggatgcagggccggtcgtggtgcactgcagtgctggaattggccggacagggacgttcattgtgattgatattcttattgacatcatcagagagaaaggtgttgactgcgatattgacgttcccaaaaccatccagatggtgcggtctcagaggtcagggatggtccagacagaagcacagtaccgatttatctatatggcggtccagcattatattgaaacacta

SEQ ID NO: 171594 - DNA, 1794 bp, Homo sapiens
  Payload ID: 13739
  Gene Symbol: PTPN11
  Gene Name: protein tyrosine phosphatase, non-receptor type 11
  ENST ID: ENST00000635625
  CDS Start-End: 1-1794
atgacatcgcggagatggtttcacccaaatatcactggtgtggaggcagaaaacctactgttgacaagaggagttgatggcagttttttggcaaggcctagtaaaagtaaccctggagacttcacactttccgttagaagaaatggagctgtcacccacatcaagattcagaacactggtgattactatgacctgtatggaggggagaaatttgccactttggctgagttggtccagtattacatggaacatcacgggcaattaaaagagaagaatggagatgtcattgagcttaaatatcctctgaactgtgcagatcctacctctgaaaggtggtttcatggacatctctctgggaaagaagcagagaaattattaactgaaaaaggaaaacatggtagttttcttgtacgagagagccagagccaccctggagattttgttctttctgtgcgcactggtgatgacaaaggggagagcaatgacggcaagtctaaagtgacccatgttatgattcgctgtcaggaactgaaatacgacgttggtggaggagaacggtttgattctttgacagatcttgtggaacattataagaagaatcctatggtggaaacattgggtacagtactacaactcaagcagccccttaacacgactcgtataaatgctgctgaaatagaaagcagagttcgagaactaagcaaattagctgagaccacagataaagtcaaacaaggcttttgggaagaatttgagacactacaacaacaggagtgcaaacttctctacagccgaaaagagggtcaaaggcaagaaaacaaaaacaaaaatagatataaaaacatcctgccctttgatcataccagggttgtcctacacgatggtgatcccaatgagcctgtttcagattacatcaatgcaaatatcatcatgcctgaatttgaaaccaagtgcaacaattcaaagcccaaaaagagttacattgccacacaaggctgcctgcaaaacacggtgaatgacttttggcggatggtgttccaagaaaactcccgagtgattgtcatgacaacgaaagaagtggagagaggaaagagtaaatgtgtcaaatactggcctgatgagtatgctctaaaagaatatggcgtcatgcgtgttaggaacgtcaaagaaagcgccgctcatgactatacgctaagagaacttaaactttcaaaggttggacaagctctactccaggggaatacggagagaacggtctggcaataccactttcggacctggccggaccacggcgtgcccagcgaccctgggggcgtgctggacttcctggaggaggtgcaccataagcaggagagcatcatggatgcagggccggtcgtggtgcactgcagtgctggaattggccggacagggacgttcattgtgattgatattcttattgacatcatcagagagaaaggtgttgactgcgatattgacgttcccaaaaccatccagatggtgcggtctcagaggtcagggatggtccagacagaagcacagtaccgatttatctatatggcggtccagcattatattgaaacactacagcgcaggattgaagaagagcagaaaagcaagaggaaagggcacgaatatacaaatattaagtattctctagcggaccagacgagtggagatcagagccctctcccgccttgtactccaacgccaccctgtgcagaaatgagagaagacagtgctagagtctatgaaaacgtgggcctgatgcaacagcagaaaagtttcagatga

SEQ ID NO: 171595 - DNA, 3406 bp, Homo sapiens
  Payload ID: 13740
  Gene Symbol: PTPN12
  Gene Name: protein tyrosine phosphatase, non-receptor type 12
  Uniprot ID: Q05209
  ENST ID: ENST00000248594
  CDS Start-End: 273-2615
agctgggggttggggttggcgctagcgcagcggctcgcctggtactgtgggagagcggcggctgctcctggaagttgtggtgtcgggagcccagccggtgccgccgcagccgccgcctagggcggtggggaggaggagggagccgcggggcttggcggggtcgggagggagggacgtgctgggggaacgagctggggaagacggagcgggctctgtgccgggcgggcgggcggcgggggggccagcgaccgcagccggggggacgcgggaggatggagcaagtggagatcctgaggaaattcatccagagggtccaggccatgaagagtcctgaccacaatggggaggacaacttcgcccgggacttcatgcggttaagaagattgtctaccaaatatagaacagaaaagatatatcccacagccactggagaaaaagaagaaaatgttaaaaagaacagatacaaggacatactgccatttgatcacagccgagttaaattgacattaaagactccttcacaagattcagactatatcaatgcaaattttataaagggcgtctatgggccaaaagcatatgtagcaactcaaggacctttagcaaatacagtaatagatttttggaggatgatatgggagtataatgttgtgatcattgtaatggcctgccgagaatttgagatgggaaggaaaaaatgtgagcgctattggcctttgtatggagaagaccccataacgtttgcaccatttaaaatttcttgtgaggatgaacaagcaagaacagactacttcatcaggacactcttacttgaatttcaaaatgaatctcgtaggctgtatcagtttcattatgtgaactggccagaccatgatgttccttcatcatttgattctattctggacatgataagcttaatgaggaaatatcaagaacatgaagatgttcctatttgtattcattgcagtgcaggctgtggaagaacaggtgccatttgtgccatagattatacgtggaatttactaaaagctgggaaaataccagaggaatttaatgtatttaatttaatacaagaaatgagaacacaaaggcattctgcagtacaaacaaaggagcaatatgaacttgttcatagagctattgcccaactgtttgaaaaacagctacaactatatgaaattcatggagctcagaaaattgctgatggagtgaatgaaattaacactgaaaacatggtcagctccatagagcctgaaaaacaagattctcctcctccaaaaccaccaaggacccgcagttgccttgttgaaggggatgctaaagaagaaatactgcagccaccggaacctcatccagtgccacccatcttgacaccttctcccccttcagcttttccaacagtcactactgtgtggcaggacaatgatagataccatccaaagccagtgttgcatatggtttcatcagaacaacattcagcagacctcaacagaaactatagtaaatcaacagaacttccagggaaaaatgaatcaacaattgaacagatagataaaaaattggaacgaaatttaagttttgagattaagaaggtccctctccaagagggaccaaaaagttttgatgggaacacacttttgaataggggacatgcaattaaaattaaatctgcttcaccttgtatagctgataaaatctctaagccacaggaattaagttcagatctaaatgtcggtgatacttcccagaattcttgtgtggactgcagtgtaacacaatcaaacaaagtttcagttactccaccagaagaatcccagaattcagacacacctccaaggccagaccgcttgcctcttgatgagaaaggacatgtaacgtggtcatttcatggacctgaaaatgccatacccatacctgatttatctgaaggcaattcctcagatatcaactatcaaactaggaaaactgtgagtttaacaccaagtcctacaacacaagttgaaacacctgatcttgtggatcatgataacacttcaccactcttcagaacacccctcagttttactaatccacttcactctgatgactcagactcagatgaaagaaactctgatggtgctgtgacccagaataaaactaatatttcaacagcaagtgccacagtttctgctgccactagtactgaaagcatttctactaggaaagtattgccaatgtccattgctagacataatatagcaggaacaacacattcaggtgctgaaaaagatgttgatgttagtgaagattcacctcctcccctacctgaaagaactcctgaatcgtttgtgttagcaagtgaacataatacacctgtaagatcggaatggagtgaacttcaaagtcaggaacgatctgaacaaaaaaagtctgaaggcttgataacctctgaaaatgagaaatgtgatcatccagcgggaggtattcactatgaaatgtgcatagaatgtccacctactttcagtgacaagagagaacaaatatcagaaaatccaacagaagccacagatattggttttggtaatcgatgtggaaaacccaaaggaccaagagatccaccttcagaatggacatgattcagggagctagaagacactttaagttatactggaaaattcaggtgccactgaaagccagatttatagtattccatctttaatatgtgggactaacagcagtgtagattgttaccttaatattttttgctgggaccatctacctgccttatactacacttaggaaaaagtattacatatggtttattttgaaacttcaagtattattgccttaatgtctcttaaccctgttacacgctgcttgtagacatgttaatatagtaatacctttatgatatattgagtttaaggactactctttttctgttttatcatgtatgcattattttgtatatgtacagggcaagtaggtatataatttgataaagttgcaattgaaatattattaacagaagatgtaagaaatttctgcatggtctaaatctttgtgtactttatttgtaaattatttgccctggagttttagaaaatagtttctgaattttaaacttgctggattcatgcagccagctttgcaggttatcagagatcaaagattgtaataataattttgtaaattgtaagcaaaaagttatttttatattatatacagtctaattgttcatcctaattgttcctgttttcatctagtcagagattcagtaagtgccttggaacaatattgaattctcttagcttgtgtgtgtttctttaatatttgaactcaagtgggattagaagactatcaaaatacatgtatgtttcaggatatttgacctgtcattaaaaaaaacaaacagttttacagtgcc

SEQ ID NO: 171596 - DNA, 704 bp, Homo sapiens
  Payload ID: 13740
  Gene Symbol: PTPN12
  Gene Name: protein tyrosine phosphatase, non-receptor type 12
  ENST ID: ENST00000407343
  CDS Start-End: 1-704
aattcttgtgtggactgcagtgtaacacaatcaaacaaagtttcagttactccaccagaagaatcccagaattcagacacacctccaaggccagaccgcttgcctcttgatgagaaaggacatgtaacgtggtcatttcatggacctgaaaatgccatacccatacctgatttatctgaaggcaattcctcagatatcaactatcaaactaggaaaactgtgagtttaacaccaagtcctacaacacaagttgaaacacctgatcttgtggatcatgataacacttcaccactcttcagaacacccctcagttttactaatccacttcactctgatgactcagactcagatgaaagaaactctgatggtgctgtgacccagaataaaactaatatttcaacagcaagtgccacagtttctgctgccactagtactgaaagcatttctactaggaaagtattgccaatgtccattgctagacataatatagcaggaacaacacattcaggtgctgaaaaagatacacctgtaagatcggaatggagtgaacttcaaagtcaggaacgatctgaacaaaaaaagtctgaaggcttgataacctctgaaaatgagaaatgtgatcatccagcgggaggtattcactatgaaatgtgcatagaatgtccacctactttcagtgacaagagagaacaaatatcagaaaa

SEQ ID NO: 171597 - DNA, 2316 bp, Homo sapiens
  Payload ID: 13740
  Gene Symbol: PTPN12
  Gene Name: protein tyrosine phosphatase, non-receptor type 12
  Uniprot ID: Q05209
  ENST ID: ENST00000415482
  CDS Start-End: 331-2316
gtcgaggcaaggtatctggctgtgaccgggaggagtgcagatcgtggctgacagaggaacgggggtattgagcggttaagaagattgtctaccaaatatagaacagaaaagatatatcccacagccactggagaaaaagaagaaaatgttaaaaagaacagatacaaggacatactgccatttgatcacagccgagttaaattgacattaaagactccttcacaagattcagactatatcaatgcaaattttataaagggcgtctatgggccaaaagcatatgtagcaactcaaggacctttagcaaatacagtaatagatttttggaggatgatatgggagtataatgttgtgatcattgtaatggcctgccgagaatttgagatgggaaggaaaaaatgtgagcgctattggcctttgtatggagaagaccccataacgtttgcaccatttaaaatttcttgtgaggatgaacaagcaagaacagactacttcatcaggacactcttacttgaatttcaaaatgaatctcgtaggctgtatcagtttcattatgtgaactggccagaccatgatgttccttcatcatttgattctattctggacatgataagcttaatgaggaaatatcaagaacatgaagatgttcctatttgtattcattgcagtgcaggctgtggaagaacaggtgccatttgtgccatagattatacgtggaatttactaaaagctgggaaaataccagaggaatttaatgtatttaatttaatacaagaaatgagaacacaaaggcattctgcagtacaaacaaaggagcaatatgaacttgttcatagagctattgcccaactgtttgaaaaacagctacaactatatgaaattcatggagctcagaaaattgctgatggagtgaatgaaattaacactgaaaacatggtcagctccatagagcctgaaaaacaagattctcctcctccaaaaccaccaaggacccgcagttgccttgttgaaggggatgctaaagaagaaatactgcagccaccggaacctcatccagtgccacccatcttgacaccttctcccccttcagcttttccaacagtcactactgtgtggcaggacaatgatagataccatccaaagccagtgttgcatatggtttcatcagaacaacattcagcagacctcaacagaaactatagtaaatcaacagaacttccagggaaaaatgaatcaacaattgaacagatagataaaaaattggaacgaaatttaagttttgagattaagaaggtccctctccaagagggaccaaaaagttttgatgggaacacacttttgaataggggacatgcaattaaaattaaatctgcttcaccttgtatagctgataaaatctctaagccacaggaattaagttcagatctaaatgtcggtgatacttcccagaattcttgtgtggactgcagtgtaacacaatcaaacaaagtttcagttactccaccagaagaatcccagaattcagacacacctccaaggccagaccgcttgcctcttgatgagaaaggacatgtaacgtggtcatttcatggacctgaaaatgccatacccatacctgatttatctgaaggcaattcctcagatatcaactatcaaactaggaaaactgtgagtttaacaccaagtcctacaacacaagttgaaacacctgatcttgtggatcatgataacacttcaccactcttcagaacacccctcagttttactaatccacttcactctgatgactcagactcagatgaaagaaactctgatggtgctgtgacccagaataaaactaatatttcaacagcaagtgccacagtttctgctgccactagtactgaaagcatttctactaggaaagtattgccaatgtccattgctagacataatatagcaggaacaacacattcaggtgctgaaaaagatgttgatgttagtgaagattcacctcctcccctacctgaaagaactcctgaatcgtttgtgttagcaagtgaacataatacacctgtaagatcggaatggagtgaacttcaaagtcaggaacgatctgaacaaaaaaagtctgaaggcttgataacctctgaaaatgagaaatgtgatcatccagcgggaggtattcactatgaaatgtgcatagaatgtccacctactttcagtgacaagagagaacaaatatcagaaaatccaacagaagccacagatattggttttggtaatcgatgtggaaaacccaaaggaccaagagatccaccttcagaatggacatga

SEQ ID NO: 171598 - DNA, 564 bp, Homo sapiens
  Payload ID: 13740
  Gene Symbol: PTPN12
  Gene Name: protein tyrosine phosphatase, non-receptor type 12
  ENST ID: ENST00000418110
  CDS Start-End: 305-564
aacataatgtcacagtacctttccagtgttaaacttctatactctgcggttaagaagattgtctaccaaatatagaacagaaaagatatatcccacagccactggagaaaaagaagaaaatgttaaaaagaacagatacaaggacatactgccatttgatcacagccgagttaaattgacattaaagactccttcacaagattcagactatatcaatgcaaattttataaagggcgtctatgggccaaaagcatatgtagcaactcaaggacctttagcaaatacagtaatagatttttggaggatgatatgggagtataatgttgtgatcattgtaatggcctgccgagaatttgagatgggaaggaaaaaatgtgagcgctattggcctttgtatggagaagaccccataacgtttgcaccatttaaaatttcttgtgaggatgaacaagcaagaacagactacttcatcaggacactcttacttgaatttcaaaatgaatctcgtaggctgtatcagtttcattatgtgaactggccagaccatgatgttccttcatcatt

SEQ ID NO: 171599 - DNA, 572 bp, Homo sapiens
  Payload ID: 13740
  Gene Symbol: PTPN12
  Gene Name: protein tyrosine phosphatase, non-receptor type 12
  ENST ID: ENST00000447995
  CDS Start-End: 73-414
ggcgtctatgggccaaaagcatatgtagcaactcaaggacctttagcaaatacagtaatagatttttggaggatgatatgggagtataatgttgtgatcattgtaatggcctgccgagaatttgagatgggaaggaaaaaatgtgagcgctattggcctttgtatggagaagaccccataacgtttgcaccatttaaaatttcttgtgaggatgaacaagcaagaacagactacttcatcaggacactcttacttgaatttcaaaatgaatctcgtaggctgtatcagtttcattatgtgaactggccagaccatgatgttccttcatcatttgattctattctggacatgataagcttaatgaggaaatatcaagaacatgaagatgttcctatttgtattcattgcagctaacttctcctttgccacttactgaacggtctgatctctggagaattcactgttattgcaggctgtggaagaacaggtgccatttgtgccatagattatacgtggaatttactaaaagctgggaaaataccagaggaatttaatgtatttaatttaataca

SEQ ID NO: 171600 - DNA, 2526 bp, Homo sapiens
  Payload ID: 13740
  Gene Symbol: PTPN12
  Gene Name: protein tyrosine phosphatase, non-receptor type 12
  Uniprot ID: Q05209
  ENST ID: ENST00000435495
  CDS Start-End: 234-2186
gtgcagatcgtggctgacagaggaacgggggtattgagcggttaagaagattgtctaccaaatatagaacagaaaagatatatcccacagccactggagaaaaagaagaaaatgttaaaaagaacagatacaaggacatactgccatttgatcacagccgagttaaattgacattaaagactccttcacaagattcagactatatcaatgcaaattttataaagatcattgtaatggcctgccgagaatttgagatgggaaggaaaaaatgtgagcgctattggcctttgtatggagaagaccccataacgtttgcaccatttaaaatttcttgtgaggatgaacaagcaagaacagactacttcatcaggacactcttacttgaatttcaaaatgaatctcgtaggctgtatcagtttcattatgtgaactggccagaccatgatgttccttcatcatttgattctattctggacatgataagcttaatgaggaaatatcaagaacatgaagatgttcctatttgtattcattgcagtgcaggctgtggaagaacaggtgccatttgtgccatagattatacgtggaatttactaaaagctgggaaaataccagaggaatttaatgtatttaatttaatacaagaaatgagaacacaaaggcattctgcagtacaaacaaaggagcaatatgaacttgttcatagagctattgcccaactgtttgaaaaacagctacaactatatgaaattcatggagctcagaaaattgctgatggagtgaatgaaattaacactgaaaacatggtcagctccatagagcctgaaaaacaagattctcctcctccaaaaccaccaaggacccgcagttgccttgttgaaggggatgctaaagaagaaatactgcagccaccggaacctcatccagtgccacccatcttgacaccttctcccccttcagcttttccaacagtcactactgtgtggcaggacaatgatagataccatccaaagccagtgttgcatatggtttcatcagaacaacattcagcagacctcaacagaaactatagtaaatcaacagaacttccagggaaaaatgaatcaacaattgaacagatagataaaaaattggaacgaaatttaagttttgagattaagaaggtccctctccaagagggaccaaaaagttttgatgggaacacacttttgaataggggacatgcaattaaaattaaatctgcttcaccttgtatagctgataaaatctctaagccacaggaattaagttcagatctaaatgtcggtgatacttcccagaattcttgtgtggactgcagtgtaacacaatcaaacaaagtttcagttactccaccagaagaatcccagaattcagacacacctccaaggccagaccgcttgcctcttgatgagaaaggacatgtaacgtggtcatttcatggacctgaaaatgccatacccatacctgatttatctgaaggcaattcctcagatatcaactatcaaactaggaaaactgtgagtttaacaccaagtcctacaacacaagttgaaacacctgatcttgtggatcatgataacacttcaccactcttcagaacacccctcagttttactaatccacttcactctgatgactcagactcagatgaaagaaactctgatggtgctgtgacccagaataaaactaatatttcaacagcaagtgccacagtttctgctgccactagtactgaaagcatttctactaggaaagtattgccaatgtccattgctagacataatatagcaggaacaacacattcaggtgctgaaaaagatgttgatgttagtgaagattcacctcctcccctacctgaaagaactcctgaatcgtttgtgttagcaagtgaacataatacacctgtaagatcggaatggagtgaacttcaaagtcaggaacgatctgaacaaaaaaagtctgaaggcttgataacctctgaaaatgagaaatgtgatcatccagcgggaggtattcactatgaaatgtgcatagaatgtccacctactttcagtgacaagagagaacaaatatcagaaaatccaacagaagccacagatattggttttggtaatcgatgtggaaaacccaaaggaccaagagatccaccttcagaatggacatgattcagggagctagaagacactttaagttatactggaaaattcaggtgccactgaaagccagatttatagtattccatctttaatatgtgggactaacagcagtgtagattgttaccttaatattttttgctgggaccatctacctgccttatactacacttaggaaaaagtattacatatggtttattttgaaacttcaagtattattgccttaatgtctcttaaccctgttacacgctgcttgtagacatgttaatatagtaatacctttatgatatattgagtttaaggactactctttttctgttttatcatgtatgcattattttgtatatgtaca

SEQ ID NO: 171601 - DNA, 552 bp, Homo sapiens
  Payload ID: 13740
  Gene Symbol: PTPN12
  Gene Name: protein tyrosine phosphatase, non-receptor type 12
  ENST ID: ENST00000433369
  CDS Start-End: 418-552
aggagggtcgaggcaaggtatctggctgtgaccgggaggagtgcagatcgtggctgacagaggaacgggggtattgagggttgtttcccggcttaggaggcggtggttgcggctgctgctcctacggatattgcgcaagactggggcgttggaaaccctcggttaagaagattgtctaccaaatatagaacagaaaagatatatcccacagccactggagaaaaagaagaaaatgttaaaaagaacagatacaaggacatactgccatttgatcacagccgagttaaattgacattaaagactccttcacaagattcagactatatcaatgcaaattttataaagggcgtctatgggccaaaagcatatgtagcaactcaaggacctttagcaaatacagtaatagatttttggaggatgatatgggagtataatgttgtgatcattgtaatggcctgccgagaatttgagatgggaaggaaaaaatgtgagcgctattggcctttgtatggagaagaccccataacgtttgcaccatttaaaatttcttgt

SEQ ID NO: 171602 - DNA, 159 bp, Homo sapiens
  Payload ID: 13740
  Gene Symbol: PTPN12
  Gene Name: protein tyrosine phosphatase, non-receptor type 12
  ENST ID: ENST00000440186
  CDS Start-End: 107-159
gttaaaaagaacagatacaaggacatactgccatggcgtctatgggccaaaagcatatgtagcaactcaaggacctttagcaaatacagtaatagatttttggaggatgatatgggagtataatgttgtgatcattgtaatggcctgccgagaatttga

SEQ ID NO: 171603 - DNA, 500 bp, Homo sapiens
  Payload ID: 13740
  Gene Symbol: PTPN12
  Gene Name: protein tyrosine phosphatase, non-receptor type 12
  ENST ID: ENST00000523952
  CDS Start-End: 1-131
aagtggagatcctgaggaaattcatccagagggtccaggccatgaagagtcctgaccacaatggggaggacaacttcgcccgggacttcatgatggagctctgtcgcccaggctggagtgcagtggtgtgatctcggctcactgcaacctcagcctcctgagtagctgggactacgggcacacaccacgaggcttggctaatttttgtattttttggtagagattgggtttcaccatgttggccaggctggtcttgagctcctgacctcaagtgatctgcccaccttggcctcctaaagtgctgggattacaggcacaagccaccgtgcccagcccatatacatatttttatcggttaagaagattgtctaccaaatatagaacagaaaagatatatcccacagccactggagaaaaagaagaaaatgttaaaaagaacagatacaaggacatactgccatttgatcacagccgagttaaattgacattaaagactcctt

SEQ ID NO: 171604 - DNA, 642 bp, Homo sapiens
  Payload ID: 13740
  Gene Symbol: PTPN12
  Gene Name: protein tyrosine phosphatase, non-receptor type 12
  ENST ID: ENST00000522115
  CDS Start-End: 1-642
tgtctaccaaatatagaacagaaaagatatatcccacagccactggagaaaaagaagaaaatgttaaaaagaacagatacaaggacatactgccatttgatcacagccgagttaaattgacattaaagactccttcacaagattcagactatatcaatgcaaattttataaagggcgtctatgggccaaaagcatatgtagcaactcaaggacctttagcaaatacagtaatagatttttggaggatgatatgggagtataatgttgtgatcattgtaatggcctgccgagaatttgagatgggaagggaggatgaacaagcaagaacagactacttcatcaggacactcttacttgaatttcaaaatgaatctcgtaggctgtatcagtttcattatgtgaactggccagaccatgatgttccttcatcatttgattctattctggacatgataagcttaatgaggaaatatcaagaacatgaagatgttcctatttgtattcattgcagtgcaggctgtggaagaacaggtgccatttgtgccatagattatacgtggaatttactaaaagctgggaaaataccagaggaatttaatgtatttaatttaatacaagaaatgagaacacaaaggcattctg

SEQ ID NO: 171605 - DNA, 7546 bp, Homo sapiens
  Payload ID: 13741
  Gene Symbol: PTPN13
  Gene Name: protein tyrosine phosphatase, non-receptor type 13 (APO-1/CD95 (Fas)-associated phosphatase)
  Uniprot ID: Q12923
  ENST ID: ENST00000316707
  CDS Start-End: 64-6948
cgtccctgcagccctcgcccggcgctccagtagcaggacccggtctcgggaccagccggtaatatgcacgtgtcactagctgaggccctggaggttcggggtggaccacttcaggaggaagaaatatgggctgtattaaatcaaagtgctgaaagtctccaagaattattcagaaaagtaagcctagctgatcctgctgcccttggcttcatcatttctccatggtctctgctgttgctgccatctggtagtgtgtcatttacagatgaaaatatttccaatcaggatcttcgagcattcactgcaccagaggttcttcaaaatcagtcactaacttctctctcagatgttgaaaagatccacatttattctcttggaatgacactgtattggggggctgattatgaagtgcctcagagccaacctattaagcttggagatcatctcaacagcatactgcttggaatgtgtgaggatgttatttacgctcgagtttctgttcggactgtgctggatgcttgcagtgcccacattaggaatagcaattgtgcaccctcattttcctacgtgaaacacttggtaaaactggttctgggaaatctttctgggacagatcagctttcctgtaacagtgaacaaaagcctgatcgaagccaggctattcgagatcgattgcgaggaaaaggattaccaacaggaagaagctctacttctgatgtactagacatacaaaagcctccactctctcatcagacctttcttaacaaagggcttagtaaatctatgggatttctgtccatcaaagatacacaagatgagaattatttcaaggacattttatcagataattctggacgtgaagattctgaaaatacattctccccttaccagttcaaaactagtggcccagaaaaaaaacccatccctggcattgatgtgctttctaagaagaagatctgggcttcatccatggacttgctttgtacagctgacagagacttctcttcaggagagactgccacatatcgtcgttgtcaccctgaggcagtaacagtgcggacttcaactactcctagaaaaaaggaggcaagatactcagatggaagtatagccttggatatctttggccctcagaaaatggatccaatatatcacactcgagaattgcccacctcctcagcaatatcaagtgctttggaccgaatccgagagagacaaaagaaacttcaggttctgagggaagccatgaatgtagaagaaccagttcgaagatacaaaacttatcatggtgatgtctttagtacctccagtgaaagtccatctattatttcctctgaatcagatttcagacaagtgagaagaagtgaagcctcaaagaggtttgaatccagcagtggtctcccaggggtagatgaaaccttaagtcaaggccagtcacagagaccgagcagacaatatgaaacaccctttgaaggcaacttaattaatcaagagatcatgctaaaacggcaagaggaagaactgatgcagctacaagccaaaatggcccttagacagtctcggttgagcctatatccaggagacacaatcaaagcgtccatgcttgacatcaccagggatccgttaagagaaattgccctagaaacagccatgactcaaagaaaactgaggaatttctttggccctgagtttgtgaaaatgacaattgaaccatttatatctttggatttgccacggtctattcttactaagaaagggaagaatgaggataaccgaaggaaagtaaacataatgcttctgaacgggcaaagactggaactgacctgtgataccaaaactatatgtaaagatgtgtttgatatggttgtggcacatattggcttagtagagcatcatttgtttgctttagctaccctcaaagataatgaatatttctttgttgatcctgacttaaaattaaccaaagtggccccagagggatggaaagaagaaccaaagaaaaagaccaaagccactgttaattttactttgtttttcagaattaaattttttatggatgatgttagtctaatacaacatactctgacgtgtcatcagtattaccttcagcttcgaaaagatattttggaggaaaggatgcactgtgatgatgagacttccttattgctggcatccttggctctccaggctgagtatggagattatcaaccagaggttcatggtgtgtcttactttagaatggagcactatttgcccgccagagtgatggagaaacttgatttatcctatatcaaagaagagttacccaaattgcataatacctatgtgggagcttctgaaaaagagacagagttagaatttttaaaggtctgccaaagactgacagaatatggagttcattttcaccgagtgcaccctgagaagaagtcacaaacaggaatattgcttggagtctgttctaaaggtgtccttgtgtttgaagttcacaatggagtgcgcacattggtccttcgctttccatggagggaaaccaagaaaatatctttttctaaaaagaaaatcacattgcaaaatacatcagatggaataaaacatggcttccagacagacaacagtaagatatgccagtacctgctgcacctctgctcttaccagcataagttccagctacagatgagagcaagacagagcaaccaagatgcccaagatattgatgtgctacacaaaagatggagcatagtatcttcaccagaaagggagatcaccttagtgaacctgaaaaaagatgcaaagtatggcttgggatttcaaattattggtggggagaagatgggaagactggacctaggcatatttatcagttcagttgcccctggaggaccagctgacttggatggatgcttgaagccaggagaccgtttgatatctgtgaatagtgtgagtctggagggagtcagccaccatgctgcaattgaaattttgcaaaatgcacctgaagatgtgacacttgttatctctcagccaaaagaaaagatatccaaagtgccttctactcctgtgcatctcaccaatgagatgaaaaactacatgaagaaatcttcctacatgcaagacagtgctatagattcttcttccaaggatcaccactggtcacgtggtaccctgaggcacatctcggagaactcctttgggccatctgggggcctgcgggaaggaagcctgagttctcaagattccaggactgagagtgccagcttgtctcaaagccaggtcaatggtttctttgccagccatttaggtgaccaaacctggcaggaatcacagcatggcagcccttccccatctgtaatatccaaagccaccgagaaagagactttcactgatagtaaccaaagcaaaactaaaaagccaggcatttctgatgtaactgattactcagaccgtggagattcagacatggatgaagccacttactccagcagtcaggatcatcaaacaccaaaacaggaatcttcctcttcagtgaatacatccaacaagatgaattttaaaactttttcttcatcacctcctaagcctggagatatctttgaggttgaactggctaaaaatgataacagcttggggataagtgtcacgggaggtgtgaatacgagtgtcagacatggtggcatttatgtgaaagctgttattccccagggagcagcagagtctgatggtagaattcacaaaggtgatcgcgtcctagctgtcaatggagttagtctagaaggagccacccataagcaagctgtggaaacactgagaaatacaggacaggtggttcatctgttattagaaaagggacaatctccaacatctaaagaacatgtcccggtaaccccacagtgtaccctttcagatcagaatgcccaaggtcaaggcccagaaaaagtgaagaaaacaactcaggtcaaagactacagctttgtcactgaagaaaatacatttgaggtaaaattatttaaaaatagctcaggtctaggattcagtttttctcgagaagataatcttataccggagcaaattaatgccagcatagtaagggttaaaaagctctttcctggacagccagcagcagaaagtggaaaaattgatgtaggagatgttatcttgaaagtgaatggagcctctttgaaaggactatctcagcaggaagtcatatctgctctcaggggaactgctccagaagtattcttgcttctctgcagacctccacctggtgtgctaccggaaattgatactgcgcttttgaccccacttcagtctccagcacaagtacttccaaacagcagtaaagactcttctcagccatcatgtgtggagcaaagcaccagctcagatgaaaatgaaatgtcagacaaaagcaaaaaacagtgcaagtccccatccagaagagacagttacagtgacagcagtgggagtggagaagatgacttagtgacagctccagcaaacatatcaaattcgacctggagttcagctttgcatcagactctaagcaacatggtatcacaggcacagagtcatcatgaagcacccaagagtcaagaagataccatttgtaccatgttttactatcctcagaaaattcccaataaaccagagtttgaggacagtaatccttcccctctaccaccggatatggctcctgggcagagttatcaaccccaatcagaatctgcttcctctagttcgatggataagtatcatatacatcacatttctgaaccaactagacaagaaaactggacacctttgaaaaatgacttggaaaatcaccttgaagactttgaactggaagtagaactcctcattaccctaattaaatcagaaaaaggaagcctgggttttacagtaaccaaaggcaatcagagaattggttgttatgttcatgatgtcatacaggatccagccaaaagtgatggaaggctaaaacctggggaccggctcataaaggttaatgatacagatgttactaatatgactcatacagatgcagttaatctgctccgggctgcatccaaaacagtcagattagttattggacgagttctagaattacccagaataccaatgttgcctcatttgctaccggacataacactaacgtgcaacaaagaggagttgggtttttccttatgtggaggtcatgacagcctttatcaagtggtatatattagtgatattaatccaaggtccgtcgcagccattgagggtaatctccagctattagatgtcatccattatgtgaacggagtcagcacacaaggaatgaccttggaggaagttaacagagcattagacatgtcacttccttcattggtattgaaagcaacaagaaatgatcttccagtggtccccagctcaaagaggtctgctgtttcagctccaaagtcaaccaaaggcaatggttcctacagtgtggggtcttgcagccagcctgccctcactcctaatgattcattctccacggttgctggggaagaaataaatgaaatatcgtaccccaaaggaaaatgttctacttatcagataaagggatcaccaaacttgactctgcccaaagaatcttatatacaagaagatgacatttatgatgattcccaagaagctgaagttatccagtctctgctggatgttgtggatgaggaagcccagaatcttttaaacgaaaataatgcagcaggatactcctgtggtccaggtacattaaagatgaatgggaagttatcagaagagagaacagaagatacagactgcgatggttcacctttacctgagtattttactgaggccaccaaaatgaatggctgtgaagaatattgtgaagaaaaagtaaaaagtgaaagcttaattcagaagccacaagaaaagaagactgatgatgatgaaataacatggggaaatgatgagttgccaatagagagaacaaaccatgaagattctgataaagatcattcctttctgacaaacgatgagctcgctgtactccctgtcgtcaaagtgcttccctctggtaaatacacgggtgccaacttaaaatcagtcattcgagtcctgcggggtttgctagatcaaggaattccttctaaggagctggagaatcttcaagaattaaaacctttggatcagtgtctaattgggcaaactaaggaaaacagaaggaagaacagatataaaaatatacttccctatgatgctacaagagtgcctcttggagatgaaggtggctatatcaatgccagcttcattaagataccagttgggaaagaagagttcgtttacattgcctgccaaggaccactgcctacaactgttggagacttctggcagatgatttgggagcaaaaatccacagtgatagccatgatgactcaagaagtagaaggagaaaaaatcaaatgccagcgctattggcccaacatcctaggcaaaacaacaatggtcagcaacagacttcgactggctcttgtgagaatgcagcagctgaagggctttgtggtgagggcaatgacccttgaagatattcagaccagagaggtgcgccatatttctcatctgaatttcactgcctggccagaccatgatacaccttctcaaccagatgatctgcttacttttatctcctacatgagacacatccacagatcaggcccaatcattacgcactgcagtgctggcattggacgttcagggaccctgatttgcatagatgtggttctgggattaatcagtcaggatcttgattttgacatctctgatttggtgcgctgcatgagactacaaagacacggaatggttcagacagaggatcaatatattttctgctatcaagtcatcctttatgtcctgacacgtcttcaagcagaagaagagcaaaaacagcagcctcagcttctgaagtgacatgaaaagagcctctggatgcatttccatttctctccttaacctccagcagactcctgctctctatccaaaataaagatcacagagcagcaagttcatacaacatgcatgttctcctctatcttagaggggtattcttcttgaaaataaaaaatattgaaatgctgtatttttacagctactttaacctatgataattatttacaaaattttaacactaaccaaacaatgcagatcttagggatgattaaaggcagcatttgatgatagcagacattgttacaaggacatggtgagtctatttttaatgcaccaatcttgtttatagcaaaaatgttttccaatattttaataaagtagttattttataggggatacttgaaaccagtatttaagctttaaatgacagtaatattggcatagaaaaaagtagcaaatgtttactgtatcaatttctaatgtttactatatagaatttcctgtaatatatttatatactttttcatgaaaatggagttatcagttatctgtttgttactgcatcatctgtttgtaatcattatctcactttgtaaataaaaacacaccttaaaacatg

SEQ ID NO: 171606 - DNA, 8573 bp, Homo sapiens
  Payload ID: 13741
  Gene Symbol: PTPN13
  Gene Name: protein tyrosine phosphatase, non-receptor type 13 (APO-1/CD95 (Fas)-associated phosphatase)
  Uniprot ID: Q12923
  ENST ID: ENST00000436978
  CDS Start-End: 481-7953
gagtagctccagcggccacgctgaggcgagggtgacacaccatgctcacggcccctggagaccgtcgtgctggcgagccgtgctccgtagctccccggtccgcctcggcagcggtcagagtcgcctacaggagttgagccgcccgcgccagaaggttttggcgaagctcttggagaggcgtcgagcacagtagggcggcgggggtgcgttgagcgctcgggggtcaggcagtcggccgggatcgccgctggggagcgtttccgaggcgaggaggaggaggaggagatgctgctcctcttctccccctccccaggctccttctacagctccttcagcccacgcccgcagccgcttgtgggagaagtggtggtggctctcggcgcccgcggcggctgccggcggcccgccccgacgccgcgtccctgcagccctcgcccggcgctccagtagcaggacccggtctcgggaccagccggtaatatgcacgtgtcactagctgaggccctggaggttcggggtggaccacttcaggaggaagaaatatgggctgtattaaatcaaagtgctgaaagtctccaagaattattcagaaaagtaagcctagctgatcctgctgcccttggcttcatcatttctccatggtctctgctgttgctgccatctggtagtgtgtcatttacagatgaaaatatttccaatcaggatcttcgagcattcactgcaccagaggttcttcaaaatcagtcactaacttctctctcagatgttgaaaagatccacatttattctcttggaatgacactgtattggggggctgattatgaagtgcctcagagccaacctattaagcttggagatcatctcaacagcatactgcttggaatgtgtgaggatgttatttacgctcgagtttctgttcggactgtgctggatgcttgcagtgcccacattaggaatagcaattgtgcaccctcattttcctacgtgaaacacttggtaaaactggttctgggaaatctttctgggacagatcagctttcctgtaacagtgaacaaaagcctgatcgaagccaggctattcgagatcgattgcgaggaaaaggattaccaacaggaagaagctctacttctgatgtactagacatacaaaagcctccactctctcatcagacctttcttaacaaagggcttagtaaatctatgggatttctgtccatcaaagatacacaagatgagaattatttcaaggacattttatcagataattctggacgtgaagattctgaaaatacattctccccttaccagttcaaaactagtggcccagaaaaaaaacccatccctggcattgatgtgctttctaagaagaagatctgggcttcatccatggacttgctttgtacagctgacagagacttctcttcaggagagactgccacatatcgtcgttgtcaccctgaggcagtaacagtgcggacttcaactactcctagaaaaaaggaggcaagatactcagatggaagtatagccttggatatctttggccctcagaaaatggatccaatatatcacactcgagaattgcccacctcctcagcaatatcaagtgctttggaccgaatccgagagagacaaaagaaacttcaggttctgagggaagccatgaatgtagaagaaccagttcgaagatacaaaacttatcatggtgatgtctttagtacctccagtgaaagtccatctattatttcctctgaatcagatttcagacaagtgagaagaagtgaagcctcaaagaggtttgaatccagcagtggtctcccaggggtagatgaaaccttaagtcaaggccagtcacagagaccgagcagacaatatgaaacaccctttgaaggcaacttaattaatcaagagatcatgctaaaacggcaagaggaagaactgatgcagctacaagccaaaatggcccttagacagtctcggttgagcctatatccaggagacacaatcaaagcgtccatgcttgacatcaccagggatccgttaagagaaattgccctagaaacagccatgactcaaagaaaactgaggaatttctttggccctgagtttgtgaaaatgacaattgaaccatttatatctttggatttgccacggtctattcttactaagaaagggaagaatgaggataaccgaaggaaagtaaacataatgcttctgaacgggcaaagactggaactgacctgtgataccaaaactatatgtaaagatgtgtttgatatggttgtggcacatattggcttagtagagcatcatttgtttgctttagctaccctcaaagataatgaatatttctttgttgatcctgacttaaaattaaccaaagtggccccagagggatggaaagaagaaccaaagaaaaagaccaaagccactgttaattttactttgtttttcagaattaaattttttatggatgatgttagtctaatacaacatactctgacgtgtcatcagtattaccttcagcttcgaaaagatattttggaggaaaggatgcactgtgatgatgagacttccttattgctggcatccttggctctccaggctgagtatggagattatcaaccagaggttcatggtgtgtcttactttagaatggagcactatttgcccgccagagtgatggagaaacttgatttatcctatatcaaagaagagttacccaaattgcataatacctatgtgggagcttctgaaaaagagacagagttagaatttttaaaggtctgccaaagactgacagaatatggagttcattttcaccgagtgcaccctgagaagaagtcacaaacaggaatattgcttggagtctgttctaaaggtgtccttgtgtttgaagttcacaatggagtgcgcacattggtccttcgctttccatggagggaaaccaagaaaatatctttttctaaaaagaaaatcacattgcaaaatacatcagatggaataaaacatggcttccagacagacaacagtaagatatgccagtacctgctgcacctctgctcttaccagcataagttccagctacagatgagagcaagacagagcaaccaagatgcccaagatattgagagagcttcgtttaggagcctgaatctccaagcagagtctgttagaggatttaatatgggacgagcaatcagcactggcagtctggccagcagcaccctcaacaaacttgctgttcgacctttatcagttcaagctgagattctgaagaggctatcctgctcagagctgtcgctttaccagccattgcaaaacagttcaaaagagaagaatgacaaagcttcatgggaggaaaagcctagagagatgagtaaatcataccatgatctcagtcaggcctctctctatccacatcggaaaaatgtcattgttaacatggaacccccaccacaaaccgttgcagagttggtgggaaaaccttctcaccagatgtcaagatctgatgcagaatctttggcaggagtgacaaaacttaataattcaaagtctgttgcgagtttaaatagaagtcctgaaaggaggaaacatgaatcagactcctcatccattgaagaccctgggcaagcatatgttctaggaatgactatgcatagttctggaaactcttcatcccaagtacccttaaaagaaaatgatgtgctacacaaaagatggagcatagtatcttcaccagaaagggagatcaccttagtgaacctgaaaaaagatgcaaagtatggcttgggatttcaaattattggtggggagaagatgggaagactggacctaggcatatttatcagttcagttgcccctggaggaccagctgacttggatggatgcttgaagccaggagaccgtttgatatctgtgaatagtgtgagtctggagggagtcagccaccatgctgcaattgaaattttgcaaaatgcacctgaagatgtgacacttgttatctctcagccaaaagaaaagatatccaaagtgccttctactcctgtgcatctcaccaatgagatgaaaaactacatgaagaaatcttcctacatgcaagacagtgctatagattcttcttccaaggatcaccactggtcacgtggtaccctgaggcacatctcggagaactcctttgggccatctgggggcctgcgggaaggaagcctgagttctcaagattccaggactgagagtgccagcttgtctcaaagccaggtcaatggtttctttgccagccatttaggtgaccaaacctggcaggaatcacagcatggcagcccttccccatctgtaatatccaaagccaccgagaaagagactttcactgatagtaaccaaagcaaaactaaaaagccaggcatttctgatgtaactgattactcagaccgtggagattcagacatggatgaagccacttactccagcagtcaggatcatcaaacaccaaaacaggaatcttcctcttcagtgaatacatccaacaagatgaattttaaaactttttcttcatcacctcctaagcctggagatatctttgaggttgaactggctaaaaatgataacagcttggggataagtgtcacggtactgtttgacaagggaggtgtgaatacgagtgtcagacatggtggcatttatgtgaaagctgttattccccagggagcagcagagtctgatggtagaattcacaaaggtgatcgcgtcctagctgtcaatggagttagtctagaaggagccacccataagcaagctgtggaaacactgagaaatacaggacaggtggttcatctgttattagaaaagggacaatctccaacatctaaagaacatgtcccggtaaccccacagtgtaccctttcagatcagaatgcccaaggtcaaggcccagaaaaagtgaagaaaacaactcaggtcaaagactacagctttgtcactgaagaaaatacatttgaggtaaaattatttaaaaatagctcaggtctaggattcagtttttctcgagaagataatcttataccggagcaaattaatgccagcatagtaagggttaaaaagctctttcctggacagccagcagcagaaagtggaaaaattgatgtaggagatgttatcttgaaagtgaatggagcctctttgaaaggactatctcagcaggaagtcatatctgctctcaggggaactgctccagaagtattcttgcttctctgcagacctccacctggtgtgctaccggaaattgatactgcgcttttgaccccacttcagtctccagcacaagtacttccaaacagcagtaaagactcttctcagccatcatgtgtggagcaaagcaccagctcagatgaaaatgaaatgtcagacaaaagcaaaaaacagtgcaagtccccatccagaagagacagttacagtgacagcagtgggagtggagaagatgacttagtgacagctccagcaaacatatcaaattcgacctggagttcagctttgcatcagactctaagcaacatggtatcacaggcacagagtcatcatgaagcacccaagagtcaagaagataccatttgtaccatgttttactatcctcagaaaattcccaataaaccagagtttgaggacagtaatccttcccctctaccaccggatatggctcctgggcagagttatcaaccccaatcagaatctgcttcctctagttcgatggataagtatcatatacatcacatttctgaaccaactagacaagaaaactggacacctttgaaaaatgacttggaaaatcaccttgaagactttgaactggaagtagaactcctcattaccctaattaaatcagaaaaaggaagcctgggttttacagtaaccaaaggcaatcagagaattggttgttatgttcatgatgtcatacaggatccagccaaaagtgatggaaggctaaaacctggggaccggctcataaaggttaatgatacagatgttactaatatgactcatacagatgcagttaatctgctccgggctgcatccaaaacagtcagattagttattggacgagttctagaattacccagaataccaatgttgcctcatttgctaccggacataacactaacgtgcaacaaagaggagttgggtttttccttatgtggaggtcatgacagcctttatcaagtggtatatattagtgatattaatccaaggtccgtcgcagccattgagggtaatctccagctattagatgtcatccattatgtgaacggagtcagcacacaaggaatgaccttggaggaagttaacagagcattagacatgtcacttccttcattggtattgaaagcaacaagaaatgatcttccagtggtccccagctcaaagaggtctgctgtttcagctccaaagtcaaccaaaggcaatggttcctacagtgtggggtcttgcagccagcctgccctcactcctaatgattcattctccacggttgctggggaagaaataaatgaaatatcgtaccccaaaggaaaatgttctacttatcagataaagggatcaccaaacttgactctgcccaaagaatcttatatacaagaagatgacatttatgatgattcccaagaagctgaagttatccagtctctgctggatgttgtggatgaggaagcccagaatcttttaaacgaaaataatgcagcaggatactcctgtggtccaggtacattaaagatgaatgggaagttatcagaagagagaacagaagatacagactgcgatggttcacctttacctgagtattttactgaggccaccaaaatgaatggctgtgaagaatattgtgaagaaaaagtaaaaagtgaaagcttaattcagaagccacaagaaaagaagactgatgatgatgaaataacatggggaaatgatgagttgccaatagagagaacaaaccatgaagattctgataaagatcattcctttctgacaaacgatgagctcgctgtactccctgtcgtcaaagtgcttccctctggtaaatacacgggtgccaacttaaaatcagtcattcgagtcctgcggggtttgctagatcaaggaattccttctaaggagctggagaatcttcaagaattaaaacctttggatcagtgtctaattgggcaaactaaggaaaacagaaggaagaacagatataaaaatatacttccctatgatgctacaagagtgcctcttggagatgaaggtggctatatcaatgccagcttcattaagataccagttgggaaagaagagttcgtttacattgcctgccaaggaccactgcctacaactgttggagacttctggcagatgatttgggagcaaaaatccacagtgatagccatgatgactcaagaagtagaaggagaaaaaatcaaatgccagcgctattggcccaacatcctaggcaaaacaacaatggtcagcaacagacttcgactggctcttgtgagaatgcagcagctgaagggctttgtggtgagggcaatgacccttgaagatattcagaccagagaggtgcgccatatttctcatctgaatttcactgcctggccagaccatgatacaccttctcaaccagatgatctgcttacttttatctcctacatgagacacatccacagatcaggcccaatcattacgcactgcagtgctggcattggacgttcagggaccctgatttgcatagatgtggttctgggattaatcagtcaggatcttgattttgacatctctgatttggtgcgctgcatgagactacaaagacacggaatggttcagacagaggatcaatatattttctgctatcaagtcatcctttatgtcctgacacgtcttcaagcagaagaagagcaaaaacagcagcctcagcttctgaagtgacatgaaaagagcctctggatgcatttccatttctctccttaacctccagcagactcctgctctctatccaaaataaagatcacagagcagcaagttcatacaacatgcatgttctcctctatcttagaggggtattcttcttgaaaataaaaaatattgaaatgctgtatttttacagctactttaacctatgataattatttacaaaattttaacactaaccaaacaatgcagatcttagggatgattaaaggcagcatttgatgatagcagacattgttacaaggacatggtgagtctatttttaatgcaccaatcttgtttatagcaaaaatgttttccaatattttaataaagtagttattttataggggatacttgaaaccagtatttaagctttaaatgacagtaatattggcatagaaaaaagtagcaaatgtttactgtatcaatttctaatgtttactatatagaatttcctgtaatatatttatatactttttcatgaaaatggagttatcagttatctgtttgttactgcatcatctgtttgtaatcattatctcactttgtaaataaaaacacaccttaaaacatgaacaagccaaaactgtgtgcag

SEQ ID NO: 171607 - DNA, 8119 bp, Homo sapiens
  Payload ID: 13741
  Gene Symbol: PTPN13
  Gene Name: protein tyrosine phosphatase, non-receptor type 13 (APO-1/CD95 (Fas)-associated phosphatase)
  Uniprot ID: Q12923
  ENST ID: ENST00000411767
  CDS Start-End: 64-7521
cgtccctgcagccctcgcccggcgctccagtagcaggacccggtctcgggaccagccggtaatatgcacgtgtcactagctgaggccctggaggttcggggtggaccacttcaggaggaagaaatatgggctgtattaaatcaaagtgctgaaagtctccaagaattattcagaaaagtaagcctagctgatcctgctgcccttggcttcatcatttctccatggtctctgctgttgctgccatctggtagtgtgtcatttacagatgaaaatatttccaatcaggatcttcgagcattcactgcaccagaggttcttcaaaatcagtcactaacttctctctcagatgttgaaaagatccacatttattctcttggaatgacactgtattggggggctgattatgaagtgcctcagagccaacctattaagcttggagatcatctcaacagcatactgcttggaatgtgtgaggatgttatttacgctcgagtttctgttcggactgtgctggatgcttgcagtgcccacattaggaatagcaattgtgcaccctcattttcctacgtgaaacacttggtaaaactggttctgggaaatctttctgggacagatcagctttcctgtaacagtgaacaaaagcctgatcgaagccaggctattcgagatcgattgcgaggaaaaggattaccaacaggaagaagctctacttctgatgtactagacatacaaaagcctccactctctcatcagacctttcttaacaaagggcttagtaaatctatgggatttctgtccatcaaagatacacaagatgagaattatttcaaggacattttatcagataattctggacgtgaagattctgaaaatacattctccccttaccagttcaaaactagtggcccagaaaaaaaacccatccctggcattgatgtgctttctaagaagaagatctgggcttcatccatggacttgctttgtacagctgacagagacttctcttcaggagagactgccacatatcgtcgttgtcaccctgaggcagtaacagtgcggacttcaactactcctagaaaaaaggaggcaagatactcagatggaagtatagccttggatatctttggccctcagaaaatggatccaatatatcacactcgagaattgcccacctcctcagcaatatcaagtgctttggaccgaatccgagagagacaaaagaaacttcaggttctgagggaagccatgaatgtagaagaaccagttcgaagatacaaaacttatcatggtgatgtctttagtacctccagtgaaagtccatctattatttcctctgaatcagatttcagacaagtgagaagaagtgaagcctcaaagaggtttgaatccagcagtggtctcccaggggtagatgaaaccttaagtcaaggccagtcacagagaccgagcagacaatatgaaacaccctttgaaggcaacttaattaatcaagagatcatgctaaaacggcaagaggaagaactgatgcagctacaagccaaaatggcccttagacagtctcggttgagcctatatccaggagacacaatcaaagcgtccatgcttgacatcaccagggatccgttaagagaaattgccctagaaacagccatgactcaaagaaaactgaggaatttctttggccctgagtttgtgaaaatgacaattgaaccatttatatctttggatttgccacggtctattcttactaagaaagggaagaatgaggataaccgaaggaaagtaaacataatgcttctgaacgggcaaagactggaactgacctgtgataccaaaactatatgtaaagatgtgtttgatatggttgtggcacatattggcttagtagagcatcatttgtttgctttagctaccctcaaagataatgaatatttctttgttgatcctgacttaaaattaaccaaagtggccccagagggatggaaagaagaaccaaagaaaaagaccaaagccactgttaattttactttgtttttcagaattaaattttttatggatgatgttagtctaatacaacatactctgacgtgtcatcagtattaccttcagcttcgaaaagatattttggaggaaaggatgcactgtgatgatgagacttccttattgctggcatccttggctctccaggctgagtatggagattatcaaccagaggttcatggtgtgtcttactttagaatggagcactatttgcccgccagagtgatggagaaacttgatttatcctatatcaaagaagagttacccaaattgcataatacctatgtgggagcttctgaaaaagagacagagttagaatttttaaaggtctgccaaagactgacagaatatggagttcattttcaccgagtgcaccctgagaagaagtcacaaacaggaatattgcttggagtctgttctaaaggtgtccttgtgtttgaagttcacaatggagtgcgcacattggtccttcgctttccatggagggaaaccaagaaaatatctttttctaaaaagaaaatcacattgcaaaatacatcagatggaataaaacatggcttccagacagacaacagtaagatatgccagtacctgctgcacctctgctcttaccagcataagttccagctacagatgagagcaagacagagcaaccaagatgcccaagatattgagagagcttcgtttaggagcctgaatctccaagcagagtctgttagaggatttaatatgggacgagcaatcagcactggcagtctggccagcagcaccctcaacaaacttgctgttcgacctttatcagttcaagctgagattctgaagaggctatcctgctcagagctgtcgctttaccagccattgcaaaacagttcaaaagagaagaatgacaaagcttcatgggaggaaaagcctagagagatgagtaaatcataccatgatctcagtcaggcctctctctatccacatcggaaaaatgtcattgttaacatggaacccccaccacaaaccgttgcagagttggtgggaaaaccttctcaccagatgtcaagatctgatgcagaatctttggcaggagtgacaaaacttaataattcaaagtctgttgcgagtttaaatagaagtcctgaaaggaggaaacatgaatcagactcctcatccattgaagaccctgggcaagcatatgttctaggaatgactatgcatagttctggaaactcttcatcccaagtacccttaaaagaaaatgatgtgctacacaaaagatggagcatagtatcttcaccagaaagggagatcaccttagtgaacctgaaaaaagatgcaaagtatggcttgggatttcaaattattggtggggagaagatgggaagactggacctaggcatatttatcagttcagttgcccctggaggaccagctgacttggatggatgcttgaagccaggagaccgtttgatatctgtgaatagtgtgagtctggagggagtcagccaccatgctgcaattgaaattttgcaaaatgcacctgaagatgtgacacttgttatctctcagccaaaagaaaagatatccaaagtgccttctactcctgtgcatctcaccaatgagatgaaaaactacatgaagaaatcttcctacatgcaagacagtgctatagattcttcttccaaggatcaccactggtcacgtggtaccctgaggcacatctcggagaactcctttgggccatctgggggcctgcgggaaggaagcctgagttctcaagattccaggactgagagtgccagcttgtctcaaagccaggtcaatggtttctttgccagccatttaggtgaccaaacctggcaggaatcacagcatggcagcccttccccatctgtaatatccaaagccaccgagaaagagactttcactgatagtaaccaaagcaaaactaaaaagccaggcatttctgatgtaactgattactcagaccgtggagattcagacatggatgaagccacttactccagcagtcaggatcatcaaacaccaaaacaggaatcttcctcttcagtgaatacatccaacaagatgaattttaaaactttttcttcatcacctcctaagcctggagatatctttgaggttgaactggctaaaaatgataacagcttggggataagtgtcacgggaggtgtgaatacgagtgtcagacatggtggcatttatgtgaaagctgttattccccagggagcagcagagtctgatggtagaattcacaaaggtgatcgcgtcctagctgtcaatggagttagtctagaaggagccacccataagcaagctgtggaaacactgagaaatacaggacaggtggttcatctgttattagaaaagggacaatctccaacatctaaagaacatgtcccggtaaccccacagtgtaccctttcagatcagaatgcccaaggtcaaggcccagaaaaagtgaagaaaacaactcaggtcaaagactacagctttgtcactgaagaaaatacatttgaggtaaaattatttaaaaatagctcaggtctaggattcagtttttctcgagaagataatcttataccggagcaaattaatgccagcatagtaagggttaaaaagctctttcctggacagccagcagcagaaagtggaaaaattgatgtaggagatgttatcttgaaagtgaatggagcctctttgaaaggactatctcagcaggaagtcatatctgctctcaggggaactgctccagaagtattcttgcttctctgcagacctccacctggtgtgctaccggaaattgatactgcgcttttgaccccacttcagtctccagcacaagtacttccaaacagcagtaaagactcttctcagccatcatgtgtggagcaaagcaccagctcagatgaaaatgaaatgtcagacaaaagcaaaaaacagtgcaagtccccatccagaagagacagttacagtgacagcagtgggagtggagaagatgacttagtgacagctccagcaaacatatcaaattcgacctggagttcagctttgcatcagactctaagcaacatggtatcacaggcacagagtcatcatgaagcacccaagagtcaagaagataccatttgtaccatgttttactatcctcagaaaattcccaataaaccagagtttgaggacagtaatccttcccctctaccaccggatatggctcctgggcagagttatcaaccccaatcagaatctgcttcctctagttcgatggataagtatcatatacatcacatttctgaaccaactagacaagaaaactggacacctttgaaaaatgacttggaaaatcaccttgaagactttgaactggaagtagaactcctcattaccctaattaaatcagaaaaaggaagcctgggttttacagtaaccaaaggcaatcagagaattggttgttatgttcatgatgtcatacaggatccagccaaaagtgatggaaggctaaaacctggggaccggctcataaaggttaatgatacagatgttactaatatgactcatacagatgcagttaatctgctccgggctgcatccaaaacagtcagattagttattggacgagttctagaattacccagaataccaatgttgcctcatttgctaccggacataacactaacgtgcaacaaagaggagttgggtttttccttatgtggaggtcatgacagcctttatcaagtggtatatattagtgatattaatccaaggtccgtcgcagccattgagggtaatctccagctattagatgtcatccattatgtgaacggagtcagcacacaaggaatgaccttggaggaagttaacagagcattagacatgtcacttccttcattggtattgaaagcaacaagaaatgatcttccagtggtccccagctcaaagaggtctgctgtttcagctccaaagtcaaccaaaggcaatggttcctacagtgtggggtcttgcagccagcctgccctcactcctaatgattcattctccacggttgctggggaagaaataaatgaaatatcgtaccccaaaggaaaatgttctacttatcagataaagggatcaccaaacttgactctgcccaaagaatcttatatacaagaagatgacatttatgatgattcccaagaagctgaagttatccagtctctgctggatgttgtggatgaggaagcccagaatcttttaaacgaaaataatgcagcaggatactcctgtggtccaggtacattaaagatgaatgggaagttatcagaagagagaacagaagatacagactgcgatggttcacctttacctgagtattttactgaggccaccaaaatgaatggctgtgaagaatattgtgaagaaaaagtaaaaagtgaaagcttaattcagaagccacaagaaaagaagactgatgatgatgaaataacatggggaaatgatgagttgccaatagagagaacaaaccatgaagattctgataaagatcattcctttctgacaaacgatgagctcgctgtactccctgtcgtcaaagtgcttccctctggtaaatacacgggtgccaacttaaaatcagtcattcgagtcctgcggggtttgctagatcaaggaattccttctaaggagctggagaatcttcaagaattaaaacctttggatcagtgtctaattgggcaaactaaggaaaacagaaggaagaacagatataaaaatatacttccctatgatgctacaagagtgcctcttggagatgaaggtggctatatcaatgccagcttcattaagataccagttgggaaagaagagttcgtttacattgcctgccaaggaccactgcctacaactgttggagacttctggcagatgatttgggagcaaaaatccacagtgatagccatgatgactcaagaagtagaaggagaaaaaatcaaatgccagcgctattggcccaacatcctaggcaaaacaacaatggtcagcaacagacttcgactggctcttgtgagaatgcagcagctgaagggctttgtggtgagggcaatgacccttgaagatattcagaccagagaggtgcgccatatttctcatctgaatttcactgcctggccagaccatgatacaccttctcaaccagatgatctgcttacttttatctcctacatgagacacatccacagatcaggcccaatcattacgcactgcagtgctggcattggacgttcagggaccctgatttgcatagatgtggttctgggattaatcagtcaggatcttgattttgacatctctgatttggtgcgctgcatgagactacaaagacacggaatggttcagacagaggatcaatatattttctgctatcaagtcatcctttatgtcctgacacgtcttcaagcagaagaagagcaaaaacagcagcctcagcttctgaagtgacatgaaaagagcctctggatgcatttccatttctctccttaacctccagcagactcctgctctctatccaaaataaagatcacagagcagcaagttcatacaacatgcatgttctcctctatcttagaggggtattcttcttgaaaataaaaaatattgaaatgctgtatttttacagctactttaacctatgataattatttacaaaattttaacactaaccaaacaatgcagatcttagggatgattaaaggcagcatttgatgatagcagacattgttacaaggacatggtgagtctatttttaatgcaccaatcttgtttatagcaaaaatgttttccaatattttaataaagtagttattttataggggatacttgaaaccagtatttaagctttaaatgacagtaatattggcatagaaaaaagtagcaaatgtttactgtatcaatttctaatgtttactatatagaatttcctgtaatatatttatatactttttcatgaaaatggagttatcagttatctgtttgttactgcatcatctgtttgtaatcattatctcactttgtaaataaaaacacaccttaaaacatg

SEQ ID NO: 171608 - DNA, 8487 bp, Homo sapiens
  Payload ID: 13741
  Gene Symbol: PTPN13
  Gene Name: protein tyrosine phosphatase, non-receptor type 13 (APO-1/CD95 (Fas)-associated phosphatase)
  Uniprot ID: Q12923
  ENST ID: ENST00000427191
  CDS Start-End: 481-7881
gagtagctccagcggccacgctgaggcgagggtgacacaccatgctcacggcccctggagaccgtcgtgctggcgagccgtgctccgtagctccccggtccgcctcggcagcggtcagagtcgcctacaggagttgagccgcccgcgccagaaggttttggcgaagctcttggagaggcgtcgagcacagtagggcggcgggggtgcgttgagcgctcgggggtcaggcagtcggccgggatcgccgctggggagcgtttccgaggcgaggaggaggaggaggagatgctgctcctcttctccccctccccaggctccttctacagctccttcagcccacgcccgcagccgcttgtgggagaagtggtggtggctctcggcgcccgcggcggctgccggcggcccgccccgacgccgcgtccctgcagccctcgcccggcgctccagtagcaggacccggtctcgggaccagccggtaatatgcacgtgtcactagctgaggccctggaggttcggggtggaccacttcaggaggaagaaatatgggctgtattaaatcaaagtgctgaaagtctccaagaattattcagaaaagtaagcctagctgatcctgctgcccttggcttcatcatttctccatggtctctgctgttgctgccatctggtagtgtgtcatttacagatgaaaatatttccaatcaggatcttcgagcattcactgcaccagaggttcttcaaaatcagtcactaacttctctctcagatgttgaaaagatccacatttattctcttggaatgacactgtattggggggctgattatgaagtgcctcagagccaacctattaagcttggagatcatctcaacagcatactgcttggaatgtgtgaggatgttatttacgctcgagtttctgttcggactgtgctggatgcttgcagtgcccacattaggaatagcaattgtgcaccctcattttcctacgtgaaacacttggtaaaactggttctgggaaatctttctgggacagatcagctttcctgtaacagtgaacaaaagcctgatcgaagccaggctattcgagatcgattgcgaggaaaaggattaccaacaggaagaagctctacttctgatgtactagacatacaaaagcctccactctctcatcagacctttcttaacaaagggcttagtaaatctatgggatttctgtccatcaaagatacacaagatgagaattatttcaaggacattttatcagataattctggacgtgaagattctgaaaatacattctccccttaccagttcaaaactagtggcccagaaaaaaaacccatccctggcattgatgtgctttctaagaagaagatctgggcttcatccatggacttgctttgtacagctgacagagacttctcttcaggagagactgccacatatcgtcgttgtcaccctgaggcagtaacagtgcggacttcaactactcctagaaaaaaggaggcaagatactcagatggaagtatagccttggatatctttggccctcagaaaatggatccaatatatcacactcgagaattgcccacctcctcagcaatatcaagtgctttggaccgaatccgagagagacaaaagaaacttcaggttctgagggaagccatgaatgtagaagaaccagttcgaagatacaaaacttatcatggtgatgtctttagtacctccagtgaaagtccatctattatttcctctgaatcagatttcagacaagtgagaagaagtgaagcctcaaagaggtttgaatccagcagtggtctcccaggggtagatgaaaccttaagtcaaggccagtcacagagaccgagcagacaatatgaaacaccctttgaaggcaacttaattaatcaagagatcatgctaaaacggcaagaggaagaactgatgcagctacaagccaaaatggcccttagacagtctcggttgagcctatatccaggagacacaatcaaagcgtccatgcttgacatcaccagggatccgttaagagaaattgccctagaaacagccatgactcaaagaaaactgaggaatttctttggccctgagtttgtgaaaatgacaattgaaccatttatatctttggatttgccacggtctattcttactaagaaagggaagaatgaggataaccgaaggaaagtaaacataatgcttctgaacgggcaaagactggaactgacctgtgataccaaaactatatgtaaagatgtgtttgatatggttgtggcacatattggcttagtagagcatcatttgtttgctttagctaccctcaaagataatgaatatttctttgttgatcctgacttaaaattaaccaaagtggccccagagggatggaaagaagaaccaaagaaaaagaccaaagccactgttaattttactttgtttttcagaattaaattttttatggatgatgttagtctaatacaacatactctgacgtgtcatcagtattaccttcagcttcgaaaagatattttggaggaaaggatgcactgtgatgatgagacttccttattgctggcatccttggctctccaggctgagtatggagattatcaaccagaggttcatggtgtgtcttactttagaatggagcactatttgcccgccagagtgatggagaaacttgatttatcctatatcaaagaagagttacccaaattgcataatacctatgtgggagcttctgaaaaagagacagagttagaatttttaaaggtctgccaaagactgacagaatatggagttcattttcaccgagtgcaccctgagaagaagtcacaaacaggaatattgcttggagtctgttctaaaggtgtccttgtgtttgaagttcacaatggagtgcgcacattggtccttcgctttccatggagggaaaccaagaaaatatctttttctaaaaagaaaatcacattgcaaaatacatcagatggaataaaacatggcttccagacagacaacagtaagatatgccagtacctgctgcacctctgctcttaccagcataagttccagctacagatgagagcaagacagagcaaccaagatgcccaagatattgagagagcttcgtttaggagcctgaatctccaagcagagtctgttagaggatttaatatgggacgagcaatcagcactggcagtctggccagcagcaccctcaacaaacttgctgttcgacctttatcagttcaagctgagattctgaagaggctatcctgctcagagctgtcgctttaccagccattgcaaaacagttcaaaagagaagaatgacaaagcttcatgggaggaaaagcctagagagatgagtaaatcataccatgatctcagtcaggcctctctctatccacatcggaaaaatgtcattgttaacatggaacccccaccacaaaccgttgcagagttggtgggaaaaccttctcaccagatgtcaagatctgatgcagaatctttggcaggagtgacaaaacttaataattcaaagtctgttgcgagtttaaatagaagtcctgaaaggaggaaacatgaatcagactcctcatccattgaagaccctgggcaagcatatgttctagatgtgctacacaaaagatggagcatagtatcttcaccagaaagggagatcaccttagtgaacctgaaaaaagatgcaaagtatggcttgggatttcaaattattggtggggagaagatgggaagactggacctaggcatatttatcagttcagttgcccctggaggaccagctgacttggatggatgcttgaagccaggagaccgtttgatatctgtgaatagtgtgagtctggagggagtcagccaccatgctgcaattgaaattttgcaaaatgcacctgaagatgtgacacttgttatctctcagccaaaagaaaagatatccaaagtgccttctactcctgtgcatctcaccaatgagatgaaaaactacatgaagaaatcttcctacatgcaagacagtgctatagattcttcttccaaggatcaccactggtcacgtggtaccctgaggcacatctcggagaactcctttgggccatctgggggcctgcgggaaggaagcctgagttctcaagattccaggactgagagtgccagcttgtctcaaagccaggtcaatggtttctttgccagccatttaggtgaccaaacctggcaggaatcacagcatggcagcccttccccatctgtaatatccaaagccaccgagaaagagactttcactgatagtaaccaaagcaaaactaaaaagccaggcatttctgatgtaactgattactcagaccgtggagattcagacatggatgaagccacttactccagcagtcaggatcatcaaacaccaaaacaggaatcttcctcttcagtgaatacatccaacaagatgaattttaaaactttttcttcatcacctcctaagcctggagatatctttgaggttgaactggctaaaaatgataacagcttggggataagtgtcacgggaggtgtgaatacgagtgtcagacatggtggcatttatgtgaaagctgttattccccagggagcagcagagtctgatggtagaattcacaaaggtgatcgcgtcctagctgtcaatggagttagtctagaaggagccacccataagcaagctgtggaaacactgagaaatacaggacaggtggttcatctgttattagaaaagggacaatctccaacatctaaagaacatgtcccggtaaccccacagtgtaccctttcagatcagaatgcccaaggtcaaggcccagaaaaagtgaagaaaacaactcaggtcaaagactacagctttgtcactgaagaaaatacatttgaggtaaaattatttaaaaatagctcaggtctaggattcagtttttctcgagaagataatcttataccggagcaaattaatgccagcatagtaagggttaaaaagctctttcctggacagccagcagcagaaagtggaaaaattgatgtaggagatgttatcttgaaagtgaatggagcctctttgaaaggactatctcagcaggaagtcatatctgctctcaggggaactgctccagaagtattcttgcttctctgcagacctccacctggtgtgctaccggaaattgatactgcgcttttgaccccacttcagtctccagcacaagtacttccaaacagcagtaaagactcttctcagccatcatgtgtggagcaaagcaccagctcagatgaaaatgaaatgtcagacaaaagcaaaaaacagtgcaagtccccatccagaagagacagttacagtgacagcagtgggagtggagaagatgacttagtgacagctccagcaaacatatcaaattcgacctggagttcagctttgcatcagactctaagcaacatggtatcacaggcacagagtcatcatgaagcacccaagagtcaagaagataccatttgtaccatgttttactatcctcagaaaattcccaataaaccagagtttgaggacagtaatccttcccctctaccaccggatatggctcctgggcagagttatcaaccccaatcagaatctgcttcctctagttcgatggataagtatcatatacatcacatttctgaaccaactagacaagaaaactggacacctttgaaaaatgacttggaaaatcaccttgaagactttgaactggaagtagaactcctcattaccctaattaaatcagaaaaaggaagcctgggttttacagtaaccaaaggcaatcagagaattggttgttatgttcatgatgtcatacaggatccagccaaaagtgatggaaggctaaaacctggggaccggctcataaaggttaatgatacagatgttactaatatgactcatacagatgcagttaatctgctccgggctgcatccaaaacagtcagattagttattggacgagttctagaattacccagaataccaatgttgcctcatttgctaccggacataacactaacgtgcaacaaagaggagttgggtttttccttatgtggaggtcatgacagcctttatcaagtggtatatattagtgatattaatccaaggtccgtcgcagccattgagggtaatctccagctattagatgtcatccattatgtgaacggagtcagcacacaaggaatgaccttggaggaagttaacagagcattagacatgtcacttccttcattggtattgaaagcaacaagaaatgatcttccagtggtccccagctcaaagaggtctgctgtttcagctccaaagtcaaccaaaggcaatggttcctacagtgtggggtcttgcagccagcctgccctcactcctaatgattcattctccacggttgctggggaagaaataaatgaaatatcgtaccccaaaggaaaatgttctacttatcagataaagggatcaccaaacttgactctgcccaaagaatcttatatacaagaagatgacatttatgatgattcccaagaagctgaagttatccagtctctgctggatgttgtggatgaggaagcccagaatcttttaaacgaaaataatgcagcaggatactcctgtggtccaggtacattaaagatgaatgggaagttatcagaagagagaacagaagatacagactgcgatggttcacctttacctgagtattttactgaggccaccaaaatgaatggctgtgaagaatattgtgaagaaaaagtaaaaagtgaaagcttaattcagaagccacaagaaaagaagactgatgatgatgaaataacatggggaaatgatgagttgccaatagagagaacaaaccatgaagattctgataaagatcattcctttctgacaaacgatgagctcgctgtactccctgtcgtcaaagtgcttccctctggtaaatacacgggtgccaacttaaaatcagtcattcgagtcctgcggggtttgctagatcaaggaattccttctaaggagctggagaatcttcaagaattaaaacctttggatcagtgtctaattgggcaaactaaggaaaacagaaggaagaacagatataaaaatatacttccctatgatgctacaagagtgcctcttggagatgaaggtggctatatcaatgccagcttcattaagataccagttgggaaagaagagttcgtttacattgcctgccaaggaccactgcctacaactgttggagacttctggcagatgatttgggagcaaaaatccacagtgatagccatgatgactcaagaagtagaaggagaaaaaatcaaatgccagcgctattggcccaacatcctaggcaaaacaacaatggtcagcaacagacttcgactggctcttgtgagaatgcagcagctgaagggctttgtggtgagggcaatgacccttgaagatattcagaccagagaggtgcgccatatttctcatctgaatttcactgcctggccagaccatgatacaccttctcaaccagatgatctgcttacttttatctcctacatgagacacatccacagatcaggcccaatcattacgcactgcagtgctggcattggacgttcagggaccctgatttgcatagatgtggttctgggattaatcagtcaggatcttgattttgacatctctgatttggtgcgctgcatgagactacaaagacacggaatggttcagacagaggatcaatatattttctgctatcaagtcatcctttatgtcctgacacgtcttcaagcagaagaagagcaaaaacagcagcctcagcttctgaagtgacatgaaaagagcctctggatgcatttccatttctctccttaacctccagcagactcctgctctctatccaaaataaagatcacagagcagcaagttcatacaacatgcatgttctcctctatcttagaggggtattcttcttgaaaataaaaaatattgaaatgctgtatttttacagctactttaacctatgataattatttacaaaattttaacactaaccaaacaatgcagatcttagggatgattaaaggcagcatttgatgatagcagacattgttacaaggacatggtgagtctatttttaatgcaccaatcttgtttatagcaaaaatgttttccaatattttaataaagtagttattttataggggatacttgaaaccagtatttaagctttaaatgacagtaatattggcatagaaaaaagtagcaaatgtttactgtatcaatttctaatgtttactatatagaatttcctgtaatatatttatatactttttcatgaaaatggagttatcagttatctgtttgttactgcatcatctgtttgtaatcattatctcactttgtaaataaaaacacaccttaaaacatgaacaagcc

SEQ ID NO: 171609 - DNA, 516 bp, Homo sapiens
  Payload ID: 13741
  Gene Symbol: PTPN13
  Gene Name: protein tyrosine phosphatase, non-receptor type 13 (APO-1/CD95 (Fas)-associated phosphatase)
  ENST ID: ENST00000507902
  CDS Start-End: 100-516
agctccctcgcagaaaatggggcaatcgggtttgttttcaaggcaggacctgaacaaaatgtaggacacctgatctgtgggatgaagggcgctggtaatatgcacgtgtcactagctgaggccctggaggttcggggtggaccacttcaggaggaagaaatatgggctgtattaaatcaaagtgctgaaagtctccaagaattattcagaaaagtaagcctagctgatcctgctgcccttggcttcatcatttctccatggtctctgctgttgctgccatctggtagtgtgtcatttacagatgaaaatatttccaatcaggatcttcgagcattcactgcaccagaggttcttcaaaatcagtcactaacttctctctcagatgttgaaaagatccacatttattctcttggaatgacactgtattggggggctgattatgaagtgcctcagagccaacctattaagcttggagatcatctcaacagcatactgcttggaatgtgtgaggatgtt

SEQ ID NO: 171610 - DNA, 1708 bp, Homo sapiens
  Payload ID: 13741
  Gene Symbol: PTPN13
  Gene Name: protein tyrosine phosphatase, non-receptor type 13 (APO-1/CD95 (Fas)-associated phosphatase)
  ENST ID: ENST00000502971
  CDS Start-End: 479-1162
gtagctccagcggccacgctgaggcgagggtgacacaccatgctcacggcccctggagaccgtcgtgctggcgagccgtgctccgtagctccccggtccgcctcggcagcggtcagagtcgcctacaggagttgagccgcccgcgccagaaggttttggcgaagctcttggagaggcgtcgagcacagtagggcggcgggggtgcgttgagcgctcgggggtcaggcagtcggccgggatcgccgctggggagcgtttccgaggcgaggaggaggaggaggagatgctgctcctcttctccccctccccaggctccttctacagctccttcagcccacgcccgcagccgcttgtgggagaagtggtggtggctctcggcgcccgcggcggctgccggcggcccgccccgacgccgcgtccctgcagccctcgcccggcgctccagtagcaggacccggtctcgggaccagccggtaatatgcacgtgtcactagctgaggccctggaggttcggggtggaccacttcaggaggaagaaatatgggctgtattaaatcaaagtgctgaaagtctccaagaattattcagaaaagtaagcctagctgatcctgctgcccttggcttcatcatttctccatggtctctgctgttgctgccatctggtagtgtgtcatttacagatgaaaatatttccaatcaggatcttcgagcattcactgcaccagaggttcttcaaaatcagtcactaacttctctctcagatgttgaaaagatccacatttattctcttggaatgacactgtattggggggctgattatgaagtgcctcagagccaacctattaagcttggagatcatctcaacagcatactgcttggaatgtgtgaggatgttatttacgctcgagtttctgttcggactgtgctggatgcttgcagtgcccacattaggaatagcaattgtgcaccctcattttcctacgtgaaacacttggtaaaactggttctgggaaatctttctggggtatttcccaaaccttctccactttcccttcttctcggaacactgctacctagtgtatccagggaatccatgcttgtatccctgccagatttccccaagacctggactcttctagtttttctcttgttttggatatgaagaatcccaagaataaccaatgctatatattacctgaaagtcccacctctgttctgcatttctaaggctgtattttatcttgtttgccctatctgatctggatctatactttatctgctcttatccttagggttgtagtcctggagtgttggtccctcttccttgcacaggttacaaatttaccactgccacacagtgttcttgttgacttcctcagaattcctcatcggtaggggtttagttcccatcttaaccaggatgtcagatggctgccaggaatgtattcaaattctgcacagtttttcagttgataacaaacaggcccacagatcttctagacaaatggtttgtaaactctccctcaagaaacctttgcggttctatagtgaagggaaatgtaggaagtagaggccgaataaatggagttcttggttgcccattttccctctttaactagagcagctccagttttatttgatctgtttatatttctgcgtgtgatttttttgaacaaaggtaaagctattaaaaaatctttgaaaacca

SEQ ID NO: 171611 - DNA, 8076 bp, Homo sapiens
  Payload ID: 13741
  Gene Symbol: PTPN13
  Gene Name: protein tyrosine phosphatase, non-receptor type 13 (APO-1/CD95 (Fas)-associated phosphatase)
  Uniprot ID: Q12923
  ENST ID: ENST00000511467
  CDS Start-End: 6-7478
gtaatatgcacgtgtcactagctgaggccctggaggttcggggtggaccacttcaggaggaagaaatatgggctgtattaaatcaaagtgctgaaagtctccaagaattattcagaaaagtaagcctagctgatcctgctgcccttggcttcatcatttctccatggtctctgctgttgctgccatctggtagtgtgtcatttacagatgaaaatatttccaatcaggatcttcgagcattcactgcaccagaggttcttcaaaatcagtcactaacttctctctcagatgttgaaaagatccacatttattctcttggaatgacactgtattggggggctgattatgaagtgcctcagagccaacctattaagcttggagatcatctcaacagcatactgcttggaatgtgtgaggatgttatttacgctcgagtttctgttcggactgtgctggatgcttgcagtgcccacattaggaatagcaattgtgcaccctcattttcctacgtgaaacacttggtaaaactggttctgggaaatctttctgggacagatcagctttcctgtaacagtgaacaaaagcctgatcgaagccaggctattcgagatcgattgcgaggaaaaggattaccaacaggaagaagctctacttctgatgtactagacatacaaaagcctccactctctcatcagacctttcttaacaaagggcttagtaaatctatgggatttctgtccatcaaagatacacaagatgagaattatttcaaggacattttatcagataattctggacgtgaagattctgaaaatacattctccccttaccagttcaaaactagtggcccagaaaaaaaacccatccctggcattgatgtgctttctaagaagaagatctgggcttcatccatggacttgctttgtacagctgacagagacttctcttcaggagagactgccacatatcgtcgttgtcaccctgaggcagtaacagtgcggacttcaactactcctagaaaaaaggaggcaagatactcagatggaagtatagccttggatatctttggccctcagaaaatggatccaatatatcacactcgagaattgcccacctcctcagcaatatcaagtgctttggaccgaatccgagagagacaaaagaaacttcaggttctgagggaagccatgaatgtagaagaaccagttcgaagatacaaaacttatcatggtgatgtctttagtacctccagtgaaagtccatctattatttcctctgaatcagatttcagacaagtgagaagaagtgaagcctcaaagaggtttgaatccagcagtggtctcccaggggtagatgaaaccttaagtcaaggccagtcacagagaccgagcagacaatatgaaacaccctttgaaggcaacttaattaatcaagagatcatgctaaaacggcaagaggaagaactgatgcagctacaagccaaaatggcccttagacagtctcggttgagcctatatccaggagacacaatcaaagcgtccatgcttgacatcaccagggatccgttaagagaaattgccctagaaacagccatgactcaaagaaaactgaggaatttctttggccctgagtttgtgaaaatgacaattgaaccatttatatctttggatttgccacggtctattcttactaagaaagggaagaatgaggataaccgaaggaaagtaaacataatgcttctgaacgggcaaagactggaactgacctgtgataccaaaactatatgtaaagatgtgtttgatatggttgtggcacatattggcttagtagagcatcatttgtttgctttagctaccctcaaagataatgaatatttctttgttgatcctgacttaaaattaaccaaagtggccccagagggatggaaagaagaaccaaagaaaaagaccaaagccactgttaattttactttgtttttcagaattaaattttttatggatgatgttagtctaatacaacatactctgacgtgtcatcagtattaccttcagcttcgaaaagatattttggaggaaaggatgcactgtgatgatgagacttccttattgctggcatccttggctctccaggctgagtatggagattatcaaccagaggttcatggtgtgtcttactttagaatggagcactatttgcccgccagagtgatggagaaacttgatttatcctatatcaaagaagagttacccaaattgcataatacctatgtgggagcttctgaaaaagagacagagttagaatttttaaaggtctgccaaagactgacagaatatggagttcattttcaccgagtgcaccctgagaagaagtcacaaacaggaatattgcttggagtctgttctaaaggtgtccttgtgtttgaagttcacaatggagtgcgcacattggtccttcgctttccatggagggaaaccaagaaaatatctttttctaaaaagaaaatcacattgcaaaatacatcagatggaataaaacatggcttccagacagacaacagtaagatatgccagtacctgctgcacctctgctcttaccagcataagttccagctacagatgagagcaagacagagcaaccaagatgcccaagatattgagagagcttcgtttaggagcctgaatctccaagcagagtctgttagaggatttaatatgggacgagcaatcagcactggcagtctggccagcagcaccctcaacaaacttgctgttcgacctttatcagttcaagctgagattctgaagaggctatcctgctcagagctgtcgctttaccagccattgcaaaacagttcaaaagagaagaatgacaaagcttcatgggaggaaaagcctagagagatgagtaaatcataccatgatctcagtcaggcctctctctatccacatcggaaaaatgtcattgttaacatggaacccccaccacaaaccgttgcagagttggtgggaaaaccttctcaccagatgtcaagatctgatgcagaatctttggcaggagtgacaaaacttaataattcaaagtctgttgcgagtttaaatagaagtcctgaaaggaggaaacatgaatcagactcctcatccattgaagaccctgggcaagcatatgttctaggaatgactatgcatagttctggaaactcttcatcccaagtacccttaaaagaaaatgatgtgctacacaaaagatggagcatagtatcttcaccagaaagggagatcaccttagtgaacctgaaaaaagatgcaaagtatggcttgggatttcaaattattggtggggagaagatgggaagactggacctaggcatatttatcagttcagttgcccctggaggaccagctgacttggatggatgcttgaagccaggagaccgtttgatatctgtgaatagtgtgagtctggagggagtcagccaccatgctgcaattgaaattttgcaaaatgcacctgaagatgtgacacttgttatctctcagccaaaagaaaagatatccaaagtgccttctactcctgtgcatctcaccaatgagatgaaaaactacatgaagaaatcttcctacatgcaagacagtgctatagattcttcttccaaggatcaccactggtcacgtggtaccctgaggcacatctcggagaactcctttgggccatctgggggcctgcgggaaggaagcctgagttctcaagattccaggactgagagtgccagcttgtctcaaagccaggtcaatggtttctttgccagccatttaggtgaccaaacctggcaggaatcacagcatggcagcccttccccatctgtaatatccaaagccaccgagaaagagactttcactgatagtaaccaaagcaaaactaaaaagccaggcatttctgatgtaactgattactcagaccgtggagattcagacatggatgaagccacttactccagcagtcaggatcatcaaacaccaaaacaggaatcttcctcttcagtgaatacatccaacaagatgaattttaaaactttttcttcatcacctcctaagcctggagatatctttgaggttgaactggctaaaaatgataacagcttggggataagtgtcacggtactgtttgacaagggaggtgtgaatacgagtgtcagacatggtggcatttatgtgaaagctgttattccccagggagcagcagagtctgatggtagaattcacaaaggtgatcgcgtcctagctgtcaatggagttagtctagaaggagccacccataagcaagctgtggaaacactgagaaatacaggacaggtggttcatctgttattagaaaagggacaatctccaacatctaaagaacatgtcccggtaaccccacagtgtaccctttcagatcagaatgcccaaggtcaaggcccagaaaaagtgaagaaaacaactcaggtcaaagactacagctttgtcactgaagaaaatacatttgaggtaaaattatttaaaaatagctcaggtctaggattcagtttttctcgagaagataatcttataccggagcaaattaatgccagcatagtaagggttaaaaagctctttcctggacagccagcagcagaaagtggaaaaattgatgtaggagatgttatcttgaaagtgaatggagcctctttgaaaggactatctcagcaggaagtcatatctgctctcaggggaactgctccagaagtattcttgcttctctgcagacctccacctggtgtgctaccggaaattgatactgcgcttttgaccccacttcagtctccagcacaagtacttccaaacagcagtaaagactcttctcagccatcatgtgtggagcaaagcaccagctcagatgaaaatgaaatgtcagacaaaagcaaaaaacagtgcaagtccccatccagaagagacagttacagtgacagcagtgggagtggagaagatgacttagtgacagctccagcaaacatatcaaattcgacctggagttcagctttgcatcagactctaagcaacatggtatcacaggcacagagtcatcatgaagcacccaagagtcaagaagataccatttgtaccatgttttactatcctcagaaaattcccaataaaccagagtttgaggacagtaatccttcccctctaccaccggatatggctcctgggcagagttatcaaccccaatcagaatctgcttcctctagttcgatggataagtatcatatacatcacatttctgaaccaactagacaagaaaactggacacctttgaaaaatgacttggaaaatcaccttgaagactttgaactggaagtagaactcctcattaccctaattaaatcagaaaaaggaagcctgggttttacagtaaccaaaggcaatcagagaattggttgttatgttcatgatgtcatacaggatccagccaaaagtgatggaaggctaaaacctggggaccggctcataaaggttaatgatacagatgttactaatatgactcatacagatgcagttaatctgctccgggctgcatccaaaacagtcagattagttattggacgagttctagaattacccagaataccaatgttgcctcatttgctaccggacataacactaacgtgcaacaaagaggagttgggtttttccttatgtggaggtcatgacagcctttatcaagtggtatatattagtgatattaatccaaggtccgtcgcagccattgagggtaatctccagctattagatgtcatccattatgtgaacggagtcagcacacaaggaatgaccttggaggaagttaacagagcattagacatgtcacttccttcattggtattgaaagcaacaagaaatgatcttccagtggtccccagctcaaagaggtctgctgtttcagctccaaagtcaaccaaaggcaatggttcctacagtgtggggtcttgcagccagcctgccctcactcctaatgattcattctccacggttgctggggaagaaataaatgaaatatcgtaccccaaaggaaaatgttctacttatcagataaagggatcaccaaacttgactctgcccaaagaatcttatatacaagaagatgacatttatgatgattcccaagaagctgaagttatccagtctctgctggatgttgtggatgaggaagcccagaatcttttaaacgaaaataatgcagcaggatactcctgtggtccaggtacattaaagatgaatgggaagttatcagaagagagaacagaagatacagactgcgatggttcacctttacctgagtattttactgaggccaccaaaatgaatggctgtgaagaatattgtgaagaaaaagtaaaaagtgaaagcttaattcagaagccacaagaaaagaagactgatgatgatgaaataacatggggaaatgatgagttgccaatagagagaacaaaccatgaagattctgataaagatcattcctttctgacaaacgatgagctcgctgtactccctgtcgtcaaagtgcttccctctggtaaatacacgggtgccaacttaaaatcagtcattcgagtcctgcggggtttgctagatcaaggaattccttctaaggagctggagaatcttcaagaattaaaacctttggatcagtgtctaattgggcaaactaaggaaaacagaaggaagaacagatataaaaatatacttccctatgatgctacaagagtgcctcttggagatgaaggtggctatatcaatgccagcttcattaagataccagttgggaaagaagagttcgtttacattgcctgccaaggaccactgcctacaactgttggagacttctggcagatgatttgggagcaaaaatccacagtgatagccatgatgactcaagaagtagaaggagaaaaaatcaaatgccagcgctattggcccaacatcctaggcaaaacaacaatggtcagcaacagacttcgactggctcttgtgagaatgcagcagctgaagggctttgtggtgagggcaatgacccttgaagatattcagaccagagaggtgcgccatatttctcatctgaatttcactgcctggccagaccatgatacaccttctcaaccagatgatctgcttacttttatctcctacatgagacacatccacagatcaggcccaatcattacgcactgcagtgctggcattggacgttcagggaccctgatttgcatagatgtggttctgggattaatcagtcaggatcttgattttgacatctctgatttggtgcgctgcatgagactacaaagacacggaatggttcagacagaggatcaatatattttctgctatcaagtcatcctttatgtcctgacacgtcttcaagcagaagaagagcaaaaacagcagcctcagcttctgaagtgacatgaaaagagcctctggatgcatttccatttctctccttaacctccagcagactcctgctctctatccaaaataaagatcacagagcagcaagttcatacaacatgcatgttctcctctatcttagaggggtattcttcttgaaaataaaaaatattgaaatgctgtatttttacagctactttaacctatgataattatttacaaaattttaacactaaccaaacaatgcagatcttagggatgattaaaggcagcatttgatgatagcagacattgttacaaggacatggtgagtctatttttaatgcaccaatcttgtttatagcaaaaatgttttccaatattttaataaagtagttattttataggggatacttgaaaccagtatttaagctttaaatgacagtaatattggcatagaaaaaagtagcaaatgtttactgtatcaatttctaatgtttactatatagaatttcctgtaatatatttatatactttttcatgaaaatggagttatcagttatctgtttgttactgcatcatctgtttgtaatcattatctcactttgtaaataaaaacacaccttaaaacatg

SEQ ID NO: 171612 - DNA, 12985 bp, Homo sapiens
  Payload ID: 13742
  Gene Symbol: PTPN14
  Gene Name: protein tyrosine phosphatase, non-receptor type 14
  Uniprot ID: Q15678
  ENST ID: ENST00000366956
  CDS Start-End: 196-3759
ccgcgcgggactccggggcgccacgggggccatgtaagcagctatcttccagagggccacactgggcatggacacccttttccctgcctggaggagcacaggtgatagtgtaattttccagtcacgaaactgctaaggccatctcaggggcgtgtgcgccaggataggcgggcggcgtccgaggaccacatagccatgccttttggtctgaagctccgccggacacggcgctacaacgtcctgagcaagaactgctttgtcacacggattcgcctgctggacagcaatgttatcgagtgcacgctgtcggtggaaagcacagggcaagaatgcctggaggctgtggcccagaggctggagctgcgagagacgcactactttggcctttggtttctcagcaagagccagcaagcacgatgggtggagctggagaaacctctgaagaaacatctggacaaattcgctaatgagcctttgcttttctttggagtcatgttctatgtgccaaatgtgtcatggcttcagcaagaggccacaagatatcagtattacctgcaagtcaaaaaagatgtgcttgaagggcgattacgatgtacattggaccaggtgattcggctagccggcctagctgtgcaagctgattttggagactataatcagtttgattctcaagatttcctcagagagtatgtgctatttcctatggatttggccctggaagaggctgttctggaggagctgacccagaaggtagcccaagaacacaaagcccacagtggaatcctgccagcagaagctgaactgatgtacatcaatgaagttgaacgtttggatggatttggacaggaaatcttccctgtaaaggacaatcatggaaactgtgtacaccttggcattttctttatggggattttcgtgaggaacagaattggaagacaagcggtaatatacaggtggaatgacatggggaatatcactcataacaagtcgaccattctagtggagctcatcaacaaagaagagactgccctctttcacacggatgatatcgaaaatgccaagtatatttctcggttgtttgccacacgacacaagttttacaaacaaaacaaaatctgcactgaacagtcaaattctccaccccccatcagacgccagcccacctggagccgatcctctctgcccaggcagcagccgtacatcctgcctcccgttcacgtccagtgtggtgagcactactcggaaacgcacacctcgcaagacagcatttttcatgggaatgaagaagccttgtattgcaactctcacaacagcctggacttaaattatttaaatggcactgtcaccaatggcagcgtgtgtagcgttcacagcgtcaactccctcaactgctcgcaaagtttcatccaggcctcccctgtatcctccaacctcagtatccctgggagtgacatcatgcgggccgactacatcccgagccaccggcacagcgcgatcatcgtgccctcgtacaggccaacccccgattatgagacagtcatgcgccagatgaagagggggatcctgcatacagacagccagagccagtctctgagaaacctcaacattatcaacacccatgcctacaaccagccagaggatctggtgtacagccaaccggagatgcgggagaggcacccctacactgtcccttatgggccacagggggtctacagcaacaaacttgtcagtccatctgaccagaggaacccaaagaataatgtggtaccaagcaagccgggggcaagcgccatctcgcacacggtgagcaccccagagctggccaacatgcagctgcagggcagccataactacagcacggcccacatgcttaagaactatctcttcaggccaccgcccccctacccacggccacgacctgccaccagcaccccagacctggccagccaccgccacaagtacgtcagcggcagcagcccggacctggtgacccggaaggtgcagctctcggtgaagaccttccaagaggacagctctccggtggttcatcagtctctccaggaggtgagcgagcccctcacggccaccaagcaccacggcactgtgaacaagcgccacagcctggaggtgatgaacagcatggtgcggggcatggaggccatgacgctcaagtcgctccacctccccatggctcgccgcaacacgctccgggagcagggaccgcccgaggaggggtcaggcagccacgaggtcccccagctccctcagtatcaccacaagaagaccttctctgatgccactatgctaatccacagcagcgagagtgaggaggaggaggaggaggctccagaatcggtgccccagatccccatgctccgggagaagatggagtacagtgcccagctgcaggcggccctggcccgcatccccaacaagcccccgcctgagtaccccggtccaaggaagagtgtgagcaatggggctctgaggcaggaccaagccagccttcctcccgccatggccagagccagggtgctgaggcatgggccagccaaggccatcagcatgtctcggactgacccgccggctgtcaacggggcctctctcggcccatccatctcggaacccgacctgactagtgtgaaggagcgggtcaaaaaagagcctgtgaaggagagacctgtgtctgaaatgttttccctggaagacagcattatagagagagagatgatgatcaggaatctagagaagcagaagatggcaggcctggaggcacagaagaggccgctgatgttggcagcattgaatgggctctcggtggctcgagtctcagggcgggaagagaatcgagttgatgccacccgggttcccatggacgagaggttcagaaccctgaagaagaaactagaagagggaatggtgttcacagaatatgagcaaattccaaagaaaaaggcgaatggcattttcagcacagcagctctgccagaaaacgccgagcgcagccgaatccgtgaagttgtcccctatgaggagaatcgagtagagctgataccaaccaaagaaaataacacaggatacattaatgcctcccacatcaaggtggtggttggcggggcagaatggcactacatagccacccaggggcccctgccacacacgtgccacgacttctggcagatggtgtgggagcagggagtgaatgtgattgccatggtcactgcagaggaggagggtggacgaaccaaaagccaccgatactggcccaaactaggttcaaagcacagctcagccacctatggcaagttcaaggtcaccacgaagtttcgaacggattctgtttgctatgcaaccacgggcttgaaggtcaagcaccttttgtctgggcaagaaaggacggtgtggcatttacaatatactgactggccagatcacggctgtccagaagatgtccaaggatttttatcctacttggaggagatccagtcggtccgtcgccataccaacagcatgctggaaggcaccaagaaccggcacccgcccatcgtggtccactgtagtgctggggtgggaaggaccggcgtgctcattctttctgagctgatgatctactgcttggaacataacgaaaaggtggaagtgcccatgatgctgaggctcctcagggagcagaggatgttcatgatccagactatcgctcagtacaagtttgtctaccaagtcctcatccagttcctccaaaactccagactcatttaatcaccccaatccagctcctggaggagggacccagctccatcgcgctggaggagagtcacctccagacaacatctgctccccccacaggggtgcaggtggctggcagcaaacaggctctctgaagacagtagccaagattattcacacataccatgtattattttatatgagataatttatttttttcccctttggaataacttttgtgaattattataatgcagtttccctagtaatatagtacttttcatttgaaccacatcttgactgatctgtattgtaatatatgtcagcaggtaaggttgcctgctggatcattttgaggacagaggcatgagggagcacatctcttgtgaagttgcagccagatttgtaaccaaccctgaaattcatcagcttaattcatttatcagcttgattcattcatcattcattgcttatatccaaagcaaagacggtaagaaaatgaattcatcctgaaatataaagaaaagggtctgaaggaacaaacacgattctcttatattttggggctcatgagccttgatagacagtttcctctcgtcttcatttccacccctcatcctcagtagtctcctctcccccacgccccaccccaacttcccccccaagcttgagttaaagacagaatagctaaagacagtgctgcctttacaatgcagtaattgccatctttggggccgaaagacaagctctgtgttgtgcttttcttgaccaccccttatcctgggctctggagcttgtgtttccctgctggcgactgtaccttgggtatttgttgctacctctcctgtttgctcagtaggaccctgtctggtggcattgaggctctggaccagaccatctgtgcagttaaggctctaccctgattgagagaggatagcagacctagaaagagaaaggagttgggcagggcctttgaggattgtgtttttcaggcagggccttgatgatcattgttttttatttaaataagatgtgtgtgctggacagagacctaaaagttgaggtcactaagtcattggaaaggccatcaaggaaacagatggggaagctgatttatgggagctgtaaggcatttagctacataacaggggtcctggccaggaaacacatcaaatgtgacccccgctgtgctgatatcatcttcaggctttggtctgcaagatcagaattaatcccactcgggaccccatagtccaaacttggggccacttgatgaacgatggtagaattgtcattggcagagccctgtgcttctttccttttcttcataaaatccactcgctggtcagttatcttcactttgaagcccagttcttagtttcttcctatggcttcattggtcagtgtccttctgaatttccaaggatggtacacaataaatcatgttttgtacttttttcctcttactgcattttgggggatttatcattctatgtctaccttttcttgagtacagctttgatatgcacctgttgttacgtggtgatgggaagtcacaggcgtgctctttctagttaatttgatgccacatcttccttgtcttttcagcttgggaaaaaggcggcagtggaggaaggcatggaatgcccacagtggtcagttcaaagaacaaacgtgcaattaaaaaactgtagtcagccaggcacggtggttcacacctgtaatcccagcactttgaaaggccaaggcgggcagattgcttgagctaaggagttcgagaccagcctgagcaacatgatgaaaccccgtctctacaaaaagtacaaaaattagccaggcgtggtggtatgccctggtagtcccagctgctcgggaggctgaggcaggaggatcacctgattctaagaattcgagactgcagtgagccgtgatcttgccactgtagtccaggctgggctacggagagaccctgcctccaaaaaaaaaaaaaaaaaaggaaaaaaggttgtcaagaaaaactagatgttaggagaaaggaaaatttaattgcagttttttttcttagaattgactgctgtgagagttccatatgcctttcttcattgctgcttttgtcccccgtgagctaaaaagatggagtgacatcaaatcaaccagaaaaagtatgcctttgtgacatcccatcaccacatgccaacaggtatatattccccattaagttcttcggaataggaatcctctgtttcaacctggccaggtgttgtggtggctgtactctagttagactcggaatatctggggatggagggcttcccctgtgtcttctacttcaaggtctgaaggctcagtgaaggagtataatctgctgatctttgtagattctggagttttgttgtatgtcctggaaagaaacccattagtattacatgtattttcagtgaacagagcttataacccttattataagaagctcatcaataagcaaaaagatacttgtttcctttccttggaggtttttccatccttgggatattctgctgttagggatgttttagcaagtggtctcagttactggtttattgcgtgatgaacaacatcagtatttatcttttatctctaagccccaaggtgggcactgttagaatatgtctcatgtggacagcatatagatctggtgcgtctttgaggtcgtcagagctcatgggcttccctgaaattcatccactgtccctgccgtatgctacgggaatattcattagtgtacaaaatgcagggaggaagtaggtttaatattcaactttctagccaaagtttatattgaaacccaaaagaaaacatttaagagttgttccacatatttcacttttaaaaacaaatgcctttggttctttagcacattttgcattccttttcacatctccagtaaatgccaacatatctcctgttaaattagcagcagccatttaaagtcctttcggtggcatctgcataataattgcccagagatgctttatatctgggaagcaagccaaggaataaaccttgaagcaaagtgtattaaattagttatctagttagagcttttggaatgatttcctgatgatgtatcaagtctgaagctggagctgtcagtgtctattgctgcagtttggatttgaagggagaaaatgtaaaatggaggaaaaaaaagttaccatctcacaacaaagccatcaaacattttccagccgctgttttcgaggttttccagttgaactgtttggtttctttcatccacactcatttggatacattgacccgaggtattcatccttgtttactgtggtccctgaatcatgggggctgaatttgatgtcttcatccttgagatgagcctgctggcttagctgaggaatgtcctgctgaggtttcttaggtttccttgggttctaaggatatactggatataccatcttttagcaagagtatctggtagcatttacagatagcatagacattggtatgcacttctttccccagataggaagtaaaggaggatttagttgcatgaaaaaaggatgttaaacattgattacataggagtaaagatgaatgagctgcaatattcagtcggagctaaacaataagatcagggaaggtaaaaatacctatgtggaatattttgaatcgtaagcttttgaggagcttaaattgagagaattttacttttaattttgtagattgagaagaggaaccgctttttaaaattatagctaaactgtcattgttttcctaagagtcacttggccatctctggccccctctttcatcagcctgaagagagggtctttgtagactgctgagggtgggccttgtaggacttgaccatggcttacacctacttaacctttatcctgctttctttcagcttgtgcttttcagttataaactccagtgggtacagcaggctggccttttcatccagctgattatttttccagcttaatatagattgacccatatgaaatttccaataatggaccatattttctgcaaatagacagtactcgcatggatcacctatatcttccccctgatacactgtgggtcccaacaccagatgtcatttctccagagcagtgctaatgaacacaaaaggtataccctgggtggcccagctcttttcacgaacgtgctgccctgctcatagtgatccttgcatcacttggtgaatgggccatctcctgggacatggaagttgcagaggtagatagtgcactgcagcttctcttaagccggattggccatcaggcatatcactctggagtttttagctgctgtcctttcccgatgaacagtctgtattagctgacctcagcctacttgttacgtgacgtatgggtcccaaaagtgtcctttgtcaaaaagcagaatgtgccttctagtctccctttccccatctaatggtgtattcgatggtgaagatgagtacagttgaccacccctatctgtgggttccacatccctatattcaaccaagtacagattgaaaaatatttggggaagaggggaaacccacaaagttccaaaaagcaaaagttgaatttgccacatgctgaatactacattgaattcacacaaatgaagtgatgtgtaggcattgagttaggtattgtaaataatctagagatgatttaaagtatgcaagagatgtgcataggttatatgcaaatactgtgctattttatataaaagacttgaacatccatggattctggtattctcagagggtccttgattgccccctttggtaaaggacaactatttcgttactgattttcgtttggggaagatctgtcaatcccttgaggtgcgggggttggggggatggagggtacagggcattctaggatgtgtgccagggagcacagattcaagggatgggattgagtcagacctgtgttcttactcagtgtcagaaataactctgtggagctcctagagtaagacatttccggaagcaccacataattactgttgggctcttagggtagcccttttagggaattgagcattcccatgttttaccaacaattattctgctgctgtgttttattatattgccaatggttttgagacactcatcatgctcttatttagtgatttcttttcatgagcagagcaacagctcatccagcatggtttccaaatggagaaatttgggtcttctgtagaaaccacacaaattctccaatggcctacagccttatggttggcacactagttggccctatagggtggaaataaagctgtaagatgttaaactgcatttgatacttctcttgaacgctgagcaaggaagcaaaatagttcttgtctttacttaagcttctaagacattttggggcaaaggaccttacagatggcgtctgttgaaagtaacagcaacgtgccagggagaaatgtgggggaaatctcatcaaattctgccacctcaaatgtgttgtccagaagtcagtgttattcagggggccctgtgaaacttgaccaccagcttgcgccatcaacactcagcctttatccagcctgctctcagcttttgtgtttctgttagaaactcagataggtaagtatttttattcagtagactacctttcttatcttttcagcttaatatagctgcatcttctttctcaaagccaaactaagatattctctattaaaatgtccatgagcctagcattgagtgtctggcatccatcaatttcatagactggaaaatgattgttgtttggtacagtaaagaagaggatgtgcatcagttcctaccgtttgcagctttgtttttagccttcccattttaaaaataaattcaaggacattgagttacaaggcaggagggctggagctactgggcagcctgaatatgacaagcatttgtgtggaaagtcattgctccttctgccacactttgggccatcaggatcattctttcccagaagtgccataaacttgctcaaaagtttctataaatgggaagagggagaggaaggatttttgcatcagtcctgaagttgctatccaaaagttctctgtttcacaaataattttctgaactctggaatgcctctcctactccctgcctccctttctgtaatgtcagagtgatggaaaccaccaagtggcatgctagggaaagcctgcagcagtgttggagtctatttcaccctagctcatagttttaaactgtcttcactgttgaggtagagcttgatgaatgtcatggattatgatgtgtggtttatcatatttgcctggatttgctgatcaaaagcaccatcttccctcgcctgctgctggcagcctttccttgccttgcttgttagcagagcattctgcttacccatgtggctcccagagttagcagccccggctcttggatttcttgattcttctcccctgtgatctcagaggtgctgcagaggacattcccctttagagcaagtcatgtttctattcaggccacaaaactgggatgtacatgcagtgactttggtgttccttgtcttgttcaggggaacgggtgggactgttgtgtgctgtcaccctcttcattccatgagcaccttgttcacttagggtctgctgcctttttttttttctttttctttttttttttttttttagtttttgagatcgtgtctcactcctgttgcgcaggctggagtgcagcctccaaagtagctgggattataggcgtgcaccaccacacccggctaatttttatatttttagtagagacggggttttgccatgttggccagactggtctcaaacctctgacctcgtgatgacccccctcggcctcccaaagtgctgggattacacccagcctctgctgccttttcatatttccccatctgctttatggatcaactctcaacagtacactttttcttttctttacctaccctatgagtgcaacccagatgtaagagttaatcctcgtcagagaatcattgccttaaacctctcagaaatatgtaattaggaaatcttattttaattttttaaaaattgcttgtatagtttcaaagaataagatctggcaaatggccagatgtggtggctcacacctgtaatcaaaccagcactttgggaggctgaggcaggcagatcacctgaggtcaggcgttcaagaccagcctggccaacatggtgaaatcccgtctctactaaaaatacaaaaaaaaaaaaaaaaaaaaaaattagccaggcatggtggcacatgcctgtaatcccagctactcaggaggctgaggcaggataattgcttgaacccgggaggtggaggttgcagtgagccgagatcatgccactgcactccagcctgggcaacagagtgagactttgtctcaaaaaaaaaaaaaaaaaaaaaaaaagatctggcggatgaaaataaccagaatgaaaatagctagaaaactcagcaagcaggaagctccctttctcacccttttgttcccttgccgatagaatcagtcactattagaaaaaatgaaagacgctctgtttaaaacaatgatgacagcagtacttaatatgtatttcgaggtgaacttatatagattgagagaggctgcatttggcagactgatgtataggaagacccatttgtttctagcttctccctgcagggaaaatgctttcgtcattatagcctctttacacagactggccattctagtgaaacaggtggtaaacctttgggctgcccagaaacattttatctgttttcacttacctaggaaggggaaagattagcgggtcatccaaaatctgtatgtaagctatcttcattttcttccccaaccttctcctcctgggaaacacaaatgctatctcatctgacaaaaggttttagaggataaagctgaaaagattggattgggatctttttgtggcttggggcggagccttttgctaaaatctcaagaatgctgctttgagtttagctagggtggctctcagaactggggtgcctggcattctcagcatttctcaggggcctcccacctctgacaactgcagtgttagctaatacataccttgagcatagaactgaatgctgtaattcagagccattttttttttcaacttgaacattgtacaattttactgcaatttcctttgaactttcttgccactgtttggaatcttaaaaattcattagccttctcctttctgacataaagctactcttcatcagagatgagttcctatgtatgtcctttgttccttcaatagctaattaatgtgcttgaggatacttcagtggaaaaaaaggtttaaatatgcaaattactaataaatgtgtaaccttatgtaacttgtgttacatcaagtaacaagctaatctagtttgtttcactggactaggcttgtgctccctacttcagtattttgatgctttccttgatctttgtttcacaaaatgttgtgaattttggtatcattcaaaacaaatgacatttattaggtttcattttgaaacgatgtacagacaagtccccaacttagaaaccggtttgttcttaaggttcttgcgtcagcccatagaagcccactgacctccaccacagcccaaatggagggctgtgatagccagatctggttggcttttgtgggctgacccagacatttaatcaccatctcttatgttgttgccgtaagaaatgcattccaggttgggacttgggatcctgagagcacattcgccccctgtggtggccgcttgccaccttgcaagatggaagcccagtctccttactaccaaactgtagttgtaagcagagggaggggtgagatgtttataggacattccctaagctggggagtgatttttatcactattcatgtcaactgtactttggtatagactccctatcaatttaataatatgaaaagcctaaaataaaactatgcatgctattctatgtgctattttatatcagtaaataagcttatgcttgccagttgtatacacagttatgaggtgtatagaactgactttgacagtattttttgcactgtttcctatctgtttttataaagtcttatttagatattggaccttgttgatgttctcactgcccttgtgcttgctataaaatgtttcatatgtgcctttacaaatgtgagatctttattctaacctttttttgtaaaagatatctattgatttccatatgcaataaacctttttttcagagaaaagtta

SEQ ID NO: 171613 - DNA, 3842 bp, Homo sapiens
  Payload ID: 13742
  Gene Symbol: PTPN14
  Gene Name: protein tyrosine phosphatase, non-receptor type 14
  ENST ID: ENST00000543945
  CDS Start-End: 196-831
ccgcgcgggactccggggcgccacgggggccatgtaagcagctatcttccagagggccacactgggcatggacacccttttccctgcctggaggagcacaggtgatagtgtaattttccagtcacgaaactgctaaggccatctcaggggcgtgtgcgccaggataggcgggcggcgtccgaggaccacatagccatgccttttggtctgaagctccgccggacacggcgctacaacgtcctgagcaagaactgctttgtcacacggattcgcctgctggacagcaatgttatcgagtgcacgctgtcggtggaaagcacagggcaagaatgcctggaggctgtggcccagaggctggagctgcgagagacgcactactttggcctttggtttctcagcaagagccagcaagcacgatgggtggagctggagaaacctctgaagaaacatctggacaaattcgctaatgagcctttgcttttctttggagtcatgttctatgtgccaaatgtgtcatggcttcagcaagaggccacaagatatcagtattacctgcaagtcaaaaaagatgtgcttgaagggcgattacgatgtacattggaccaggtgattcggctagccggcctagctgtgcaagctgattttggagactataatcagtttgattctcaagatttcctcagagagtatgtgctatttcctatggatttggccctggaagaggctgttctggaggagctgacccagaaggtagcccaagaacacaaagcccacaggacaatcatggaaactgtgtacaccttggcattttctttatggggattttcgtgaggaacagaattggaagacaagcggtaatatacaggtggaatgacatggggaatatcactcataacaagtcgaccattctagtggagctcatcaacaaagaagagactgccctctttcacacggatgatatcgaaaatgccaagtatatttctcggttgtttgccacacgacacaagttttacaaacaaaacaaaatctgcactgaacagtcaaattctccaccccccatcagacgccagcccacctggagccgatcctctctgcccaggcagcagccgtacatcctgcctcccgttcacgtccagtgtggtgagcactactcggaaacgcacacctcgcaagacagcatttttcatgggaatgaagaagccttgtattgcaactctcacaacagcctggacttaaattatttaaatggcactgtcaccaatggcagcgtgtgtagcgttcacagcgtcaactccctcaactgctcgcaaagtttcatccaggcctcccctgtatcctccaacctcagtatccctgggagtgacatcatgcgggccgactacatcccgagccaccggcacagcgcgatcatcgtgccctcgtacaggccaacccccgattatgagacagtcatgcgccagatgaagagggggatcctgcatacagacagccagagccagtctctgagaaacctcaacattatcaacacccatgcctacaaccagccagaggatctggtgtacagccaaccggagatgcgggagaggcacccctacactgtcccttatgggccacagggggtctacagcaacaaacttgtcagtccatctgaccagaggaacccaaagaataatgtggtaccaagcaagccgggggcaagcgccatctcgcacacggtgagcaccccagagctggccaacatgcagctgcagggcagccataactacagcacggcccacatgcttaagaactatctcttcaggccaccgcccccctacccacggccacgacctgccaccagcaccccagacctggccagccaccgccacaagtacgtcagcggcagcagcccggacctggtgacccggaaggtgcagctctcggtgaagaccttccaagaggacagctctccggtggttcatcagtctctccaggaggtgagcgagcccctcacggccaccaagcaccacggcactgtgaacaagcgccacagcctggaggtgatgaacagcatggtgcggggcatggaggccatgacgctcaagtcgctccacctccccatggctcgccgcaacacgctccgggagcagggaccgcccgaggaggggtcaggcagccacgaggtcccccagctccctcagtatcaccacaagaagaccttctctgatgccactatgctaatccacagcagcgagagtgaggaggaggaggaggaggctccagaatcggtgccccagatccccatgctccgggagaagatggagtacagtgcccagctgcaggcggccctggcccgcatccccaacaagcccccgcctgagtaccccggtccaaggaagagtgtgagcaatggggctctgaggcaggaccaagccagccttcctcccgccatggccagagccagggtgctgaggcatgggccagccaaggccatcagcatgtctcggactgacccgccggctgtcaacggggcctctctcggcccatccatctcggaacccgacctgactagtgtgaaggagcgggtcaaaaaagagcctgtgaaggagagacctgtgtctgaaatgttttccctggaagacagcattatagagagagagatgatgatcaggaatctagagaagcagaagatggcaggcctggaggcacagaagaggccgctgatgttggcagcattgaatgggctctcggtggctcgagtctcagggcgggaagagaatcgagttgatgccacccgggttcccatggacgagaggttcagaaccctgaagaagaaactagaagagggaatggtgttcacagaatatgagcaaattccaaagaaaaaggcgaatggcattttcagcacagcagctctgccagaaaacgccgagcgcagccgaatccgtgaagttgtcccctatgaggagaatcgagtagagctgataccaaccaaagaaaataacacaggatacattaatgcctcccacatcaaggtggtggttggcggggcagaatggcactacatagccacccaggggcccctgccacacacgtgccacgacttctggcagatggtgtgggagcagggagtgaatgtgattgccatggtcactgcagaggaggagggtggacgaaccaaaagccaccgatactggcccaaactaggttcaaagcacagctcagccacctatggcaagttcaaggtcaccacgaagtttcgaacggattctgtttgctatgcaaccacgggcttgaaggtcaagcaccttttgtctgggcaagaaaggacggtgtggcatttacaatatactgactggccagatcacggctgtccagaagatgtccaaggatttttatcctacttggaggagatccagtcggtccgtcgccataccaacagcatgctggaaggcaccaagaaccggcacccgcccatcgtggtccactgtagtgctggggtgggaaggaccggcgtgctcattctttctgagctgatgatctactgcttggaacataacgaaaaggtggaagtgcccatgatgctgaggctcctcagggagcagaggatgttcatgatccagactatcgctcagtacaagtttgtctaccaagtcctcatccagttcctccaaaactccagactcatttaatcaccccaatccagctcctggaggagggacccagctccatcgcgctggaggagagtcacctccagacaacatctgctccccccacaggggtgcaggtggctggcagcaaacaggctctctgaagacagtagccaagattattcacacataccatgtattattttatatgag

SEQ ID NO: 171614 - DNA, 3669 bp, Homo sapiens
  Payload ID: 13743
  Gene Symbol: PTPN18
  Gene Name: protein tyrosine phosphatase, non-receptor type 18 (brain-derived)
  Uniprot ID: Q99952
  ENST ID: ENST00000175756
  CDS Start-End: 102-1484
gaggcaagggcggggactcagtcaccggcctccgcctcccgcggcgtccacactcgccgcgcgcgcggcggccgggctggaccttgctggcccgcggcgccatgagccgcagcctggactcggcgcggagcttcctggagcggctggaagcgcggggcggccgggagggggcagtcctcgccggcgagttcagcgacatccaggcctgctcggccgcctggaaggctgacggcgtgtgctccaccgtggccggcagtcggccagagaacgtgaggaagaaccgctacaaagacgtgctgccttatgatcagacgcgagtaatcctctccctgctccaggaagagggacacagcgactacattaatggcaacttcatccggggcgtggatggaagcctggcctacattgccacgcaaggacccttgcctcacaccctgctagacttctggagactggtctgggagtttggggtcaaggtgatcctgatggcctgtcgagagatagagaatgggcggaaaaggtgtgagcggtactgggcccaggagcaggagccactgcagactgggcttttctgcatcactctgataaaggagaagtggctgaatgaggacatcatgctcaggaccctcaaggtcacattccagaaggagtcccgttctgtgtaccagctacagtatatgtcctggccagaccgtggggtccccagcagtcctgaccacatgctcgccatggtggaggaagcccgtcgcctccagggatctggccctgaacccctctgtgtccactgcagtgcgggttgtgggcgaacaggcgtcctgtgcaccgtggattatgtgaggcagctgctcctgacccagatgatcccacctgacttcagtctctttgatgtggtccttaagatgaggaagcagcggcctgcggccgtgcagacagaggagcagtacaggttcctgtaccacacggtggctcagatgttctgctccacactccagaatgccagcccccactaccagaacatcaaagagaattgtgccccactctacgacgatgccctcttcctccggactccccaggcacttctcgccataccccgcccaccaggaggggtcctcaggagcatctctgtgcccgggtccccgggccacgccatggctgacacctacgcggtggtgcagaagcgcggggctccagcgggcgccgggagtgggacgcagacggggacggggacggggacgggggcgcgcagcgcggaggaggcgccgctctacagcaaggtgacgccgcgcgcccagcgacccggggcgcacgcggaggacgcgagggggacgctgcctggccgcgttcctgctgaccaaagtcctgccggatctggcgcctacgaggacgtggcgggtggagctcagaccggtgggctaggtttcaacctgcgcattgggaggccgaagggtccccgggacccgcctgctgagtggacccgggtgtaagtctaacgccagttcctgcctgttgcctcttgtgagctcggactgctgatgccccggtgctgctgagcgccgtgcgcagaatggaaacagtgggcctggatcaaagttaaagtttctcagggtgggaaatgtgggggctttgccccaatgactgtagcattcaaggcttgaggctggaggaggtagctagggtatagtggctggtgaggctgcacagagcagattcaagaaagaagatcaggaaggggcatgacccctgagttatgaaggggagaagggacagatgagcttccggagactgctctcctcaccacacagcactagtccatcctcagcacctgagcctccctcacttggacactcaggggaccacacagagaagtggatggacacttcgccatccaggcagaactaagccaggcataaccacagccaagcagattaaccccaggcagaccgataaaaagacctccagataggcagacagacagatggaccaccaacctggacagacagccaaagcttcagagatacagtccacaggtggacaaagggatccccagccagagagagagagaccagccaacagcttgatagaccagtgcagccagagagaccaccaaacagagcccccaaaagacagacatctctgctagctggacagccaggtggaccccctaagttagattactagacagatataaacagatcccctgctgaacagatacacagagttctcagaccccacccccaccctcaggtgggctggctggctgacagaccttctggccagacagactcctaaccaaccagatggactgccagacaggcagacatcagccacatggaatcctgacatcccagccagccggccagactctcatcttgatgtcttgatggatggaccccagctagtcagacatgatcctccagattgacagacaagtcccccaaatgagtacacatctccagctattcagacagatggacccccagcaaatcaggacctatctaggcagaccccagccagacccccgccagacagactcccaaccagactgaccccttactattcacacagcctgccgagtagctgggactacaggtctaattttttttttttttaagaaatgagtttttgccatgttgcccagactggtcttgaactcccaacctcaagcaatcctcctgcctcagcctcccaaagtgctgagattacaggtgtgagccaccaggctcagccccctaagatttgaaacactttaaatggcccatggtagggttcctgctaggataaaacattaagcggctgttaaaagaaataaaaggaggacacgtctctgtgcactggtgtggacaaatctccaagtcactgcaaaatggaaaaagtataagatgctctttccctgaacctcaagggtcccgcccctctcactttcaggtctctggacctctgactgacactgtgcctgcccaggtccctgtatgcactgccacagtgccctgggccccatgtccacccctgtcctgcccttctctgggatagggctggccttcctctgcctctgcctggctgcatccatggtcgatctcaagtgccttggcatgaactccactctcctgcagccttcaatcaaggaatgatggggatgtgtacataccccaccccaccccttggcagggtgatgctgaggtgtggatttttaacagttcccagactttcccaggaggcttgggtttgggtgcccacagtgggagctggtgtgatatcataccttcgccggccgcctttccttcctgttctctgtgcccctactcccactctagagctgccccgtttctctgttttcgtgaaagagctgaccctgtgctgcctcccactctcccaatgcccctgccactcctgtgagcctgctgctggtgaggtcggtgctgacctctgtgttgctggataatgagtcatctatctctggaggagaagaaaggcaggtcctccacagccctgataaaatctccaagtctcccagtttcgggtccctctcctgggatgcagacccactgcctgcccagctggtacgatccacatgccctcttcttgggaataggggcatgggaaagtgactaaagatactgttctggctgctgtgttcactgtgagtaataaactgtccatttctccgattca

SEQ ID NO: 171615 - DNA, 2472 bp, Homo sapiens
  Payload ID: 13743
  Gene Symbol: PTPN18
  Gene Name: protein tyrosine phosphatase, non-receptor type 18 (brain-derived)
  Uniprot ID: Q99952
  ENST ID: ENST00000347849
  CDS Start-End: 64-1125
ccgcggcgtccacactcgccgcgcgcgcggcggccgggctggaccttgctggcccgcggcgccatgagccgcagcctggactcggcgcggagcttcctggagcggctggaagcgcggggcggccgggagggggcagtcctcgccggcgagttcagcaaaaggtgtgagcggtactgggcccaggagcaggagccactgcagactgggcttttctgcatcactctgataaaggagaagtggctgaatgaggacatcatgctcaggaccctcaaggtcacattccagaaggagtcccgttctgtgtaccagctacagtatatgtcctggccagaccgtggggtccccagcagtcctgaccacatgctcgccatggtggaggaagcccgtcgcctccagggatctggccctgaacccctctgtgtccactgcagtgcgggttgtgggcgaacaggcgtcctgtgcaccgtggattatgtgaggcagctgctcctgacccagatgatcccacctgacttcagtctctttgatgtggtccttaagatgaggaagcagcggcctgcggccgtgcagacagaggagcagtacaggttcctgtaccacacggtggctcagatgttctgctccacactccagaatgccagcccccactaccagaacatcaaagagaattgtgccccactctacgacgatgccctcttcctccggactccccaggcacttctcgccataccccgcccaccaggaggggtcctcaggagcatctctgtgcccgggtccccgggccacgccatggctgacacctacgcggtggtgcagaagcgcggggctccagcgggcgccgggagtgggacgcagacggggacggggacggggacgggggcgcgcagcgcggaggaggcgccgctctacagcaaggtgacgccgcgcgcccagcgacccggggcgcacgcggaggacgcgagggggacgctgcctggccgcgttcctgctgaccaaagtcctgccggatctggcgcctacgaggacgtggcgggtggagctcagaccggtgggctaggtttcaacctgcgcattgggaggccgaagggtccccgggacccgcctgctgagtggacccgggtgtaagtctaacgccagttcctgcctgttgcctcttgtgagctcggactgctgatgccccggtgctgctgagcgccgtgcgcagaatggaaacagtgggcctggatcaaagttaaagtttctcagggtgggaaatgtgggggctttgccccaatgactgtagcattcaaggcttgaggctggaggaggtagctagggtatagtggctggtgaggctgcacagagcagattcaagaaagaagatcaggaaggggcatgacccctgagttatgaaggggagaagggacagatgagcttccggagactgctctcctcaccacacagcactagtccatcctcagcacctgagcctccctcacttggacactcaggggaccacacagagaagtggatggacacttcgccatccaggcagaactaagccaggcataaccacagccaagcagattaaccccaggcagaccgataaaaagacctccagataggcagacagacagatggaccaccaacctggacagacagccaaagcttcagagatacagtccacaggtggacaaagggatccccagccagagagagagagaccagccaacagcttgatagaccagtgcagccagagagaccaccaaacagagcccccaaaagacagacatctctgctagctggacagccaggtggaccccctaagttagattactagacagatataaacagatcccctgctgaacagatacacagagttctcagaccccacccccaccctcaggtgggctggctggctgacagaccttctggccagacagactcctaaccaaccagatggactgccagacaggcagacatcagccacatggaatcctgacatcccagccagccggccagactctcatcttgatgtcttgatggatggaccccagctagtcagacatgatcctccagattgacagacaagtcccccaaatgagtacacatctccagctattcagacagatggacccccagcaaatcaggacctatctaggcagaccccagccagacccccgccagacagactcccaaccagactgaccccttactattcacacagcctgccgagtagctgggactacaggtctaattttttttttttttaagaaatgagtttttgccatgttgcccagactggtcttgaactcccaacctcaagcaatcctcctgcctcagcctcccaaagtgctgagattacaggtgtgagccaccaggctcagccccctaagatttgaaacactttaaatggcccatggtagggttcctgctaggataaaacattaagcggctgttaaaagaaataaaaggaggacacgtctctgtgca

SEQ ID NO: 171616 - DNA, 993 bp, Homo sapiens
  Payload ID: 13743
  Gene Symbol: PTPN18
  Gene Name: protein tyrosine phosphatase, non-receptor type 18 (brain-derived)
  ENST ID: ENST00000409022
  CDS Start-End: 1-808
agaccgtggggtccccagcagtcctgaccacatgctcgccatggtggaggaagcccgtcgcctccagggatctggccctgaacccctctgtgtccactgcagtgcgggttgtgggcgaacaggcgtcctgtgcaccgtggattatgtgaggcagctgctcctgacccagatgatcccacctgacttcagtctctttgatgtggtccttaagatgaggaagcagcggcctgcggccgtgcagacagaggagcagtacaggttcctgtaccacacggtggctcagatgttctgctccacactccagaatgccagcccccactaccagaacatcaaagagaattgtgccccactctacgacgatgccctcttcctccggactccccaggcacttctcgccataccccgcccaccaggaggggtcctcaggagcatctctgtgcccgggtccccgggccacgccatggctgacacctacgcggtggtgcagaagcgcggggctccagcgggcgccgggagtgggacgcagacggggacggggacggggacgggggcgcgcagcgcggaggaggcgccgctctacagcaaggtgacgccgcgcgcccagcgacccggggcgcacgcggaggacgcgagggggacgctgcctggccgcgttcctgctgaccaaagtcctgccggatctggcgcctacgaggacgtggcgggtggagctcagaccggtgggctaggtttcaacctgcgcattgggaggccgaagggtccccgggacccgcctgctgagtggacccgggtgtctctggacctctgactgacactgtgcctgcccaggtccctgtatgcactgccacagtgccctgggccccatgtccacccctgtcctgcccttctctgggatagggctggccttcctctgcctctgcctggctgcatccatggtcgatctcaagtgccttggcatgaactccactctcctgcagccttcaatcaaggaat

SEQ ID NO: 171617 - DNA, 785 bp, Homo sapiens
  Payload ID: 13743
  Gene Symbol: PTPN18
  Gene Name: protein tyrosine phosphatase, non-receptor type 18 (brain-derived)
  ENST ID: ENST00000428843
  CDS Start-End: 43-189
cgcgcgcggcggccgggctggaccttgctggcccgcggcgccatgagccgcagcctggactcggcgcggagcttcctggagcggctggaagcgcggggcggccgggagggggcagtcctcgccggcgagttcagcgaaggaaggggctgcagcagggcgaagaggaacacggaggctgtggcgtggtgagggacatccaggcctgctcggccgcctggaaggctgacggcgtgtgctccaccgtggccggcagtcggccagagaacgtgaggaagaaccgctacaaagacgtgctgccttatgatcagacgcgagtaatcctctccctgctccaggaagagggacacagcgactacattaatggcaacttcatccggggcgtggatggaagcctggcctacattgccacgcaaggacccttgcctcacaccctgctagacttctggagactggtctgggagtttggggtcaaggtgatcctgatggcctgtcgagagatagagaatgggcggaaaaggtgtgagcggtactgggcccaggagcaggagccactgcagactgggcttttctgcatcactctgataaaggagaagtggctgaatgaggacatcatgctcaggaccctcaaggtcacattccagaaggagtcccgttctgtgtaccagctacagtatatgtcctggccagaccgtggggtccccagcagtcctgaccacatgctcgccatggtggaggaagcccgtcgcctccagggatctggccctgaacccctctgtgtccactgc

SEQ ID NO: 171618 - DNA, 3467 bp, Homo sapiens
  Payload ID: 13744
  Gene Symbol: PTPN2
  Gene Name: protein tyrosine phosphatase, non-receptor type 2
  Uniprot ID: P17706
  ENST ID: ENST00000309660
  CDS Start-End: 95-1342
atgcgccgcagcgccagcgctctccccggatcgtgcggggcctgagcctctccgccggcgcaggctctgctcgcgccagctcgctcccgcagccatgcccaccaccatcgagcgggagttcgaagagttggatactcagcgtcgctggcagccgctgtacttggaaattcgaaatgagtcccatgactatcctcatagagtggccaagtttccagaaaacagaaatcgaaacagatacagagatgtaagcccatatgatcacagtcgtgttaaactgcaaaatgctgagaatgattatattaatgccagtttagttgacatagaagaggcacaaaggagttacatcttaacacagggtccacttcctaacacatgctgccatttctggcttatggtttggcagcagaagaccaaagcagttgtcatgctgaaccgcattgtggagaaagaatcggttaaatgtgcacagtactggccaacagatgaccaagagatgctgtttaaagaaacaggattcagtgtgaagctcttgtcagaagatgtgaagtcgtattatacagtacatctactacaattagaaaatatcaatagtggtgaaaccagaacaatatctcactttcattatactacctggccagattttggagtccctgaatcaccagcttcatttctcaatttcttgtttaaagtgagagaatctggctccttgaaccctgaccatgggcctgcggtgatccactgtagtgcaggcattgggcgctctggcaccttctctctggtagacacttgtcttgttttgatggaaaaaggagatgatattaacataaaacaagtgttactgaacatgagaaaataccgaatgggtcttattcagaccccagatcaactgagattctcatacatggctataatagaaggagcaaaatgtataaagggagattctagtatacagaaacgatggaaagaactttctaaggaagacttatctcctgcctttgatcattcaccaaacaaaataatgactgaaaaatacaatgggaacagaataggtctagaagaagaaaaactgacaggtgaccgatgtacaggactttcctctaaaatgcaagatacaatggaggagaacagtgagagtgctctacggaaacgtattcgagaggacagaaaggccaccacagctcagaaggtgcagcagatgaaacagaggctaaatgagaatgaacgaaaaagaaaaaggtggttatattggcaacctattctcactaagatggggtttatgtcagtcattttggttggcgcttttgttggctggacactgttttttcagcaaaatgccctataaacaattaattttgcccagcaagcttctgcactagtaactgacagtgctacattaatcataggggtttgtctgcagcaaacgcctcatatcccaaaaacggtgcagtagaatagacatcaaccagataagtgatatttacagtcacaagcccaacatctcaggactcttgactgcaggttcctctgaaccccaaactgtaaatggctgtctaaaataaagacattcatgtttgttaaaaactggtaaattttgcaactgtattcatacatgtcaaacacagtatttcacctgaccaacattgagatatcctttatcacaggatttgtttttggaggctatctggattttaacctgcacttgatataagcaataaatattgtggttttatctacgttattggaaagaaaatgacatttaaataatgtgtgtaatgtataatgtactattgacatgggcatcaacacttttattcttaagcatttcagggtaaatatattttataagtatctatttaatcttttgtagttaactgtactttttaagagctcaatttgaaaaatctgttactaaaaaaataaattgtatgtcgattgaattgtactggatacattttccatttttctaaagagaagtttgatatgagcagttagaagttggaataagcaatttctactatatattgcatttcttttatgttttacagttttccccattttaaaaagaaaagcaaacaaagaaacaaaagtttttcctaaaaatatctttgaaggaaaattctccttactgggatagtcaggtaaacagttggtcaagactttgtaaagaaattggtttctgtaaatcccattattgatatgtttatttttcatgaaaatttcaatgtagttggggtagattatgatttaggaagcaaaagtaagaagcagcattttatgattcataatttcagtttactagactgaagttttgaagtaaacacttttcagtttctttctacttcaataaatagtatgattatatgcaaaccttacattgtcattttaacttaatgaatattttttaaagcaaactgtttaatgaatttaactgctcatttgaatgctagctttcctcagatttcaacattccattcagtgtttaatttgtcttacttaaacttgaaattgttgttacaaatttaattgctaggaggcatggatagcatacattattatggatagcataccttatttcagtggttttcaaactatgctcattggatgtccaggtgggtcaagaggttactttcaaccacagcatctctgccttgtctctttatatgccacataagatttctgcataaggcttaagtattttaaagggggcagttatcatttaaaaacagtttggtcgggcgcggtggctcatgcctgtaatcccagcactttgggaggctgaagtgggcagatcacctgaggtcaggagttcaagaccagcctggccaacgtggtgaaacaccatctctactaaaaatgcaaaaattagctgggcatggtggagggcacctgtaatctcagctactcaggaggctgaggtaggagaattgcttgaacccaggagatggaggttgcagtgagctgagatcacgtcactgcactccagccagggcgacagagcgagactccatctcaaaagaaacaaacaaaaaaaacagtttgggccgggtgtggtggctcacgcttgtaatcccagcacttcggaaggccaaggcgggcggatcacgaggtcaagagatggagactgtcctggccaacatggtgaaatcccttctttactaaaaatacaaaaattatctgggcgtggtggtgcatgcctgtagtcccagctccttgggaggctaaggcaggagaatcacttgaacccgggaggcagaggttgcagtgagccgagattgcaccactgcactccagcctggcaacagagcaagacttcgtctcaaaaaaaaaaaaaaaaaaagtttgaaaaccattggtatagatagatattttgaattgatttgcatagtctccttgaatgtgttaaattatgttgaaagtatgaaagcaggatgtaggtggtactacatattaaataagatttatataac

SEQ ID NO: 171619 - DNA, 1706 bp, Homo sapiens
  Payload ID: 13744
  Gene Symbol: PTPN2
  Gene Name: protein tyrosine phosphatase, non-receptor type 2
  Uniprot ID: P17706
  ENST ID: ENST00000327283
  CDS Start-End: 198-1361
cgcgctcgggcgccgagtctgcgcgctgacgtccgacgctccaggtactttccccacggccgacagggcttggcgtgggggcggggcgcggcgcgcagcgcgcatgcgccgcagcgccagcgctctccccggatcgtgcggggcctgagcctctccgccggcgcaggctctgctcgcgccagctcgctcccgcagccatgcccaccaccatcgagcgggagttcgaagagttggatactcagcgtcgctggcagccgctgtacttggaaattcgaaatgagtcccatgactatcctcatagagtggccaagtttccagaaaacagaaatcgaaacagatacagagatgtaagcccatatgatcacagtcgtgttaaactgcaaaatgctgagaatgattatattaatgccagtttagttgacatagaagaggcacaaaggagttacatcttaacacagggtccacttcctaacacatgctgccatttctggcttatggtttggcagcagaagaccaaagcagttgtcatgctgaaccgcattgtggagaaagaatcggttaaatgtgcacagtactggccaacagatgaccaagagatgctgtttaaagaaacaggattcagtgtgaagctcttgtcagaagatgtgaagtcgtattatacagtacatctactacaattagaaaatatcaatagtggtgaaaccagaacaatatctcactttcattatactacctggccagattttggagtccctgaatcaccagcttcatttctcaatttcttgtttaaagtgagagaatctggctccttgaaccctgaccatgggcctgcggtgatccactgtagtgcaggcattgggcgctctggcaccttctctctggtagacacttgtcttgttttgatggaaaaaggagatgatattaacataaaacaagtgttactgaacatgagaaaataccgaatgggtcttattcagaccccagatcaactgagattctcatacatggctataatagaaggagcaaaatgtataaagggagattctagtatacagaaacgatggaaagaactttctaaggaagacttatctcctgcctttgatcattcaccaaacaaaataatgactgaaaaatacaatgggaacagaataggtctagaagaagaaaaactgacaggtgaccgatgtacaggactttcctctaaaatgcaagatacaatggaggagaacagtgagagtgctctacggaaacgtattcgagaggacagaaaggccaccacagctcagaaggtgcagcagatgaaacagaggctaaatgagaatgaacgaaaaagaaaaaggccaagattgacagacacctaatattcatgacttgagaatattctgcagctataaattttgaaccattgatgtgcaaagcaagacctgaagcccactccggaaactaaagtgaggctcgctaaccctctagattgcctcacagttgtttgtttacaaagtaaactttacatccaggggatgaagagcacccaccagcagaagactttgcagaacctttaattggatgtgttaagtgtttttaatgagtgtatgaaatgtagaaagatgtacaagaaataaattaggggagattactttgtattgtactgccattcctactgtatttttatactttttggcagcattaaatatttttgttaaatagtc

SEQ ID NO: 171620 - DNA, 1542 bp, Homo sapiens
  Payload ID: 13744
  Gene Symbol: PTPN2
  Gene Name: protein tyrosine phosphatase, non-receptor type 2
  Uniprot ID: P17706
  ENST ID: ENST00000353319
  CDS Start-End: 141-1202
ggccgacagggcttggcgtgggggcggggcgcggcgcgcagcgcgcatgcgccgcagcgccagcgctctccccggatcgtgcggggcctgagcctctccgccggcgcaggctctgctcgcgccagctcgctcccgcagccatgcccaccaccatcgagcgggagttcgaagagttggatactcagcgtcgctggcagccgctgtacttggaaattcgaaatgagtcccatgactatcctcatagagtggccaagtttccagaaaacagaaatcgaaacagatacagagatgtaagcccatatgatcacagtcgtgttaaactgcaaaatgctgagaatgattatattaatgccagtttagttgacatagaagaggcacaaaggagttacatcttaacacagggtccacttcctaacacatgctgccatttctggcttatggtttggcagcagaagaccaaagcagttgtcatgctgaaccgcattgtggagaaagaatcggttaaatgtgcacagtactggccaacagatgaccaagagatgctgtttaaagaaacaggattcagtgtgaagctcttgtcagaagatgtgaagtcgtattatacagtacatctactacaattagaaaatatcaatagtggtgaaaccagaacaatatctcactttcattatactacctggccagattttggagtccctgaatcaccagcttcatttctcaatttcttgtttaaagtgagagaatctggctccttgaaccctgaccatgggcctgcggtgatccactgtagtgcaggcattgggcgctctggcaccttctctctggtagacacttgtcttgttttgatggaaaaaggagatgatattaacataaaacaagtgttactgaacatgagaaaataccgaatgggtcttattcagaccccagatcaactgagattctcatacatggctataatagaaggagcaaaatgtataaagggagattctagtatacagaaacgatggaaagaactttctaaggaagacttatctcctgcctttgatcattcaccaaacaaaataatgactgaaaaatacaatgggaacagaataggtctagaagaagaaaaactgacaggtgaccgatgtacaggactttcctctaaaatgcaagatacaatggaggagaacagtgagaggccaagattgacagacacctaatattcatgacttgagaatattctgcagctataaattttgaaccattgatgtgcaaagcaagacctgaagcccactccggaaactaaagtgaggctcgctaaccctctagattgcctcacagttgtttgtttacaaagtaaactttacatccaggggatgaagagcacccaccagcagaagactttgcagaacctttaattggatgtgttaagtgtttttaatgagtgtatgaaatgtagaaagatgtacaagaaataaattaggggagattactttgtattgtactgccattcctactgtatttttatactttttggcagcattaaatatttttgttaaa

SEQ ID NO: 171621 - DNA, 812 bp, Homo sapiens
  Payload ID: 13744
  Gene Symbol: PTPN2
  Gene Name: protein tyrosine phosphatase, non-receptor type 2
  ENST ID: ENST00000585666
  CDS Start-End: 1-454
aaaataccgaatgggtcttattcagaccccagatcaactgagattctcatacatggctataatagaaggagcaaaatgtataaagggagattctagtatacagaaacgatggaaagaactttctaaggaagacttatctcctgcctttgatcattcaccaaacaaaataatgactgaaaaatacaatgggaacagaataggtctagaagaagaaaaactgacaggtgaccgatgtacaggactttcctctaaaatgcaagatacaatggaggagaacagtgagagtgctctacggaaacgtattcgagaggacagaaaggccaccacagctcagaaggtgcagcagatgaaacagaggctaaatgagaatgaacgaaaaagaaaaagacacaggttgctcttgatacatcaaatttctgctgttaaaaacttcagttattttgagtttagttaattcaggagcgggaacctaggccaagattgacagacacctaatattcatgacttgagaatattctgcagctataaattttgaaccattgatgtgcaaagcaagacctgaagcccactccggaaactaaagtgaggctcgctaaccctctagattgcctcacagttgtttgtttacaaagtaaactttacatccaggggatgaagagcacccaccagcagaagactttgcagaacctttaattggatgtgttaagtgtttttaatgagtgtatgaaatgtagaaagatgtacaagaaataaattaggggagattactttgtattgtactgccattcctactgtatttttatactttttgg

SEQ ID NO: 171622 - DNA, 743 bp, Homo sapiens
  Payload ID: 13744
  Gene Symbol: PTPN2
  Gene Name: protein tyrosine phosphatase, non-receptor type 2
  ENST ID: ENST00000591901
  CDS Start-End: 1-338
agaaacgatggaaagaactttctaaggaagacttatctcctgcctttgatcattcaccaaacaaaataatgactgaaaaatacaatgggaacagaataggtctagaagaagaaaaactgacaggtgaccgatgtacaggactttcctctaaaatgcaagatacaatggaggagaacagtgagagtgctctacggaaacgtattcgagaggacagaaaggccaccacagctcagaaggtgcagcagatgaaacagaggctaaatgagaatgaacgaaaaagaaaaagttttccccattttaaaaagaaaagcaaacaaagaaacaaaagtttttcctaaaaatatctttgaaggaaaattctccttactgggatagtcaggccaagattgacagacacctaatattcatgacttgagaatattctgcagctataaattttgaaccattgatgtgcaaagcaagacctgaagcccactccggaaactaaagtgaggctcgctaaccctctagattgcctcacagttgtttgtttacaaagtaaactttacatccaggggatgaagagcacccaccagcagaagactttgcagaacctttaattggatgtgttaagtgtttttaatgagtgtatgaaatgtagaaagatgtacaagaaataaattaggggagattactttgtattgtactgccattcctactgtatttttatactttttggcagcattaaatatttttgttaaata

SEQ ID NO: 171623 - DNA, 577 bp, Homo sapiens
  Payload ID: 13744
  Gene Symbol: PTPN2
  Gene Name: protein tyrosine phosphatase, non-receptor type 2
  ENST ID: ENST00000592059
  CDS Start-End: 374-577
aggagacaccagagctcagtctctctccctccctgcacaggtgcagagggaaggaactgggagcacacagcaagaaagtggctgttcacaagctaggacctgaccctgctggcaccttgatctcggacttccagcctccaaaactgaaattcgaaatgagtcccatgactatcctcatagagtggccaagtttccagaaaacagaaatcgaaacagatacagagatgtaagcccatatgatcacagtcgtgttaaactgcaaaatgctgagaatgattatattaatgccagtttagttgacatagaagaggcacaaaggagttacatcttaacacagggtccacttcctaacacatgctgccatttctggcttatggtttggcagcagaagaccaaagcagttgtcatgctgaaccgcattgtggagaaagaatcggttaaatgtgcacagtactggccaacagatgaccaagagatgctgtttaaagaaacaggattcagtgtgaagctcttgtcagaagatgtgaagtcgtattatacagtacatctactacaattagaaaatatcaatgtaaga

SEQ ID NO: 171624 - DNA, 1648 bp, Homo sapiens
  Payload ID: 13744
  Gene Symbol: PTPN2
  Gene Name: protein tyrosine phosphatase, non-receptor type 2
  Uniprot ID: P17706
  ENST ID: ENST00000591115
  CDS Start-End: 74-1306
ctccccggatcgtgcggggcctgagcctctccgccggcgcaggctctgctcgcgccagctcgctcccgcagccatgcccaccaccatcgagcgggagttcgaagagttggatactcagcgtcgctggcagccgctgtacttggaaattcgaaatgagtcccatgactatcctcatagagtggccaagtttccagaaaacagaaatcgaaacagatacagagatgtaagcccatatgatcacagtcgtgttaaactgcaaaatgctgagaatgattatattaatgccagtttagttgacatagaagaggcacaaaggagttacatcttaacacagggtccacttcctaacacatgctgccatttctggcttatggtttggcagcagaagaccaaagcagttgtcatgctgaaccgcattgtggagaaagaatcggttaaatgtgcacagtactggccaacagatgaccaagagatgctgtttaaagaaacaggattcagtgtgaagctcttgtcagaagatgtgaagtcgtattatacagtacatctactacaattagaaaatatcaattatattgagaacttgtggatcacactgtatttgaaattattaatgctggatgttaaaaggtcactaaaaagtggtgaaaccagaacaatatctcactttcattatactacctggccagattttggagtccctgaatcaccagcttcatttctcaatttcttgtttaaagtgagagaatctggctccttgaaccctgaccatgggcctgcggtgatccactgtagtgcaggcattgggcgctctggcaccttctctctggtagacacttgtcttgttttgatggaaaaaggagatgatattaacataaaacaagtgttactgaacatgagaaaataccgaatgggtcttattcagaccccagatcaactgagattctcatacatggctataatagaaggagcaaaatgtataaagggagattctagtatacagaaacgatggaaagaactttctaaggaagacttatctcctgcctttgatcattcaccaaacaaaataatgactgaaaaatacaatgggaacagaataggtctagaagaagaaaaactgacaggtgaccgatgtacaggactttcctctaaaatgcaagatacaatggaggagaacagtgagagtgctctacggaaacgtattcgagaggacagaaaggccaccacagctcagaaggtgcagcagatgaaacagaggctaaatgagaatgaacgaaaaagaaaaaggccaagattgacagacacctaatattcatgacttgagaatattctgcagctataaattttgaaccattgatgtgcaaagcaagacctgaagcccactccggaaactaaagtgaggctcgctaaccctctagattgcctcacagttgtttgtttacaaagtaaactttacatccaggggatgaagagcacccaccagcagaagactttgcagaacctttaattggatgtgttaagtgtttttaatgagtgtatgaaatgtagaaagatgtacaagaaataaattaggggagattactttgtattgtactgccattcctactgtatttttatactttttggcagcattaaatatttttgttaaata

SEQ ID NO: 171625 - DNA, 577 bp, Homo sapiens
  Payload ID: 13744
  Gene Symbol: PTPN2
  Gene Name: protein tyrosine phosphatase, non-receptor type 2
  ENST ID: ENST00000587703
  CDS Start-End: 1-439
agaagaggcacaaaggagttacatcttaacacagggtccacttcctaacacatgctgccatttctggcttatggtttggcagcagaagaccaaagcagttgtcatgctgaaccgcattgtggagaaagaatcgaaacgatggaaagaactttctaaggaagacttatctcctgcctttgatcattcaccaaacaaaataatgactgaaaaatacaatgggaacagaataggtctagaagaagaaaaactgacaggtgaccgatgtacaggactttcctctaaaatgcaagatacaatggaggagaacagtgagagtgctctacggaaacgtattcgagaggacagaaaggccaccacagctcagaaggtgcagcagatgaaacagaggctaaatgagaatgaacgaaaaagaaaaaggccaagattgacagacacctaatattcatgacttgagaatattctgcagctataaattttgaaccattgatgtgcaaagcaagacctgaagcccactccggaaactaaagtgaggctcgctaaccctctagattgcctcacagttgtttgtttacaaagt

SEQ ID NO: 171626 - DNA, 3390 bp, Homo sapiens
  Payload ID: 13744
  Gene Symbol: PTPN2
  Gene Name: protein tyrosine phosphatase, non-receptor type 2
  ENST ID: ENST00000591497
  CDS Start-End: 254-1414
agatcggtggttaggggtggaatggggaagagtgtgcctgccaaggggcacacagaacctttgtgctgatggaatagtattcaatgcagggaacagaccagttcatcatggaggcattccatcagagcgtctagttagagaagatatgtcatggactgcatcggcacagaagtggggtttatgtgagagaggagttggaagtcacacctgagtggagagcaacgtgaaaaggtgatgtcagcaagaatttaggatgtatggaaaggatggtaaaggcaccaactggatggatcagggagacatggaatgcagaatgcaggaaatagatgatcacagtcgtgttaaactgcaaaatgctgagaatgattatattaatgccagtttagttgacatagaagaggcacaaaggagttacatcttaacacagggtccacttcctaacacatgctgccatttctggcttatggtttggcagcagaagaccaaagcagttgtcatgctgaaccgcattgtggagaaagaatcggttaaatgtgcacagtactggccaacagatgaccaagagatgctgtttaaagaaacaggattcagtgtgaagctcttgtcagaagatgtgaagtcgtattatacagtacatctactacaattagaaaatatcaatagtggtgaaaccagaacaatatctcactttcattatactacctggccagattttggagtccctgaatcaccagcttcatttctcaatttcttgtttaaagtgagagaatctggctccttgaaccctgaccatgggcctgcggtgatccactgtagtgcaggcattgggcgctctggcaccttctctctggtagacacttgtcttgttttgatggaaaaaggagatgatattaacataaaacaagtgttactgaacatgagaaaataccgaatgggtcttattcagaccccagatcaactgagattctcatacatggctataatagaaggagcaaaatgtataaagggagattctagtatacagaaacgatggaaagaactttctaaggaagacttatctcctgcctttgatcattcaccaaacaaaataatgactgaaaaatacaatgggaacagaataggtctagaagaagaaaaactgacaggtgaccgatgtacaggactttcctctaaaatgcaagatacaatggaggagaacagtgagagtgctctacggaaacgtattcgagaggacagaaaggccaccacagctcagaaggtgcagcagatgaaacagaggctaaatgagaatgaacgaaaaagaaaaaggtggttatattggcaacctattctcactaagatggggtttatgtcagtcattttggttggcgcttttgttggctggacactgttttttcagcaaaatgccctataaacaattaattttgcccagcaagcttctgcactagtaactgacagtgctacattaatcataggggtttgtctgcagcaaacgcctcatatcccaaaaacggtgcagtagaatagacatcaaccagataagtgatatttacagtcacaagcccaacatctcaggactcttgactgcaggttcctctgaaccccaaactgtaaatggctgtctaaaataaagacattcatgtttgttaaaaactggtaaattttgcaactgtattcatacatgtcaaacacagtatttcacctgaccaacattgagatatcctttatcacaggatttgtttttggaggctatctggattttaacctgcacttgatataagcaataaatattgtggttttatctacgttattggaaagaaaatgacatttaaataatgtgtgtaatgtataatgtactattgacatgggcatcaacacttttattcttaagcatttcagggtaaatatattttataagtatctatttaatcttttgtagttaactgtactttttaagagctcaatttgaaaaatctgttactaaaaaaataaattgtatgtcgattgaattgtactggatacattttccatttttctaaagagaagtttgatatgagcagttagaagttggaataagcaatttctactatatattgcatttcttttatgttttacagttttccccattttaaaaagaaaagcaaacaaagaaacaaaagtttttcctaaaaatatctttgaaggaaaattctccttactgggatagtcaggtaaacagttggtcaagactttgtaaagaaattggtttctgtaaatcccattattgatatgtttatttttcatgaaaatttcaatgtagttggggtagattatgatttaggaagcaaaagtaagaagcagcattttatgattcataatttcagtttactagactgaagttttgaagtaaacacttttcagtttctttctacttcaataaatagtatgattatatgcaaaccttacattgtcattttaacttaatgaatattttttaaagcaaactgtttaatgaatttaactgctcatttgaatgctagctttcctcagatttcaacattccattcagtgtttaatttgtcttacttaaacttgaaattgttgttacaaatttaattgctaggaggcatggatagcatacattattatggatagcataccttatttcagtggttttcaaactatgctcattggatgtccaggtgggtcaagaggttactttcaaccacagcatctctgccttgtctctttatatgccacataagatttctgcataaggcttaagtattttaaagggggcagttatcatttaaaaacagtttggtcgggcgcggtggctcatgcctgtaatcccagcactttgggaggctgaagtgggcagatcacctgaggtcaggagttcaagaccagcctggccaacgtggtgaaacaccatctctactaaaaatgcaaaaattagctgggcatggtggagggcacctgtaatctcagctactcaggaggctgaggtaggagaattgcttgaacccaggagatggaggttgcagtgagctgagatcacgtcactgcactccagccagggcgacagagcgagactccatctcaaaagaaacaaacaaaaaaaacagtttgggccgggtgtggtggctcacgcttgtaatcccagcacttcggaaggccaaggcgggcggatcacgaggtcaagagatggagactgtcctggccaacatggtgaaatcccttctttactaaaaatacaaaaattatctgggcgtggtggtgcatgcctgtagtcccagctccttgggaggctaaggcaggagaatcacttgaacccgggaggcagaggttgcagtgagccgagattgcaccactgcactccagcctggcaacagagcaagacttcgtctc

SEQ ID NO: 171627 - DNA, 876 bp, Homo sapiens
  Payload ID: 13744
  Gene Symbol: PTPN2
  Gene Name: protein tyrosine phosphatase, non-receptor type 2
  ENST ID: ENST00000591305
  CDS Start-End: 82-210
ccagcgctctccccggatcgtgcggggcctgagcctctccgccggcgcaggctctgctcgcgccagctcgctcccgcagccatgcccaccaccatcgagcgggagttcgaagagttggatactcagcgtcgctggcagccgctgtacttgatgatcacagtcgtgttaaactgcaaaatgctgagaatgattatattaatgccagtttagttgacatagaagaggcacaaaggagttacatcttaacacagggtccacttcctaacacatgctgccatttctggcttatggtttggcagcagaagaccaaagcagttgtcatgctgaaccgcattgtggagaaagaatcgagtggtgaaaccagaacaatatctcactttcattatactacctggccagattttggagtccctgaatcaccagcttcatttctcaatttcttgtttaaagtgagagaatctggctccttgaaccctgaccatgggcctgcggtgatccactgtagtgcaggcattgggcgctctggcaccttctctctggtagacacttgtcttgttttgatggaaaaaggagatgatattaacataaaacaagtgttactgaacatgagaaaataccgaatgggtcttattcagaccccagatcaactgagattctcatacatggctataatagaaggagcaaaatgtataaagggagattctagtatacagaaacgatggaaagaactttctaaggaagacttatctcctgcctttgatcattcaccaaacaaaataatgactgaaaaatacaatgggaacagaataggtctagaagaagaaaaactgacaggtgaccgatgtacaggactttcctctaaaatgcaagatacaa

SEQ ID NO: 171628 - DNA, 772 bp, Homo sapiens
  Payload ID: 13744
  Gene Symbol: PTPN2
  Gene Name: protein tyrosine phosphatase, non-receptor type 2
  ENST ID: ENST00000592776
  CDS Start-End: 137-634
gacagggcttggcgtgggggcggggcgcggcgcgcagcgcgcatgcgccgcagcgccagcgctctccccggatcgtgcggggcctgagcctctccgccggcgcaggctctgctcgcgccagctcgctcccgcagccatgcccaccaccatcgagcgggagttcgaagagttggatactcagcgtcgctggcagccgctgtacttggaaattcgaaatgagtcccatgactatcctcatagagtggccaagtttccagaaaacagaaatcgaaacagatacagagatgtaagcccatatgatcacagtcgtgttaaactgcaaaatgctgagaatgattatattaatgccagtttagttgacatagaagaggcacaaaggagttacatcttaacacagggtccacttcctaacacatgctgccatttctggcttatggtttggcagcagaagaccaaagcagttgtcatgctgaaccgcattgtggagaaagaatcggttaaatgtgcacagtactggccaacagatgaccaagagatgctgtttaaagaaacaggattcagtgtgaagctcttgtcagaagatgtgaagtcgtattatacagtacatctactacaattagaaaatatcaattgagagaatctggctccttgaaccctgaccatgggcctgcggtgatccactgtagtgcaggcattgggcgctctggcaccttctctctggtagacacttgtcttgttttgatggaaaaaggagatgatattaacataaaac

SEQ ID NO: 171629 - DNA, 646 bp, Homo sapiens
  Payload ID: 13744
  Gene Symbol: PTPN2
  Gene Name: protein tyrosine phosphatase, non-receptor type 2
  ENST ID: ENST00000589216
  CDS Start-End: 58-186
gggcctgagcctctccgccggcgcaggctctgctcgcgccagctcgctcccgcagccatgcccaccaccatcgagcgggagttcgaagagttggatactcagcgtcgctggcagccgctgtacttgatgatcacagtcgtgttaaactgcaaaatgctgagaatgattatattaatgccagtttagttgacatagaagaggcacaaaggagttacatcttaacacagggtccacttcctaacacatgctgccatttctggcttatggtttggcagcagaagaccaaagcagttgtcatgctgaaccgcattgtggagaaagaatcggttaaatgtgcacagtactggccaacagatgaccaagagatgctgtttaaagaaacaggattcagtgtgaagctcttgtcagaagatgtgaagtcgtattatacagtacatctactacaattagaaaatatcaatagtggtgaaaccagaacaatatctcactttcattatactacctggccagattttggagtccctgaatcaccagcttcatttctcaatttcttgtttaaagtgagagaatctggctccttgaaccctgaccatgggcctgcggtgatccactgtagtgcaggcattgggcgctctggcaccttctc

SEQ ID NO: 171630 - DNA, 2872 bp, Homo sapiens
  Payload ID: 13745
  Gene Symbol: PTPN20
  Gene Name: protein tyrosine phosphatase, non-receptor type 20
  Uniprot ID: Q4JDL3
  ENST ID: ENST00000374218
  CDS Start-End: 274-1293
tggacccaactggcgaggctgctggggttgcagcgggacagttggggcggccccgcaggcccagtaaacgattatgagggaaatgactctgaagcagaagacttgaatttcagggagactttgccttcatcaagtcaggaaaacacacctagatcaaaggtttttgaaaataaagttaattcagagaaggtaaaactttctcttcggaatttcccacataatgattatgaggatgtttttgaagagccttcagaaagtggcagtgatcccagcatgtggacagccagaggccccttcagaagagacaggtggagcagtgaggatgaggaggctgcagggccatcacaggctctctcccctctactttctgatacgcgcaaaattgtttctgaaggagaactagatcagttggctcagattcggccattaatattcaattttcatgagcagacagccatcaaggattgtttgaaaatccttgaggaaaaaacagcagcgtatgatatcatgcaggaatttatggctttagaacttaagaatctgcctggtgagttcaactctgggaatcaaccaagcaacagagaaaaaaatagataccgagatattcttccatatgattcaacacgcgttcctcttggaaaaagcaaggactacatcaatgctagttatattagaatagtcaattgtggagaagagtatttttatatcgctactcaaggaccactgctgagcaccatagatgacttttggcaaatggtgttggaaaataattcaaatgttattgccatgataaccagagagatagaaggtggaattatcaaatgctaccattactggcccatttctctgaagaagccattggaattgaaacacttccgtgtattcctggagaactaccagatacttcaatatttcatcattcgaatgtttcaagttgtggagaagtccacgggaactagtcactctgtaaaacagttgcagttcaccaagtggccagaccatggcactcctgcctcagcagatagcttcataaaatatattcgttatgcaaggaagagccaccttacaggacccatggttgttcactgcagtgccggcataggccggacaggggtgttcctatgtgtggatgtcgtgttctgtgccatcgtaaagaactgttcattcaacatcatggatatagtggcccaaatgagagaacaacgttctggcatggttcaaacgaaggagcagtatcacttttgttacgatattgtgcttgaagttcttcggaaacttctgactttggattaagaaagacttctgttgcctctcacttgaaattaccaagtgggtttgcacctcctcataaagaacatgtttgcactgtgctgaagggctttgctatgcatacaatctgctttcttggtttatcagtttattttctttctaaaagctccctgaagggcaatatcatttggcttggggtgatcagtgtttacttattgatcttgctagacaatatcaaaataacttcccacattttccagtgaaacagatgttacataaaacgattgcagcttggctatttggttgaagggattacagagcccaataaaggatttaaaatatattcattaagattttatttggaaaggtggctggagagagctgaggatttccaggactttgtaagttcttattctgggagaacataaggccaataatcatgacctcttccaggcatttttaagacagatgtctattcatgttctttagctagagcctgtactttttgctggcatttgaataacccagtttaaaaagagtccagttagggtggactaactttggacacaaattggcttccatttcctacattttcatactgctgccttcctacagctgctagaccaagacctgttggtctgggaagcatttcatggatagggagagctcctctcggtgaacagtccaaaactaaaatagatgtttatatagaaagcccaagaggagacttttgccatgcctgagttctttcctatcccaccctaacacttaacatattacttagtctgctttgttaaaagcaagtattacctttaacttgcctcttactctttgccctttagctaactaataaagtttgatataggcattattatataattctgagtcattcatggtatctctcatgtttgatgtatttttcaaactaagatctatgatagttttttttccagagttccattaaatcatttatttcctttactttctcacctctgttgaaacatttagaaactggatttgggaacccaattttggaaaaccagattcatagtcatgaaaatggaaacttccatattctgtttttgaaaagatgtggccattattacagtaattttattataggactttgcctcgtacaattaatagtgatattttggacaaggagttctggtgacaagctatacctaattataagctataaaacaatagatatgagtgtttgtacagtttaactcaatggagatcagaatattctatgtattgagaaaatgtttaatatcaatctataaatcttgaatttctaagaggcttattttgttcttttggctgaatgagtatatttgaattggttgaataattaataattctcattgtaaaaataattatatgccaaaaatatatttgatgttaaatcaaatagatgattctgtttacattgttcatatgaataataatctgtgttaatttcattttgataattggcctttaatatttgtatctctaattttattttctctctgttactgtaaaataatagctataatgtataacaattttcttcagaagaattctatgctattattaaaataaaatatttactgtg

SEQ ID NO: 171631 - DNA, 1388 bp, Homo sapiens
  Payload ID: 13745
  Gene Symbol: PTPN20
  Gene Name: protein tyrosine phosphatase, non-receptor type 20
  Uniprot ID: Q4JDL3
  ENST ID: ENST00000374339
  CDS Start-End: 78-1340
tggcctgactcacaggacactaaggctccttttctgaagaagccttttaccagtctcatttaggggatgggaacaacatgtcttcacctagggactttagagcagagcctgtaaacgattatgagggaaatgactctgaagcagaagacttgaatttcagggagactttgccttcatcaagtcaggaaaacacacctagatcaaaggtttttgaaaataaagttaattcagagaaggtaaaactttctcttcggaatttcccacataatgattatgaggatgtttttgaagagccttcagaaagtggcagtgatcccagcatgtggacagccagaggccccttcagaagagacaggtggagcagtgaggatgaggaggctgcagggccatcacaggctctctcccctctactttctgatacgcgcaaaattgtttctgaaggagaactagatcagttggctcagattcggccattaatattcaattttcatgagcagacagccatcaaggattgtttgaaaatccttgaggaaaaaacagcagcgtatgatatcatgcaggaatttatggctttagaacttaagaatctgcctggtgagttcaactctgggaatcaaccaagcaacagagaaaaaaatagataccgagatattcttccatatgattcaacacgcgttcctcttggaaaaagcaaggactacatcaatgctagttatattagaatagtcaattgtggagaagagtatttttatatcgctactcaaggaccactgctgagcaccatagatgacttttggcaaatggtgttggaaaataattcaaatgttattgccatgataaccagagagatagaaggtggaattatcaaatgctaccattactggcccatttctctgaagaagccattggaattgaaacacttccgtgtattcctggagaactaccagatacttcaatatttcatcattcgaatgtttcaagttgtggagaagtccacgggaactagtcactctgtaaaacagttgcagttcaccaagtggccagaccatggcactcctgcctcagcagatagcttcataaaatatattcgttatgcaaggaagagccaccttacaggacccatggttgttcactgcagtgccggcataggccggacaggggtgttcctatgtgtggatgtcgtgttctgtgccatcgtaaagaactgttcattcaacatcatggatatagtggcccaaatgagagaacaacgttctggcatggttcaaacgaaggagcagtatcacttttgttacgatattgtgcttgaagttcttcggaaacttctgactttggattaagaaagacttctgttgcctctcacttgaaattaccaagtgggtttgcac

SEQ ID NO: 171632 - DNA, 1929 bp, Homo sapiens
  Payload ID: 13745
  Gene Symbol: PTPN20
  Gene Name: protein tyrosine phosphatase, non-receptor type 20
  ENST ID: ENST00000374342
  CDS Start-End: 123-317
gcaggtgggattggatagcgacgaaggccggcaggctaggcgtggacccaactggcgaggctgctggggttgcagcgggacagttggggcggccccgcaggcccagtggcagtgatcccagcatgtggacagccagaggccccttcagaagagacaggtggagcagtgaggatgaggaggctgcagggccatcacaggctctctcccctctactttctgttcaacatcatggatatagtggcccaaatgagagaacaacgttctggcatggttcaaacgaaggagcagtatcacttttgttacgatattgtgcttgaagttcttcggaaacttctgactttggattaagaaagacttctgttgcctctcacttgaaattaccaagtgggtttgcacctcctcataaagaacatgtttgcactgtgctgaagggctttgctatgcatacaatctgctttcttggtttatcagtttattttctttctaaaagctccctgaagggcaatatcatttggcttggggtgatcagtgtttacttattgatcttgctagacaatatcaaaataacttcccacattttccagtgaaacagatgttacataaaacgattgcagcttggctatttggttgaagggattacagagcccaataaaggatttaaaatatattcattaagattttatttggaaaggtggctggagagagctgaggatttccaggactttgtaagttcttattctgggagaacataaggccaataatcatgacctcttccaggcatttttaagacagatgtctattcatgttctttagctagagcctgtactttttgctggcatttgaataacccagtttaaaaagagtccagttagggtggactaactttggacacaaattggcttccatttcctacattttcatactgctgccttcctacagctgctagaccaagacctgttggtctgggaagcatttcatggatagggagagctcctctcggtgaacagtccaaaactaaaatagatgtttatatagaaagcccaagaggagacttttgccatgcctgagttctttcctatcccaccctaacacttaacatattacttagtctgctttgttaaaagcaagtattacctttaacttgcctcttactctttgccctttagctaactaataaagtttgatataggcattattatataattctgagtcattcatggtatctctcatgtttgatgtatttttcaaactaagatctatgatagttttttttccagagttccattaaatcatttatttcctttactttctcacctctgttgaaacatttagaaactggatttgggaacccaattttggaaaaccagattcatagtcatgaaaatggaaacttccatattctgtttttgaaaagatgtggccattattacagtaattttattataggactttgcctcgtacaattaatagtgatattttggacaaggagttctggtgacaagctatacctaattataagctataaaacaatagatatgagtgtttgtacagtttaactcaatggagatcagaatattctatgtattgagaaaatgtttaatatcaatctataaatcttgaatttctaagaggcttattttgttcttttggctgaatgagtatatttgaattggttgaataattaataattctcattgtaaaaataattatatgccaaaaatatatttgatgttaaatcaaatagatgattctgtttacattgttcatatgaataataatctgtgttaatttcattttgataattggcctttaatatttgtatctctaattttattttctctctgttactgtaaaataatagctataatgtataacaattttcttcagaagaattctatgctattattaaaataaaatatttactgtgta

SEQ ID NO: 171633 - DNA, 2481 bp, Homo sapiens
  Payload ID: 13745
  Gene Symbol: PTPN20
  Gene Name: protein tyrosine phosphatase, non-receptor type 20
  Uniprot ID: Q4JDL3
  ENST ID: ENST00000374346
  CDS Start-End: 191-871
gcgtggacccaactggcgaggctgctggggttgcagcgggacagttggggcggccccgcaggcccaggtgaacaaaaattgtttgctggcccccaggatactaactagacctttggcctgactcacaggacactaaggctccttttctgaagaagccttttaccagtctcatttaggggatgggaacaacatgtcttcacctagggactttagagcagagcctgtaaacgattatgagggaaatgactctgaagcagaagacttgaatttcagggagactttgccttcatcaagtcaggaaaacacacctagatcaaaggtttttgaaaataaagttaattcagagaaggtaaaactttctcttcggaatttcccacataatgattatgaggatgtttttgaagagccttcagaaagtggcagtgatcccagcatgtggacagccagaggccccttcagaagagacaggtggagcagtgaggatgaggaggctgcagggccatcacaggctctctcccctctactttctgatacgcgcaaaattgtttctgaaggagaactagatcagttggctcagattcggccattaatattcaattttcatgagcagacagccatcaaggattgtttgaaaatccttgaggaaaaaacagcagcgtatgatatcatgcaggaatttatggctttagaacttaagaatctgcctggtgagttcaactctgggaatcaaccaagcaacagagaaaaaaatagataccgagatattcttccatttcaacatcatggatatagtggcccaaatgagagaacaacgttctggcatggttcaaacgaaggagcagtatcacttttgttacgatattgtgcttgaagttcttcggaaacttctgactttggattaagaaagacttctgttgcctctcacttgaaattaccaagtgggtttgcacctcctcataaagaacatgtttgcactgtgctgaagggctttgctatgcatacaatctgctttcttggtttatcagtttattttctttctaaaagctccctgaagggcaatatcatttggcttggggtgatcagtgtttacttattgatcttgctagacaatatcaaaataacttcccacattttccagtgaaacagatgttacataaaacgattgcagcttggctatttggttgaagggattacagagcccaataaaggatttaaaatatattcattaagattttatttggaaaggtggctggagagagctgaggatttccaggactttgtaagttcttattctgggagaacataaggccaataatcatgacctcttccaggcatttttaagacagatgtctattcatgttctttagctagagcctgtactttttgctggcatttgaataacccagtttaaaaagagtccagttagggtggactaactttggacacaaattggcttccatttcctacattttcatactgctgccttcctacagctgctagaccaagacctgttggtctgggaagcatttcatggatagggagagctcctctcggtgaacagtccaaaactaaaatagatgtttatatagaaagcccaagaggagacttttgccatgcctgagttctttcctatcccaccctaacacttaacatattacttagtctgctttgttaaaagcaagtattacctttaacttgcctcttactctttgccctttagctaactaataaagtttgatataggcattattatataattctgagtcattcatggtatctctcatgtttgatgtatttttcaaactaagatctatgatagttttttttccagagttccattaaatcatttatttcctttactttctcacctctgttgaaacatttagaaactggatttgggaacccaattttggaaaaccagattcatagtcatgaaaatggaaacttccatattctgtttttgaaaagatgtggccattattacagtaattttattataggactttgcctcgtacaattaatagtgatattttggacaaggagttctggtgacaagctatacctaattataagctataaaacaatagatatgagtgtttgtacagtttaactcaatggagatcagaatattctatgtattgagaaaatgtttaatatcaatctataaatcttgaatttctaagaggcttattttgttcttttggctgaatgagtatatttgaattggttgaataattaataattctcattgtaaaaataattatatgccaaaaatatatttgatgttaaatcaaatagatgattctgtttacattgttcatatgaataataatctgtgttaatttcattttgataattggcctttaatatttgtatctctaattttattttctctctgttactgtaaaataatagctataatgtataacaattttcttcagaagaattctatgctattattaaaataaaatatttactgtg

SEQ ID NO: 171634 - DNA, 2779 bp, Homo sapiens
  Payload ID: 13745
  Gene Symbol: PTPN20
  Gene Name: protein tyrosine phosphatase, non-receptor type 20
  Uniprot ID: Q4JDL3
  ENST ID: ENST00000395721
  CDS Start-End: 179-1198
tggacccaactggcgaggctgctggggttgcagcgggacagttggggcggccccgcaggcccaggtttttgaaaataaagttaattcagagaaggtaaaactttctcttcggaatttcccacataatgattatgaggatgtttttgaagagccttcagaaagtggcagtgatcccagcatgtggacagccagaggccccttcagaagagacaggtggagcagtgaggatgaggaggctgcagggccatcacaggctctctcccctctactttctgatacgcgcaaaattgtttctgaaggagaactagatcagttggctcagattcggccattaatattcaattttcatgagcagacagccatcaaggattgtttgaaaatccttgaggaaaaaacagcagcgtatgatatcatgcaggaatttatggctttagaacttaagaatctgcctggtgagttcaactctgggaatcaaccaagcaacagagaaaaaaatagataccgagatattcttccatatgattcaacacgcgttcctcttggaaaaagcaaggactacatcaatgctagttatattagaatagtcaattgtggagaagagtatttttatatcgctactcaaggaccactgctgagcaccatagatgacttttggcaaatggtgttggaaaataattcaaatgttattgccatgataaccagagagatagaaggtggaattatcaaatgctaccattactggcccatttctctgaagaagccattggaattgaaacacttccgtgtattcctggagaactaccagatacttcaatatttcatcattcgaatgtttcaagttgtggagaagtccacgggaactagtcactctgtaaaacagttgcagttcaccaagtggccagaccatggcactcctgcctcagcagatagcttcataaaatatattcgttatgcaaggaagagccaccttacaggacccatggttgttcactgcagtgccggcataggccggacaggggtgttcctatgtgtggatgtcgtgttctgtgccatcgtaaagaactgttcattcaacatcatggatatagtggcccaaatgagagaacaacgttctggcatggttcaaacgaaggagcagtatcacttttgttacgatattgtgcttgaagttcttcggaaacttctgactttggattaagaaagacttctgttgcctctcacttgaaattaccaagtgggtttgcacctcctcataaagaacatgtttgcactgtgctgaagggctttgctatgcatacaatctgctttcttggtttatcagtttattttctttctaaaagctccctgaagggcaatatcatttggcttggggtgatcagtgtttacttattgatcttgctagacaatatcaaaataacttcccacattttccagtgaaacagatgttacataaaacgattgcagcttggctatttggttgaagggattacagagcccaataaaggatttaaaatatattcattaagattttatttggaaaggtggctggagagagctgaggatttccaggactttgtaagttcttattctgggagaacataaggccaataatcatgacctcttccaggcatttttaagacagatgtctattcatgttctttagctagagcctgtactttttgctggcatttgaataacccagtttaaaaagagtccagttagggtggactaactttggacacaaattggcttccatttcctacattttcatactgctgccttcctacagctgctagaccaagacctgttggtctgggaagcatttcatggatagggagagctcctctcggtgaacagtccaaaactaaaatagatgtttatatagaaagcccaagaggagacttttgccatgcctgagttctttcctatcccaccctaacacttaacatattacttagtctgctttgttaaaagcaagtattacctttaacttgcctcttactctttgccctttagctaactaataaagtttgatataggcattattatataattctgagtcattcatggtatctctcatgtttgatgtatttttcaaactaagatctatgatagttttttttccagagttccattaaatcatttatttcctttactttctcacctctgttgaaacatttagaaactggatttgggaacccaattttggaaaaccagattcatagtcatgaaaatggaaacttccatattctgtttttgaaaagatgtggccattattacagtaattttattataggactttgcctcgtacaattaatagtgatattttggacaaggagttctggtgacaagctatacctaattataagctataaaacaatagatatgagtgtttgtacagtttaactcaatggagatcagaatattctatgtattgagaaaatgtttaatatcaatctataaatcttgaatttctaagaggcttattttgttcttttggctgaatgagtatatttgaattggttgaataattaataattctcattgtaaaaataattatatgccaaaaatatatttgatgttaaatcaaatagatgattctgtttacattgttcatatgaataataatctgtgttaatttcattttgataattggcctttaatatttgtatctctaattttattttctctctgttactgtaaaataatagctataatgtataacaattttcttcagaagaattctatgctattattaaaataaaatatttactgtgta

SEQ ID NO: 171635 - DNA, 1995 bp, Homo sapiens
  Payload ID: 13745
  Gene Symbol: PTPN20
  Gene Name: protein tyrosine phosphatase, non-receptor type 20
  ENST ID: ENST00000395722
  CDS Start-End: 189-383
aggctaggcgtggacccaactggcgaggctgctggggttgcagcgggacagttggggcggccccgcaggcccaggtttttgaaaataaagttaattcagagaaggtaaaactttctcttcggaatttcccacataatgattatgaggatgtttttgaagagccttcagaaagtggcagtgatcccagcatgtggacagccagaggccccttcagaagagacaggtggagcagtgaggatgaggaggctgcagggccatcacaggctctctcccctctactttctgttcaacatcatggatatagtggcccaaatgagagaacaacgttctggcatggttcaaacgaaggagcagtatcacttttgttacgatattgtgcttgaagttcttcggaaacttctgactttggattaagaaagacttctgttgcctctcacttgaaattaccaagtgggtttgcacctcctcataaagaacatgtttgcactgtgctgaagggctttgctatgcatacaatctgctttcttggtttatcagtttattttctttctaaaagctccctgaagggcaatatcatttggcttggggtgatcagtgtttacttattgatcttgctagacaatatcaaaataacttcccacattttccagtgaaacagatgttacataaaacgattgcagcttggctatttggttgaagggattacagagcccaataaaggatttaaaatatattcattaagattttatttggaaaggtggctggagagagctgaggatttccaggactttgtaagttcttattctgggagaacataaggccaataatcatgacctcttccaggcatttttaagacagatgtctattcatgttctttagctagagcctgtactttttgctggcatttgaataacccagtttaaaaagagtccagttagggtggactaactttggacacaaattggcttccatttcctacattttcatactgctgccttcctacagctgctagaccaagacctgttggtctgggaagcatttcatggatagggagagctcctctcggtgaacagtccaaaactaaaatagatgtttatatagaaagcccaagaggagacttttgccatgcctgagttctttcctatcccaccctaacacttaacatattacttagtctgctttgttaaaagcaagtattacctttaacttgcctcttactctttgccctttagctaactaataaagtttgatataggcattattatataattctgagtcattcatggtatctctcatgtttgatgtatttttcaaactaagatctatgatagttttttttccagagttccattaaatcatttatttcctttactttctcacctctgttgaaacatttagaaactggatttgggaacccaattttggaaaaccagattcatagtcatgaaaatggaaacttccatattctgtttttgaaaagatgtggccattattacagtaattttattataggactttgcctcgtacaattaatagtgatattttggacaaggagttctggtgacaagctatacctaattataagctataaaacaatagatatgagtgtttgtacagtttaactcaatggagatcagaatattctatgtattgagaaaatgtttaatatcaatctataaatcttgaatttctaagaggcttattttgttcttttggctgaatgagtatatttgaattggttgaataattaataattctcattgtaaaaataattatatgccaaaaatatatttgatgttaaatcaaatagatgattctgtttacattgttcatatgaataataatctgtgttaatttcattttgataattggcctttaatatttgtatctctaattttattttctctctgttactgtaaaataatagctataatgtataacaattttcttcagaagaattctatgctattattaaaataaaatatttactgtgta

SEQ ID NO: 171636 - DNA, 2226 bp, Homo sapiens
  Payload ID: 13745
  Gene Symbol: PTPN20
  Gene Name: protein tyrosine phosphatase, non-receptor type 20
  Uniprot ID: Q4JDL3
  ENST ID: ENST00000395725
  CDS Start-End: 179-616
tggacccaactggcgaggctgctggggttgcagcgggacagttggggcggccccgcaggcccaggtttttgaaaataaagttaattcagagaaggtaaaactttctcttcggaatttcccacataatgattatgaggatgtttttgaagagccttcagaaagtggcagtgatcccagcatgtggacagccagaggccccttcagaagagacaggtggagcagtgaggatgaggaggctgcagggccatcacaggctctctcccctctactttctgatacgcgcaaaattgtttctgaaggagaactagatcagttggctcagattcggccattaatattcaattttcatgagcagacagccatcaaggattgtttgaaaatccttgaggaaaaaacagcagcgtatgatatcatgcaggaatttatggctttagaacttaagaatctgcctggtgagttcaactctgggaatcaaccaagcaacagagaaaaaaatagataccgagatattcttccatttcaacatcatggatatagtggcccaaatgagagaacaacgttctggcatggttcaaacgaaggagcagtatcacttttgttacgatattgtgcttgaagttcttcggaaacttctgactttggattaagaaagacttctgttgcctctcacttgaaattaccaagtgggtttgcacctcctcataaagaacatgtttgcactgtgctgaagggctttgctatgcatacaatctgctttcttggtttatcagtttattttctttctaaaagctccctgaagggcaatatcatttggcttggggtgatcagtgtttacttattgatcttgctagacaatatcaaaataacttcccacattttccagtgaaacagatgttacataaaacgattgcagcttggctatttggttgaagggattacagagcccaataaaggatttaaaatatattcattaagattttatttggaaaggtggctggagagagctgaggatttccaggactttgtaagttcttattctgggagaacataaggccaataatcatgacctcttccaggcatttttaagacagatgtctattcatgttctttagctagagcctgtactttttgctggcatttgaataacccagtttaaaaagagtccagttagggtggactaactttggacacaaattggcttccatttcctacattttcatactgctgccttcctacagctgctagaccaagacctgttggtctgggaagcatttcatggatagggagagctcctctcggtgaacagtccaaaactaaaatagatgtttatatagaaagcccaagaggagacttttgccatgcctgagttctttcctatcccaccctaacacttaacatattacttagtctgctttgttaaaagcaagtattacctttaacttgcctcttactctttgccctttagctaactaataaagtttgatataggcattattatataattctgagtcattcatggtatctctcatgtttgatgtatttttcaaactaagatctatgatagttttttttccagagttccattaaatcatttatttcctttactttctcacctctgttgaaacatttagaaactggatttgggaacccaattttggaaaaccagattcatagtcatgaaaatggaaacttccatattctgtttttgaaaagatgtggccattattacagtaattttattataggactttgcctcgtacaattaatagtgatattttggacaaggagttctggtgacaagctatacctaattataagctataaaacaatagatatgagtgtttgtacagtttaactcaatggagatcagaatattctatgtattgagaaaatgtttaatatcaatctataaatcttgaatttctaagaggcttattttgttcttttggctgaatgagtatatttgaattggttgaataattaataattctcattgtaaaaataattatatgccaaaaatatatttgatgttaaatcaaatagatgattctgtttacattgttcatatgaataataatctgtgttaatttcattttgataattggcctttaatatttgtatctctaattttattttctctctgttactgtaaaataatagctataatgtataacaattttcttcagaagaattctatgctattattaaaataaaatatttactgtg

SEQ ID NO: 171637 - DNA, 790 bp, Homo sapiens
  Payload ID: 13745
  Gene Symbol: PTPN20
  Gene Name: protein tyrosine phosphatase, non-receptor type 20
  Uniprot ID: Q4JDL3
  ENST ID: ENST00000395727
  CDS Start-End: 56-742
ctgtggctctgtggtaggggaatgccaccaactccctgaggagcagccgtgtggtatgattgatgattcaacacgcgttcctcttggaaaaagcaaggactacatcaatgctagttatattagaatagtcaattgtggagaagagtatttttatatcgctactcaaggaccactgctgagcaccatagatgacttttggcaaatggtgttggaaaataattcaaatgttattgccatgataaccagagagatagaaggtggaattatcaaatgctaccattactggcccatttctctgaagaagccattggaattgaaacacttccgtgtattcctggagaactaccagatacttcaatatttcatcattcgaatgtttcaagttgtggagaagtccacgggaactagtcactctgtaaaacagttgcagttcaccaagtggccagaccatggcactcctgcctcagcagatagcttcataaaatatattcgttatgcaaggaagagccaccttacaggacccatggttgttcactgcagtgccggcataggccggacaggggtgttcctatgtgtggatgtcgtgttctgtgccatcgtaaagaactgttcattcaacatcatggatatagtggcccaaatgagagaacaacgttctggcatggttcaaacgaaggagcagtatcacttttgttacgatattgtgcttgaagttcttcggaaacttctgactttggattaagaaagacttctgttgcctctcacttgaaattaccaagtgggtttgcac

SEQ ID NO: 171638 - DNA, 567 bp, Homo sapiens
  Payload ID: 13745
  Gene Symbol: PTPN20
  Gene Name: protein tyrosine phosphatase, non-receptor type 20
  ENST ID: ENST00000417004
  CDS Start-End: 189-567
aggctaggcgtggacccaactggcgaggctgctggggttgcagcgggacagttggggcggccccgcaggcccaggtttttgaaaataaagttaattcagagaaggtaaaactttctcttcggaatttcccacataatgattatgaggatgtttttgaagagccttcagaaagtggcagtgatcccagcatgtggacagccagaggccccttcagaagagacaggtggagcagtgaggatgaggaggctgcagggccatcacaggctctctcccctctactttctgatacgcgcaaaattgtttctgaaggagaactagatcagttggctcagattcggccattaatattcaattttcatgagcagacagccatcaaggattgtttgaaaatccttgaggaaaaaacagcagcgtatgatatcatgcaggaatttatggctttagaacttaagaatctgcctggtgagttcaactctgggaatcaaccaagcaacagagaaaaaaatagataccgagatattcttccatttcaacatcatggatatagtggcccaaatgagagaacaa

SEQ ID NO: 171639 - DNA, 3125 bp, Homo sapiens
  Payload ID: 13745
  Gene Symbol: PTPN20
  Gene Name: protein tyrosine phosphatase, non-receptor type 20
  ENST ID: ENST00000437863
  CDS Start-End: 251-439
tgttttctatttgatcagtttttccccccgcctttgttcagtaaacgattatgagggaaatgactctgaagcagaagacttgaatttcagggagactttgccttcatcaagtcaggaaaacacacctagatcaaaggtttttgaaaataaagttaattcagagaaggtaaaactttctcttcggaatttcccacataatgattatgaggatgtttttgaagagccttcagaaagtggcagtgatcccagcatgtggacagccagaggccccttcagaagagacaggtggagcagtgaggatgaggaggctgcagggccatcacaggctctctcccctctactttctggacttgagcatctgaggattttggtatctgtgggaggtcctggaaccaattccttgcaaatacagagggacaacagtagtacaagtatttaatacaacaaatcttcctatacgcgcaaaattgtttctgaaggagaactagatcagttggctcagattcggccattaatattcaattttcatgagcagacagccatcaaggattgtttgaaaatccttgaggaaaaaacagcagcgtatgatatcatgcaggaatttatggctttagaacttaagaatctgcctggtgagttcaactctgggaatcaaccaagcaacagagaaaaaaatagataccgagatattcttccatatgattcaacacgcgttcctcttggaaaaagcaaggactacatcaatgctagttatattagaatagtcaattgtggagaagagtatttttatatcgctactcaaggaccactgctgagcaccatagatgacttttggcaaatggtgttggaaaataattcaaatgttattgccatgataaccagagagatagaaggtggaattatcaaatgctaccattactggcccatttctctgaagaagccattggaattgaaacacttccgtgtattcctggagaactaccagatacttcaatatttcatcattcgaatgtttcaagttgtggagaagtccacgggaactagtcactctgtaaaacagttgcagttcaccaagtggccagaccatggcactcctgcctcagcagatagcttcataaaatatattcgttatgcaaggaagagccaccttacaggacccatggttgttcactgcagtgccggcataggccggacaggggtgttcctatgtgtggatgtcgtgttctgtgccatcgtaaagaactgttcattcaacatcatggatatagtggcccaaatgagagaacaacgttctggcatggttcaaacgaaggagcagtatcacttttgttacgatattgtgcttgaagttcttcggaaacttctgactttggattaagaaagacttctgttgcctctcacttgaaattaccaagtgggtttgcacctcctcataaagaacatgtttgcactgtgctgaagggctttgctatgcatacaatctgctttcttggtttatcagtttattttctttctaaaagctccctgaagggcaatatcatttggcttggggtgatcagtgtttacttattgatcttgctagacaatatcaaaataacttcccacattttccagtgaaacagatgttacataaaacgattgcagcttggctatttggttgaagggattacagagcccaataaaggatttaaaatatattcattaagattttatttggaaaggtggctggagagagctgaggatttccaggactttgtaagttcttattctgggagaacataaggccaataatcatgacctcttccaggcatttttaagacagatgtctattcatgttctttagctagagcctgtactttttgctggcatttgaataacccagtttaaaaagagtccagttagggtggactaactttggacacaaattggcttccatttcctacattttcatactgctgccttcctacagctgctagaccaagacctgttggtctgggaagcatttcatggatagggagagctcctctcggtgaacagtccaaaactaaaatagatgtttatatagaaagcccaagaggagacttttgccatgcctgagttctttcctatcccaccctaacacttaacatattacttagtctgctttgttaaaagcaagtattacctttaacttgcctcttactctttgccctttagctaactaataaagtttgatataggcattattatataattctgagtcattcatggtatctctcatgtttgatgtatttttcaaactaagatctatgatagttttttttccagagttccattaaatcatttatttcctttactttctcacctctgttgaaacatttagaaactggatttgggaacccaattttggaaaaccagattcatagtcatgaaaatggaaacttccatattctgtttttgaaaagatgtggccattattacagtaattttattataggactttgcctcgtacaattaatagtgatattttggacaaggagttctggtgacaagctatacctaattataagctataaaacaatagatatgagtgtttgtacagtttaactcaatggagatcagaatattctatgtattgagaaaatgtttaatatcaatctataaatcttgaatttctaagaggcttattttgttcttttggctgaatgagtatatttgaattggttgaataattaataattctcattgtaaaaataattatatgccaaaaatatatttgatgttaaatcaaatagatgattctgtttacattgttcatatgaataataatctgtgttaatttcattttgataattggcctttaatatttgtatctctaattttattttctctctgttactgtaaaataatagctataatgtataacaattttcttcagaagaattctatgctattattaaaataaaatatttactgtgtattgcctgaagtatttttatttatctgggccttgaaatcgtcttgtaaagaaaaattccacaatgcttgatgttaaacatgtctcttctttaatgtgtgcctcatatttttacagctggactaatttttagttttccagggaaattaaaggagtgaatatggaaata

SEQ ID NO: 171640 - DNA, 854 bp, Homo sapiens
  Payload ID: 13745
  Gene Symbol: PTPN20
  Gene Name: protein tyrosine phosphatase, non-receptor type 20
  Uniprot ID: Q4JDL3
  ENST ID: ENST00000502705
  CDS Start-End: 186-806
ctgtggctctgtggtaggggaatgccaccaactccctgaggagcagccgtgtggtatgattggtgaacaaaaattgtttgctggcccccaggatactaactagacctttggcctgactcacaggacactaaggctccttttctgaagaagccttttaccagtctcatttaggggatgggaacaacatgtcttcacctagggactttagagcagagcctgtaaacgattatgagggaaatgactctgaagcagaagacttgaatttcagggagactttgccttcatcaagtcaggaaaacacacctagatcaaaggtttttgaaaataaagttaattcagagaaggtaaaactttctcttcggaatttcccacataatgattatgaggatgtttttgaagagccttcagaaagtggcagtgatcccagcatgtggacagccagaggccccttcagaagagacaggtggagcagtgaggatgaggaggctgcagggccatcacaggctctctcccctctactttctgatacgcgcaaaattgtttctgaaggagaactagatcagttggctcagattcggccattaatattcaattttcatgagcagacagccatcaaggattgtttgaaaatccttgaggaaaaaacagcagcgtatgatatcatgcaggaatttatgttcaacatcatggatatagtggcccaaatgagagaacaacgttctggcatggttcaaacgaaggagcagtatcacttttgttacgatattgtgcttgaagttcttcggaaacttctgactttggattaagaaagacttctgttgcctctcacttgaaattaccaagtgggtttgcac

SEQ ID NO: 171641 - DNA, 599 bp, Homo sapiens
  Payload ID: 13745
  Gene Symbol: PTPN20
  Gene Name: protein tyrosine phosphatase, non-receptor type 20
  Uniprot ID: Q4JDL3
  ENST ID: ENST00000502254
  CDS Start-End: 84-521
gacctttggcctgactcacaggacactaaggctccttttctgaagaagccttttaccagtctcatttaggggatgggaacaacatgtcttcacctagggactttagagcagagcctgtaaacgattatgagggaaatgactctgaagcagaagacttgaatttcagggagactttgccttcatcaagtcaggaaaacacacctagatcaaaggtttttgaaaataaagttaattcagagaaggtaaaactttctcttcggaatttcccacataatgattatgaggatgtttttgaagagccttcagaaagtggcagtgatcccagcatgtggacagccagaggccccttcagaagagacaggtggagcagtgaggatgaggaggctgcagggccatcacaggctctctcccctctactttctgttcaacatcatggatatagtggcccaaatgagagaacaacgttctggcatggttcaaacgaaggagcagtatcacttttgttacgatattgtgcttgaagttcttcggaaacttctgactttggattaagaaagacttctgttgcctctcacttgaaattaccaagtgggtttgca

SEQ ID NO: 171642 - DNA, 1153 bp, Homo sapiens
  Payload ID: 13745
  Gene Symbol: PTPN20
  Gene Name: protein tyrosine phosphatase, non-receptor type 20
  Uniprot ID: Q4JDL3
  ENST ID: ENST00000510335
  CDS Start-End: 177-491
ctgtggctctgtggtaggggaatgccaccaactccctgaggagcagccgtgtggtatgattggtttttgaaaataaagttaattcagagaaggtaaaactttctcttcggaatttcccacataatgattatgaggatgtttttgaagagccttcagaaagtggcagtgatcccagcatgtggacagccagaggccccttcagaagagacaggtggagcagtgaggatgaggaggctgcagggccatcacaggctctctcccctctactttctgatacgcgcaaaattgtttctgaaggagaactagatcagttggctcagattcggccattaatattcaattttcatgagcagacagccatcaaggattgtttgaaaatccttgaggaaaaaacagcagcgtatgatatcatgcaggaatttatgatgattcaacacgcgttcctcttggaaaaagcaaggactacatcaatgctagttatattagaatagtcaattgtggagaagagtatttttatatcgctactcaaggaccactgctgagcaccatagatgacttttggcaaatggtgttggaaaataattcaaatgttattgccatgataaccagagagatagaaggtggaattatcaaatgctaccattactggcccatttctctgaagaagccattggaattgaaacacttccgtgtattcctggagaactaccagatacttcaatatttcatcattcgaatgtttcaagttgtggagaagtccacgggaactagtcactctgtaaaacagttgcagttcaccaagtggccagaccatggcactcctgcctcagcagatagcttcataaaatatattcgttatgcaaggaagagccaccttacaggacccatggttgttcactgcagtgccggcataggccggacaggggtgttcctatgtgtggatgtcgtgttctgtgccatcgtaaagaactgttcattcaacatcatggatatagtggcccaaatgagagaacaacgttctggcatggttcaaacgaaggagcagtatcacttttgttacgatattgtgcttgaagttcttcggaaacttctgactttggattaagaaagacttctgttgcctctcacttgaaattaccaagtgggtttgcac

SEQ ID NO: 171643 - DNA, 1401 bp, Homo sapiens
  Payload ID: 13745
  Gene Symbol: PTPN20
  Gene Name: protein tyrosine phosphatase, non-receptor type 20
  Uniprot ID: Q4JDL3
  ENST ID: ENST00000506080
  CDS Start-End: 334-1353
ctgtggctctgtggtaggggaatgccaccaactccctgaggagcagccgtgtggtatgattggtgaacaaaaattgtttgctggcccccaggatactaactagacctttggcctgactcacaggacactaaggctccttttctgaagaagccttttaccagtctcatttaggggatgggaacaacatgtcttcacctagggactttagagcagagcctggtttttgaaaataaagttaattcagagaaggtaaaactttctcttcggaatttcccacataatgattatgaggatgtttttgaagagccttcagaaagtggcagtgatcccagcatgtggacagccagaggccccttcagaagagacaggtggagcagtgaggatgaggaggctgcagggccatcacaggctctctcccctctactttctgatacgcgcaaaattgtttctgaaggagaactagatcagttggctcagattcggccattaatattcaattttcatgagcagacagccatcaaggattgtttgaaaatccttgaggaaaaaacagcagcgtatgatatcatgcaggaatttatggctttagaacttaagaatctgcctggtgagttcaactctgggaatcaaccaagcaacagagaaaaaaatagataccgagatattcttccatatgattcaacacgcgttcctcttggaaaaagcaaggactacatcaatgctagttatattagaatagtcaattgtggagaagagtatttttatatcgctactcaaggaccactgctgagcaccatagatgacttttggcaaatggtgttggaaaataattcaaatgttattgccatgataaccagagagatagaaggtggaattatcaaatgctaccattactggcccatttctctgaagaagccattggaattgaaacacttccgtgtattcctggagaactaccagatacttcaatatttcatcattcgaatgtttcaagttgtggagaagtccacgggaactagtcactctgtaaaacagttgcagttcaccaagtggccagaccatggcactcctgcctcagcagatagcttcataaaatatattcgttatgcaaggaagagccaccttacaggacccatggttgttcactgcagtgccggcataggccggacaggggtgttcctatgtgtggatgtcgtgttctgtgccatcgtaaagaactgttcattcaacatcatggatatagtggcccaaatgagagaacaacgttctggcatggttcaaacgaaggagcagtatcacttttgttacgatattgtgcttgaagttcttcggaaacttctgactttggattaagaaagacttctgttgcctctcacttgaaattaccaagtgggtttgcac

SEQ ID NO: 171644 - DNA, 457 bp, Homo sapiens
  Payload ID: 13745
  Gene Symbol: PTPN20
  Gene Name: protein tyrosine phosphatase, non-receptor type 20
  ENST ID: ENST00000506881
  CDS Start-End: 254-457
aggtggcatattggtttttctggaatccgttgcgaaactgttcttatctacttaaagggaactcatttgaagtctgagtcttgagggaataggcagaacaggcatgttggaaggaaagtatgagtctcaggtgaacaaaaattgtttgctggcccccaggatactaactagacctttggcctgactcacaggacactaaggctccttttctgaagaagccttttaccagtctcatttaggggatgggaacaacatgtcttcacctagggactttagagcagagcctgtaaacgattatgagggaaatgactctgaagcagaagacttgaatttcagggagactttgccttcatcaagtcaggaaaacacacctagatcaaaggtttttgaaaataaagttaattcagagaaggtaaaactttctcttcggaatttcccacataatgattatgaggat

SEQ ID NO: 171645 - DNA, 818 bp, Homo sapiens
  Payload ID: 13745
  Gene Symbol: PTPN20
  Gene Name: protein tyrosine phosphatase, non-receptor type 20
  Uniprot ID: Q4JDL3
  ENST ID: ENST00000513266
  CDS Start-End: 177-770
ctgtggctctgtggtaggggaatgccaccaactccctgaggagcagccgtgtggtatgattggtttttgaaaataaagttaattcagagaaggtaaaactttctcttcggaatttcccacataatgattatgaggatgtttttgaagagccttcagaaagtggcagtgatcccagcatgtggacagccagaggccccttcagaagagacaggtggagcagtgaggatgaggaggctgcagggccatcacaggctctctcccctctactttctgatacgcgcaaaattgtttctgaaggagaactagatcagttggctcagattcggccattaatattcaattttcatgagcagacagccatcaaggattgtttgaaaatccttgaggaaaaaacagcagcgtatgatatcatgcaggaatttatgacgggaactagtcactctgtaaaacagttgcagttcaccaagtggccagaccatggcactcctgcctcagcagatagcttcataaaatatattcgttatgcaaggaagagccaccttacaggacccatggttgttcactgcagtgccggcataggccggacaggggtgttcctatgtgtggatgtcgtgttctgtgccatcgtaaagaactgttcattcaacatcatggatatagtggcccaaatgagagaacaacgttctggcatggttcaaacgaaggagcagtatcacttttgttacgatattgtgcttgaagttcttcggaaacttctgactttggattaagaaagacttctgttgcctctcacttgaaattaccaagtgggtttgcac

SEQ ID NO: 171646 - DNA, 693 bp, Homo sapiens
  Payload ID: 13745
  Gene Symbol: PTPN20
  Gene Name: protein tyrosine phosphatase, non-receptor type 20
  Uniprot ID: Q4JDL3
  ENST ID: ENST00000509900
  CDS Start-End: 177-614
ctgtggctctgtggtaggggaatgccaccaactccctgaggagcagccgtgtggtatgattggtttttgaaaataaagttaattcagagaaggtaaaactttctcttcggaatttcccacataatgattatgaggatgtttttgaagagccttcagaaagtggcagtgatcccagcatgtggacagccagaggccccttcagaagagacaggtggagcagtgaggatgaggaggctgcagggccatcacaggctctctcccctctactttctgatacgcgcaaaattgtttctgaaggagaactagatcagttggctcagattcggccattaatattcaattttcatgagcagacagccatcaaggattgtttgaaaatccttgaggaaaaaacagcagcgtatgatatcatgcaggaatttatggctttagaacttaagaatctgcctggtgagttcaactctgggaatcaaccaagcaacagagaaaaaaatagataccgagatattcttccatttcaacatcatggatatagtggcccaaatgagagaacaacgttctggcatggttcaaacgaaggagcagtatcacttttgttacgatattgtgcttgaagttcttcggaaacttctgactttggattaagaaagacttctgttgcctctcacttgaaattaccaagtgggtttgcac

SEQ ID NO: 171647 - DNA, 1339 bp, Homo sapiens
  Payload ID: 13745
  Gene Symbol: PTPN20
  Gene Name: protein tyrosine phosphatase, non-receptor type 20
  Uniprot ID: Q4JDL3
  ENST ID: ENST00000511769
  CDS Start-End: 56-1291
ctgtggctctgtggtaggggaatgccaccaactccctgaggagcagccgtgtggtatgattgtaaacgattatgagggaaatgactctgaagcagaagacttgaatttcagggagactttgccttcatcaagtcaggaaaacacacctagatcaaaggtttttgaaaataaagttaattcagagaaggtaaaactttctcttcggaatttcccacataatgattatgaggatgtttttgaagagccttcagaaagtggcagtgatcccagcatgtggacagccagaggccccttcagaagagacaggtggagcagtgaggatgaggaggctgcagggccatcacaggctctctcccctctactttctgatacgcgcaaaattgtttctgaaggagaactagatcagttggctcagattcggccattaatattcaattttcatgagcagacagccatcaaggattgtttgaaaatccttgaggaaaaaacagcagcgtatgatatcatgcaggaatttatggctttagaacttaagaatctgcctggtgagttcaactctgggaatcaaccaagcaacagagaaaaaaatagataccgagatattcttccatatgattcaacacgcgttcctcttggaaaaagcaaggactacatcaatgctagttatattagaatagtcaattgtggagaagagtatttttatatcgctactcaaggaccactgctgagcaccatagatgacttttggcaaatggtgttggaaaataattcaaatgttattgccatgataaccagagagatagaaggtggaattatcaaatgctaccattactggcccatttctctgaagaagccattggaattgaaacacttccgtgtattcctggagaactaccagatacttcaatatttcatcattcgaatgtttcaagttgtggagaagtccacgggaactagtcactctgtaaaacagttgcagttcaccaagtggccagaccatggcactcctgcctcagcagatagcttcataaaatatattcgttatgcaaggaagagccaccttacaggacccatggttgttcactgcagtgccggcataggccggacaggggtgttcctatgtgtggatgtcgtgttctgtgccatcgtaaagaactgttcattcaacatcatggatatagtggcccaaatgagagaacaacgttctggcatggttcaaacgaaggagcagtatcacttttgttacgatattgtgcttgaagttcttcggaaacttctgactttggattaagaaagacttctgttgcctctcacttgaaattaccaagtgggtttgcac

SEQ ID NO: 171648 - DNA, 742 bp, Homo sapiens
  Payload ID: 13745
  Gene Symbol: PTPN20
  Gene Name: protein tyrosine phosphatase, non-receptor type 20
  Uniprot ID: Q4JDL3
  ENST ID: ENST00000508602
  CDS Start-End: 226-663
tggcctgactcacaggacactaaggctccttttctgaagaagccttttaccagtctcatttaggggatgggaacaacatgtcttcacctagggactttagagcagagcctggtttttgaaaataaagttaattcagagaaggtaaaactttctcttcggaatttcccacataatgattatgaggatgtttttgaagagccttcagaaagtggcagtgatcccagcatgtggacagccagaggccccttcagaagagacaggtggagcagtgaggatgaggaggctgcagggccatcacaggctctctcccctctactttctgatacgcgcaaaattgtttctgaaggagaactagatcagttggctcagattcggccattaatattcaattttcatgagcagacagccatcaaggattgtttgaaaatccttgaggaaaaaacagcagcgtatgatatcatgcaggaatttatggctttagaacttaagaatctgcctggtgagttcaactctgggaatcaaccaagcaacagagaaaaaaatagataccgagatattcttccatttcaacatcatggatatagtggcccaaatgagagaacaacgttctggcatggttcaaacgaaggagcagtatcacttttgttacgatattgtgcttgaagttcttcggaaacttctgactttggattaagaaagacttctgttgcctctcacttgaaattaccaagtgggtttgcac

SEQ ID NO: 171649 - DNA, 945 bp, Homo sapiens
  Payload ID: 13745
  Gene Symbol: PTPN20
  Gene Name: protein tyrosine phosphatase, non-receptor type 20
  Uniprot ID: Q4JDL3
  ENST ID: ENST00000509599
  CDS Start-End: 186-866
ctgtggctctgtggtaggggaatgccaccaactccctgaggagcagccgtgtggtatgattggtgaacaaaaattgtttgctggcccccaggatactaactagacctttggcctgactcacaggacactaaggctccttttctgaagaagccttttaccagtctcatttaggggatgggaacaacatgtcttcacctagggactttagagcagagcctgtaaacgattatgagggaaatgactctgaagcagaagacttgaatttcagggagactttgccttcatcaagtcaggaaaacacacctagatcaaaggtttttgaaaataaagttaattcagagaaggtaaaactttctcttcggaatttcccacataatgattatgaggatgtttttgaagagccttcagaaagtggcagtgatcccagcatgtggacagccagaggccccttcagaagagacaggtggagcagtgaggatgaggaggctgcagggccatcacaggctctctcccctctactttctgatacgcgcaaaattgtttctgaaggagaactagatcagttggctcagattcggccattaatattcaattttcatgagcagacagccatcaaggattgtttgaaaatccttgaggaaaaaacagcagcgtatgatatcatgcaggaatttatggctttagaacttaagaatctgcctggtgagttcaactctgggaatcaaccaagcaacagagaaaaaaatagataccgagatattcttccatttcaacatcatggatatagtggcccaaatgagagaacaacgttctggcatggttcaaacgaaggagcagtatcacttttgttacgatattgtgcttgaagttcttcggaaacttctgactttggattaagaaagacttctgttgcctctcacttgaaattaccaagtgggtttgcac

SEQ ID NO: 171650 - DNA, 788 bp, Homo sapiens
  Payload ID: 13745
  Gene Symbol: PTPN20
  Gene Name: protein tyrosine phosphatase, non-receptor type 20
  Uniprot ID: Q4JDL3
  ENST ID: ENST00000509774
  CDS Start-End: 56-709
ctgtggctctgtggtaggggaatgccaccaactccctgaggagcagccgtgtggtatgattgtaaacgattatgagggaaatgactctgaagcagaagacttgaatttcagggagactttgccttcatcaagtcaggaaaacacacctagatcaaaggtttttgaaaataaagttaattcagagaaggtaaaactttctcttcggaatttcccacataatgattatgaggatgtttttgaagagccttcagaaagtggcagtgatcccagcatgtggacagccagaggccccttcagaagagacaggtggagcagtgaggatgaggaggctgcagggccatcacaggctctctcccctctactttctgatacgcgcaaaattgtttctgaaggagaactagatcagttggctcagattcggccattaatattcaattttcatgagcagacagccatcaaggattgtttgaaaatccttgaggaaaaaacagcagcgtatgatatcatgcaggaatttatggctttagaacttaagaatctgcctggtgagttcaactctgggaatcaaccaagcaacagagaaaaaaatagataccgagatattcttccatttcaacatcatggatatagtggcccaaatgagagaacaacgttctggcatggttcaaacgaaggagcagtatcacttttgttacgatattgtgcttgaagttcttcggaaacttctgactttggattaagaaagacttctgttgcctctcacttgaaattaccaagtgggtttgcac

SEQ ID NO: 171651 - DNA, 913 bp, Homo sapiens
  Payload ID: 13745
  Gene Symbol: PTPN20
  Gene Name: protein tyrosine phosphatase, non-receptor type 20
  Uniprot ID: Q4JDL3
  ENST ID: ENST00000513156
  CDS Start-End: 56-865
ctgtggctctgtggtaggggaatgccaccaactccctgaggagcagccgtgtggtatgattgtaaacgattatgagggaaatgactctgaagcagaagacttgaatttcagggagactttgccttcatcaagtcaggaaaacacacctagatcaaaggtttttgaaaataaagttaattcagagaaggtaaaactttctcttcggaatttcccacataatgattatgaggatgtttttgaagagccttcagaaagtggcagtgatcccagcatgtggacagccagaggccccttcagaagagacaggtggagcagtgaggatgaggaggctgcagggccatcacaggctctctcccctctactttctgatacgcgcaaaattgtttctgaaggagaactagatcagttggctcagattcggccattaatattcaattttcatgagcagacagccatcaaggattgtttgaaaatccttgaggaaaaaacagcagcgtatgatatcatgcaggaatttatgacgggaactagtcactctgtaaaacagttgcagttcaccaagtggccagaccatggcactcctgcctcagcagatagcttcataaaatatattcgttatgcaaggaagagccaccttacaggacccatggttgttcactgcagtgccggcataggccggacaggggtgttcctatgtgtggatgtcgtgttctgtgccatcgtaaagaactgttcattcaacatcatggatatagtggcccaaatgagagaacaacgttctggcatggttcaaacgaaggagcagtatcacttttgttacgatattgtgcttgaagttcttcggaaacttctgactttggattaagaaagacttctgttgcctctcacttgaaattaccaagtgggtttgcac

SEQ ID NO: 171652 - DNA, 1244 bp, Homo sapiens
  Payload ID: 13745
  Gene Symbol: PTPN20
  Gene Name: protein tyrosine phosphatase, non-receptor type 20
  Uniprot ID: Q4JDL3
  ENST ID: ENST00000505814
  CDS Start-End: 177-1196
ctgtggctctgtggtaggggaatgccaccaactccctgaggagcagccgtgtggtatgattggtttttgaaaataaagttaattcagagaaggtaaaactttctcttcggaatttcccacataatgattatgaggatgtttttgaagagccttcagaaagtggcagtgatcccagcatgtggacagccagaggccccttcagaagagacaggtggagcagtgaggatgaggaggctgcagggccatcacaggctctctcccctctactttctgatacgcgcaaaattgtttctgaaggagaactagatcagttggctcagattcggccattaatattcaattttcatgagcagacagccatcaaggattgtttgaaaatccttgaggaaaaaacagcagcgtatgatatcatgcaggaatttatggctttagaacttaagaatctgcctggtgagttcaactctgggaatcaaccaagcaacagagaaaaaaatagataccgagatattcttccatatgattcaacacgcgttcctcttggaaaaagcaaggactacatcaatgctagttatattagaatagtcaattgtggagaagagtatttttatatcgctactcaaggaccactgctgagcaccatagatgacttttggcaaatggtgttggaaaataattcaaatgttattgccatgataaccagagagatagaaggtggaattatcaaatgctaccattactggcccatttctctgaagaagccattggaattgaaacacttccgtgtattcctggagaactaccagatacttcaatatttcatcattcgaatgtttcaagttgtggagaagtccacgggaactagtcactctgtaaaacagttgcagttcaccaagtggccagaccatggcactcctgcctcagcagatagcttcataaaatatattcgttatgcaaggaagagccaccttacaggacccatggttgttcactgcagtgccggcataggccggacaggggtgttcctatgtgtggatgtcgtgttctgtgccatcgtaaagaactgttcattcaacatcatggatatagtggcccaaatgagagaacaacgttctggcatggttcaaacgaaggagcagtatcacttttgttacgatattgtgcttgaagttcttcggaaacttctgactttggattaagaaagacttctgttgcctctcacttgaaattaccaagtgggtttgcac

SEQ ID NO: 171653 - DNA, 1213 bp, Homo sapiens
  Payload ID: 13745
  Gene Symbol: PTPN20
  Gene Name: protein tyrosine phosphatase, non-receptor type 20
  ENST ID: ENST00000508357
  CDS Start-End: 420-608
gttggtggcagttcttgtactcctgtacttgcttgtatctgcagcagctcctgctccttccttggactccactccagaaaatgtgtgcccagtcgaaaccactaccaatttcatctgggagctttcttcaccccacaacacttccgcagttctgctggttgtcttccacaagggccccagtgagatatagtcagggatggcgtccctgtgctcgagctggagactgggagtgcatacaaggcacttcctgctgctacttctactttcatattttgtgtgactctctaaatcccttccatctctaggtttttgaaaataaagttaattcagagaaggtaaaactttctcttcggaatttcccacataatgattatgaggatgtttttgaagagccttcagaaagtggcagtgatcccagcatgtggacagccagaggccccttcagaagagacaggtggagcagtgaggatgaggaggctgcagggccatcacaggctctctcccctctactttctgtattccattcaccagttgaaggacactgtgttgcttccagattttggcaattatggataaaagtactacagatattcacaaactttgtgtaaacataagtttccattactttaagatacgcgcaaaattgtttctgaaggagaactagatcagttggctcagattcggccattaatattcaattttcatgagcagacagccatcaaggattgtttgaaaatccttgaggaaaaaacagcagcgtatgatatcatgcaggaatttatggctttagaacttaagaatctgcctggtgagttcaactctgggaatcaaccaagcaacagagaaaaaaatagataccgagatattcttccatgtctcatgaacaaagtggccataatggcagggatggaggttatgtatgagctcagcaacatggacttccactcaccaaggctgacctggctacagctgctactgagtgtccaatctgccagcaacagagaccaacactgagtacctgatgggcactattccatgggatgatcagccagctagctgatggcaggttgattacactgggaccacttccataatgcatggagcagtgcttttttcttactagaatagacagtaactctgggtatggatttgccttccctgcacacagtgctcccaccaatttaccatctgtggacctacagaatgccttatc

SEQ ID NO: 171654 - DNA, 545 bp, Homo sapiens
  Payload ID: 13745
  Gene Symbol: PTPN20
  Gene Name: protein tyrosine phosphatase, non-receptor type 20
  Uniprot ID: Q4JDL3
  ENST ID: ENST00000503851
  CDS Start-End: 56-466
ctgtggctctgtggtaggggaatgccaccaactccctgaggagcagccgtgtggtatgattgtaaacgattatgagggaaatgactctgaagcagaagacttgaatttcagggagactttgccttcatcaagtcaggaaaacacacctagatcaaaggtttttgaaaataaagttaattcagagaaggtaaaactttctcttcggaatttcccacataatgattatgaggatgtttttgaagagccttcagaaagtggcagtgatcccagcatgtggacagccagaggccccttcagaagagacaggtggagcagtgaggatgaggaggctgcagggccatcacaggctctctcccctctactttctgttcaacatcatggatatagtggcccaaatgagagaacaacgttctggcatggttcaaacgaaggagcagtatcacttttgttacgatattgtgcttgaagttcttcggaaacttctgactttggattaagaaagacttctgttgcctctcacttgaaattaccaagtgggtttgcac

SEQ ID NO: 171655 - DNA, 450 bp, Homo sapiens
  Payload ID: 13745
  Gene Symbol: PTPN20
  Gene Name: protein tyrosine phosphatase, non-receptor type 20
  ENST ID: ENST00000513159
  CDS Start-End: 177-371
ctgtggctctgtggtaggggaatgccaccaactccctgaggagcagccgtgtggtatgattggtttttgaaaataaagttaattcagagaaggtaaaactttctcttcggaatttcccacataatgattatgaggatgtttttgaagagccttcagaaagtggcagtgatcccagcatgtggacagccagaggccccttcagaagagacaggtggagcagtgaggatgaggaggctgcagggccatcacaggctctctcccctctactttctgttcaacatcatggatatagtggcccaaatgagagaacaacgttctggcatggttcaaacgaaggagcagtatcacttttgttacgatattgtgcttgaagttcttcggaaacttctgactttggattaagaaagacttctgttgcctctcacttgaaattaccaagtgggtttgcac

SEQ ID NO: 171656 - DNA, 640 bp, Homo sapiens
  Payload ID: 13745
  Gene Symbol: PTPN20
  Gene Name: protein tyrosine phosphatase, non-receptor type 20
  ENST ID: ENST00000513756
  CDS Start-End: 368-562
gacctttggcctgactcacaggacactaaggctccttttctgaagaagccttttaccagtctcatttaggggatgggaacaacatgtcttcacctagggactttagagcagagcctgtgttttctatttgatcagtttttccccccgcctttgttcagtaaacgattatgagggaaatgactctgaagcagaagacttgaatttcagggagactttgccttcatcaagtcaggaaaacacacctagatcaaaggtttttgaaaataaagttaattcagagaaggtaaaactttctcttcggaatttcccacataatgattatgaggatgtttttgaagagccttcagaaagtggcagtgatcccagcatgtggacagccagaggccccttcagaagagacaggtggagcagtgaggatgaggaggctgcagggccatcacaggctctctcccctctactttctgttcaacatcatggatatagtggcccaaatgagagaacaacgttctggcatggttcaaacgaaggagcagtatcacttttgttacgatattgtgcttgaagttcttcggaaacttctgactttggattaagaaagacttctgttgcctctcacttgaaattaccaagtgggtttgca

SEQ ID NO: 171657 - DNA, 586 bp, Homo sapiens
  Payload ID: 13745
  Gene Symbol: PTPN20
  Gene Name: protein tyrosine phosphatase, non-receptor type 20
  ENST ID: ENST00000508715
  CDS Start-End: 313-507
ctgtggctctgtggtaggggaatgccaccaactccctgaggagcagccgtgtggtatgattgtgttttctatttgatcagtttttccccccgcctttgttcagtaaacgattatgagggaaatgactctgaagcagaagacttgaatttcagggagactttgccttcatcaagtcaggaaaacacacctagatcaaaggtttttgaaaataaagttaattcagagaaggtaaaactttctcttcggaatttcccacataatgattatgaggatgtttttgaagagccttcagaaagtggcagtgatcccagcatgtggacagccagaggccccttcagaagagacaggtggagcagtgaggatgaggaggctgcagggccatcacaggctctctcccctctactttctgttcaacatcatggatatagtggcccaaatgagagaacaacgttctggcatggttcaaacgaaggagcagtatcacttttgttacgatattgtgcttgaagttcttcggaaacttctgactttggattaagaaagacttctgttgcctctcacttgaaattaccaagtgggtttgcac

SEQ ID NO: 171658 - DNA, 6089 bp, Homo sapiens
  Payload ID: 13746
  Gene Symbol: PTPN21
  Gene Name: protein tyrosine phosphatase, non-receptor type 21
  Uniprot ID: Q16825
  ENST ID: ENST00000328736
  CDS Start-End: 206-3730
cagcgctggcgtcaatgctcccttcctcgggccattggagactccgttgctttttaatggcggcagcggctgctgggtgagcagctggaggccggacagtgttcgtcccatccggagaggatcgctttctcctggcgtcaccagcgctgggttggtgggggtagcttttccctctttgctcctccattcttgaagaaagaagaagatgccactgccatttgggttgaaactgaaacgcacccggcgctacacggtgtccagcaagagttgcctggttgcccggatccaactgcttaataacgagtttgtggagttcaccctgtccgtggagagcactggccaggaaagcctcgaggccgtggcccagaggctggagctgcgggaggtcacttacttcagcctctggtactacaacaagcaaaatcagcgccggtgggtagatttggaaaaacctttgaagaagcagctggataaatatgcattggaacctaccgtctattttggagtggtgttttatgtgccttcagtttctcagctgcagcaggagattaccaggtatcagtattatctgcaactgaagaaagatatcttggaaggaagtattccttgtaccttagaacaagcaattcagctagcaggcttagctgttcaagcggattttggtgactttgatcagtatgaatcccaggactttcttcagaaatttgccttgtttcctgtgggatggttacaagatgaaaaagtattggaagaagcaacccaaaaagtggccttactacatcagaaatacagagggctcacagctcctgatgctgaaatgctgtacatgcaggaggtagagagaatggatggctatggagaagagagctaccctgctaaggatagccaaggaagtgacatatccattggagcgtgtcttgaaggtatctttgtgaaacacaagaatggaaggcatcctgtggtatttaggtggcatgacattgccaacatgtcccacaacaagtccttttttgcattagagctggcaaataaagaggagaccattcaatttcaaactgaagacatggaaacagcaaaatacatttggagactctgtgttgcgcgacacaagttttacagactaaaccagtgtaacctgcaaactcagactgtcacagtgaacccaatcaggaggaggtcttcttcaaggatgtctctgcctaaaccccagccctacgtgatgcctcccccaccgcagttgcactataatggacattatacagaaccatatgcttcttcccaagataacctctttgtgcccaaccagaacggatactactgtcactctcagacaagcttggatagagcccagattgacctcaacggtcggatccgtaatggcagtgtctacagtgcacacagcaccaactccttaaataatcctcagccctacttgcagccctcgccgatgtcgtccaaccctagcatcaccgggagtgacgtcatgaggcctgactacctcccgtcccatcggcacagcgccgtgatacccccgtcctaccgccccaccccagactatgagactgtgatgaagcagctcaacaggggcctggtgcatgcggaacggcagagccactcgctgcgaaacctcaacatcggcagctcgtacgcctacagcaggcccgcggcgctggtctacagccagcccgagatccgcgagcacgcacagctcccctcgccagcggccgcacactgcccgttcagcctgagctacagcttccacagcccgtctccctacccctaccctgccgagcggcggcccgtggtgggcgcggtcagcgtgccggagctgaccaatgcgcagctgcaggcgcaggactacccgtctcccaacatcatgcggacgcaggtgtaccggccacccccaccctacccgccccccaggcccgccaacagcacgccagacctgtcccgccacctttacatcagcagcagcaaccccgacctcatcacgcggcgcgtgcaccactcggtgcaaacgttccaggaggacagcctgcccgtggcgcactcgctgcaggaggtcagcgagcccctcaccgccgcgcgccacgcgcagctgcacaaacggaacagcatcgaggtggccgggctcagccacggcctggagggcctgcggctcaaggagcgcaccctatccgcgtcggcggcagaggtggcgccgcgagccgtctcggtgggctcccagcccagcgttttcaccgagaggacacagcgagaagggccggaggaggcggagggcttgaggtacggccataagaagtccctgtcggacgccaccatgctaatccacagcagcgaggaggaggaggacgaggacttcgaggaggagagcggggcccgggcgcctcctgcacgtgcgcgcgagcctcggcccggcctggcccaggacccacctggctgccctcgcgtcctgctcgccgggcccctgcacatcctggagcccaaggcccacgtcccagacgcggagaagaggatgatggacagcagccccgtccgcacgaccgcagaggcccagcggccctggagagacgggctgctgatgccctccatgtcggagtccgacctcaccacgtcaggccgctaccgagcccggagggactctctgaagaaaaggccggtgtcggaccttctctctgggaagaagaacatcgtggaagggctcccgcctctagggggaatgaaaaagactcgagtagatgcaaaaaaaattggtcctcttaaactggctgccctaaatggactctccctatctcgagtgcctctgcctgatgaaggaaaggaagtggctaccagagcaacgaatgatgaaaggtgtaaaattctggaacaacgattagaacaaggaatggtattcacagaatatgaaagaattcttaagaaacggctagttgatggggagtgctcaacagcacgactccctgaaaatgcagaaagaaatcgattccaagatgttcttccttatgatgatgtgagagtggagttggtcccaactaaagaaaacaacactggttacatcaacgcatcacatattaaggtctctgtcagtggaatcgaatgggattatattgccacacagggaccattacagaatacctgtcaagatttttggcagatggtatgggaacagggaattgcaattatagcaatggtgacagcagaagaggagggtggaagggagaagagctttaggtactggccacgacttggttccaggcacaacactgtcacctatggaaggtttaagatcacgacccggttccgcacagactctggctgctatgccaccacaggcctgaagatgaagcacctccttactgggcaagagaggaccgtctggcacctccaatacacagactggcctgaacatggctgtccagaagacctcaagggatttttatcatatcttgaagagatccagtctgttcgacgccatacaaatagcacaagtgatccccaaagccccaaccctccgttgttggtccactgcagtgctggggtaggaaggactggcgtggtgattttgtcggagatcatgatcgcctgcctggaacacaatgaggtgctggacatcccgagagtgctggacatgctgaggcaacagagaatgatgctggtgcagactctctgccagtacacatttgtgtacagagtcctcatccagttcctgaaaagctccaggctcatctaagctcccacaatttcttacggggccagtcatgtgaagcgtttacagcttaaaaaaaaagcgcttgcctaactcatactttcccgttgacacttgatccacgcagcgtggcactgggacgtaagtggcgcagtctgaatggcggcacgctgaaggaaacgtgcgaagcacaggctgaagaggggtttctaacctgggaaaggtgctcaaggaggacttggtttcaagggccttgccctgccccggtctgtccggtttgcagtacttgcacacattttggagattgtattttctagacaattctctattttactgaagctatgctgggcaattctggcaatcattaaagtgcatagatttctatcttaaactaatttttgataatggagtttttattttatgacaaatatttagggatttttctagtgagaaacaactttgtgtaaggatgatccacagatatgagttgctcctatataactttgtatttaaaaatcatgttattatcttttgttattttttaaaaaccttgggtacttaataatggtttagttgccaaactgaaaactatactgagaatctgtgttattttgaaacatcaaaaggatttttctatccagaacattttttatcctaaaaattctatatagttgtaccttctgtttttcaaatgagagctcaattcatttagatactgaaatgagtcagttaatgtaaagttgaggatgaaggcacattatttaaaatgtaagagaataagcattattttttcagtattattcatagatctaaatgaatttgattttattggttgaaaatgaagtgaaaaacaattgcctagggtggttttaagcacttttttgttaaaaacaaatctgagttttaatatatgtgttgctttgtagatgacacaataacaatgggcgctgagaagcgttttgggagagattaaggactaagagtatgtaagatgactaggacaagagtaggtggagtgtgatggtaaatgcaggatgccttcgtctttacaaaaatgcagtattatctatactcagactgaggtgctgggatggcgagcaggggaccccacagcactgtccccagggaattcaagtcctgtgaccgccagtgacttactccgtttccttggggcttttcccacctcaacctgtattgtttctttttcataaataaattcagcattatagtatcattaaaagaagccttaaagaggcgtatttttccttttggttgaaggaagggaatagttaataatagttttcacctcttctcccaaaaagtacagtccaaatttgtgcacagagattgctgtggtattcaagaggtacttgcattttagctccttaataattccctggccagtgttagctgtttagtgccccctcacccatcccatttaggcacatcccaatagacagagccaggctgagttacagggggagagtgtcatctctggccccgattaagatggccttgtcacagtgaccgctgagtaggcatggatgagtgggatatttagctgaggaaccctttcccttttccttctttttggggtctcttcttacagtgaacttccaaaatgtcaaatctagggctgtttcccaaattacactattctaggcatcattttgattcccatgtcactccttaactcacttccttgagcactacatgtatgttgtcagccacgagacaggacttcctaaatagtgtgtgcaccagcctaactctgccttacccagaaaccaaccacctaagaggaaaactcagaagatattaatgaaaactaattgaaagtacgcacacttctcatgtaggaacaaaattaaaattttacatttttattttacaaaattaaaaaattacattttgtaggaacaaaatgtaaattttgtaaatacaaaattctttttaaagtcctgtttaaagaacagtagaactaagtgaaaatattcagaacgagctccttagaagaaaggaataagaactttttactggaactattttccatctctagaaaaagtgcttcttcccctccccctccctctccatggtacgtttttgtgaaaatgcttttctgtcaggtttaaacaaacagtttgacatagctcgttgacaagaacatattgtaaaacaaatctaattaaagagtaatatgtggtctatttgtgttcctgttgtaataatttgataagtaaacttctgagggcaaaattactgtttaatattactcttaaaatgttgcatgtttggcgtcattcctaagagccatgtaattttaaacttttaattgcagttagtgaatatgaaaggatttctgaataaaaatctatccacatta

SEQ ID NO: 171659 - DNA, 3943 bp, Homo sapiens
  Payload ID: 13746
  Gene Symbol: PTPN21
  Gene Name: protein tyrosine phosphatase, non-receptor type 21
  ENST ID: ENST00000536337
  CDS Start-End: 114-299
cggacagtgttcgtcccatccggagaggatcgctttctcctggcgtcaccagcgctgggttggtgggggtagcttttccctctttgctcctccattcttgaagaaagaagaagatgccactgccatttgggttgaaactgaaacgcacccggcgctacacggtgtccagcaagagttgcctggttgcccggatccaactgcttaataacgagtttgtggagttcaccctgtccgtggagagcactggccaggaaagcctcgaggccgtggcccagaggctggagctgcgggagggatgaggtctcactccatcacccaggctggagtacagtggcaccgtcatagctcaatgcatcctcaaacacctaggctcaagtgatccttttgccttagcctgccaagagctgggactacaggtcacttacttcagcctctggtactacaacaagcaaaatcagcgccggtgggtagatttggaaaaacctttgaagaagcagctggataaatatgcattggaacctaccgtctattttggagtggtgttttatgtgccttcagtttctcagctgcagcaggagattaccaggtatcagtattatctgcaactgaagaaagatatcttggaaggaagtattccttgtaccttagaacaagcaattcagctagcaggcttagctgttcaagcggattttggtgactttgatcagtatgaatcccaggactttcttcagaaatttgccttgtttcctgtgggatggttacaagatgaaaaagtattggaagaagcaacccaaaaagtggccttactacatcagaaatacagagggctcacagctcctgatgctgaaatgctgtacatgcaggaggtagagagaatggatggctatggagaagagagctaccctgctaaggatagccaaggaagtgacatatccattggagcgtgtcttgaaggtatctttgtgaaacacaagaatggaaggcatcctgtggtatttaggtggcatgacattgccaacatgtcccacaacaagtccttttttgcattagagctggcaaataaagaggagaccattcaatttcaaactgaagacatggaaacagcaaaatacatttggagactctgtgttgcgcgacacaagttttacagactaaaccagtgtaacctgcaaactcagactgtcacagtgaacccaatcaggaggaggtcttcttcaaggatgtctctgcctaaaccccagccctacgtgatgcctcccccaccgcagttgcactataatggacattatacagaaccatatgcttcttcccaagataacctctttgtgcccaaccagaacggatactactgtcactctcagacaagcttggatagagcccagattgacctcaacggtcggatccgtaatggcagtgtctacagtgcacacagcaccaactccttaaataatcctcagccctacttgcagccctcgccgatgtcgtccaaccctagcatcaccgggagtgacgtcatgaggcctgactacctcccgtcccatcggcacagcgccgtgatacccccgtcctaccgccccaccccagactatgagactgtgatgaagcagctcaacaggggcctggtgcatgcggaacggcagagccactcgctgcgaaacctcaacatcggcagctcgtacgcctacagcaggcccgcggcgctggtctacagccagcccgagatccgcgagcacgcacagctcccctcgccagcggccgcacactgcccgttcagcctgagctacagcttccacagcccgtctccctacccctaccctgccgagcggcggcccgtggtgggcgcggtcagcgtgccggagctgaccaatgcgcagctgcaggcgcaggactacccgtctcccaacatcatgcggacgcaggtgtaccggccacccccaccctacccgccccccaggcccgccaacagcacgccagacctgtcccgccacctttacatcagcagcagcaaccccgacctcatcacgcggcgcgtgcaccactcggtgcaaacgttccaggaggacagcctgcccgtggcgcactcgctgcaggaggtcagcgagcccctcaccgccgcgcgccacgcgcagctgcacaaacggaacagcatcgaggtggccgggctcagccacggcctggagggcctgcggctcaaggagcgcaccctatccgcgtcggcggcagaggtggcgccgcgagccgtctcggtgggctcccagcccagcgttttcaccgagaggacacagcgagaagggccggaggaggcggagggcttgaggtacggccataagaagtccctgtcggacgccaccatgctaatccacagcagcgaggaggaggaggacgaggacttcgaggaggagagcggggcccgggcgcctcctgcacgtgcgcgcgagcctcggcccggcctggcccaggacccacctggctgccctcgcgtcctgctcgccgggcccctgcacatcctggagcccaaggcccacgtcccagacgcggagaagaggatgatggacagcagccccgtccgcacgaccgcagaggcccagcggccctggagagacgggctgctgatgccctccatgtcggagtccgacctcaccacgtcaggccgctaccgagcccggagggactctctgaagaaaaggccggtgtcggaccttctctctgggaagaagaacatcgtggaagggctcccgcctctagggggaatgaaaaagactcgagtagatgcaaaaaaaattggtcctcttaaactggctgccctaaatggactctccctatctcgagtgcctctgcctgatgaaggaaaggaagtggctaccagagcaacgaatgatgaaaggtgtaaaattctggaacaacgattagaacaaggaatggtattcacagaatatgaaagaattcttaagaaacggctagttgatggggagtgctcaacagcacgactccctgaaaatgcagaaagaaatcgattccaagatgttcttccttatgatgatgtgagagtggagttggtcccaactaaagaaaacaacactggttacatcaacgcatcacatattaaggtctctgtcagtggaatcgaatgggattatattgccacacagggaccattacagaatacctgtcaagatttttggcagatggtatgggaacagggaattgcaattatagcaatggtgacagcagaagaggagggtggaagggagaagagctttaggtactggccacgacttggttccaggcacaacactgtcacctatggaaggtttaagatcacgacccggttccgcacagactctggctgctatgccaccacaggcctgaagatgaagcacctccttactgggcaagagaggaccgtctggcacctccaatacacagactggcctgaacatggctgtccagaagacctcaagggatttttatcatatcttgaagagatccagtctgttcgacgccatacaaatagcacaagtgatccccaaagccccaaccctccgttgttggtccactgcagtgctggggtaggaaggactggcgtggtgattttgtcggagatcatgatcgcctgcctggaacacaatgaggtgctggacatcccgagagtgctggacatgctgaggcaacagagaatgatgctggtgcagactctctgccagtacacatttgtgtacagagtcctcatccagttcctgaaaagctccaggctcatctaagctcccacaatttcttacggggccagtcatgtgaagcgtttacagcttaaaaaaaaagcgcttgcctaactcatactttcccgttgacacttgatccacgcagcgtggcactgggacgtaagtggcgcagtctgaatggcggcacgctgaaggaaacgtgcgaagcacaggctgaagagggg

SEQ ID NO: 171660 - DNA, 704 bp, Homo sapiens
  Payload ID: 13746
  Gene Symbol: PTPN21
  Gene Name: protein tyrosine phosphatase, non-receptor type 21
  ENST ID: ENST00000553531
  CDS Start-End: 1-387
gccaccacaggcctgaagatgaagcacctccttactgggcaagagaggaccgtctggcacctccaatacacagactggcctgaacatggctgtccagaagacctcaagggatttttatcatatcttgaagagatccagtctgttcgacgccatacaaatagcacaagtgatccccaaagccccaaccctccgttgttggtccactgcagtgctggacatcccgagagtgctggacatgctgaggcaacagagaatgatgctggtgcagactctctgccagtacacatttgtgtacagagtcctcatccagttcctgaaaagctccaggctcatctaagctcccacaatttcttacggggccagtcatgtgaagcgtttacagcttaaaaaaaaagcgcttgcctaactcatactttcccgttgacacttgatccacgcagcgtggcactgggacgtaagtggcgcagtctgaatggcggcacgctgaaggaaacgtgcgaagcacaggctgaagaggggtttctaacctgggaaaggtgctcaaggaggacttggtttcaagggccttgccctgccccggtctgtccggtttgcagtacttgcacacattttggagattgtattttctagacaattctctattttactgaagctatgctgggcaattctggcaatcattaaagtgcatagatttctatcttaaa

SEQ ID NO: 171661 - DNA, 1014 bp, Homo sapiens
  Payload ID: 13746
  Gene Symbol: PTPN21
  Gene Name: protein tyrosine phosphatase, non-receptor type 21
  ENST ID: ENST00000555243
  CDS Start-End: 428-1014
ttcccaaggggaggacgcgggagaagccggggcctgagtgctccaaggccccgtgggcttcttgggtttgttgcctccggccgctcattaactcaggatggcgtggaagacctcgcccgcctccccttctgggccgcggctccgcttaggtgaaggcctgtttgggcgtccccaccctggagaggggccggggtctggattttcagaactgccactcttctagtgcgctggcgtcaatgctcccttcctcgggccattggagactccgttgctttttaatggcggcagcggctgctgggtgagcagctggaggccggacagtgttcgtcccatccggagaggatcgctttctcctggcgtcaccagcgctgggttggtgggggtagcttttccctctttgctcctccattcttgaagaaagaagaagatgccactgccatttgggttgaaactgaaacgcacccggcgctacacggtgtccagcaagagttgcctggttgcccggatccaactgcttaataacgagtttgtggagttcaccctgtccgtggagagcactggccaggaaagcctcgaggccgtggcccagaggctggagctgcgggaggtcacttacttcagcctctggtactacaacaagcaaaatcagcgccggtgggtagatttggaaaaacctttgaagaagcagctggataaatatgcattggaacctaccgtctattttggagtggtgttttatgtgccttcagtttctcagctgcagcaggagattaccaggtatcagtattatctgcaactgaagaaagatatcttggaaggaagtattccttgtaccttagaacaagcaattcagctagcaggcttagctgttcaagcggattttggtgactttgatcagtatgaatcccaggactttcttcagaaatttgccttgtttcctgtgggatggttacaagatgaaaaagtattggaagaagcaacccaaaaagtggccttactacatcagaaatacag

SEQ ID NO: 171662 - DNA, 6166 bp, Homo sapiens
  Payload ID: 13746
  Gene Symbol: PTPN21
  Gene Name: protein tyrosine phosphatase, non-receptor type 21
  Uniprot ID: Q16825
  ENST ID: ENST00000556564
  CDS Start-End: 286-3810
gcggccgcgcggcggggccccgggaggcgggtcgctgagcggggcgcgcggccccgaggatgcgggagcgggagcgggagcagcgctggcgtcaatgctcccttcctcgggccattggagactccgttgctttttaatggcggcagcggctgctgggtgagcagctggaggccggacagtgttcgtcccatccggagaggatcgctttctcctggcgtcaccagcgctgggttggtgggggtagcttttccctctttgctcctccattcttgaagaaagaagaagatgccactgccatttgggttgaaactgaaacgcacccggcgctacacggtgtccagcaagagttgcctggttgcccggatccaactgcttaataacgagtttgtggagttcaccctgtccgtggagagcactggccaggaaagcctcgaggccgtggcccagaggctggagctgcgggaggtcacttacttcagcctctggtactacaacaagcaaaatcagcgccggtgggtagatttggaaaaacctttgaagaagcagctggataaatatgcattggaacctaccgtctattttggagtggtgttttatgtgccttcagtttctcagctgcagcaggagattaccaggtatcagtattatctgcaactgaagaaagatatcttggaaggaagtattccttgtaccttagaacaagcaattcagctagcaggcttagctgttcaagcggattttggtgactttgatcagtatgaatcccaggactttcttcagaaatttgccttgtttcctgtgggatggttacaagatgaaaaagtattggaagaagcaacccaaaaagtggccttactacatcagaaatacagagggctcacagctcctgatgctgaaatgctgtacatgcaggaggtagagagaatggatggctatggagaagagagctaccctgctaaggatagccaaggaagtgacatatccattggagcgtgtcttgaaggtatctttgtgaaacacaagaatggaaggcatcctgtggtatttaggtggcatgacattgccaacatgtcccacaacaagtccttttttgcattagagctggcaaataaagaggagaccattcaatttcaaactgaagacatggaaacagcaaaatacatttggagactctgtgttgcgcgacacaagttttacagactaaaccagtgtaacctgcaaactcagactgtcacagtgaacccaatcaggaggaggtcttcttcaaggatgtctctgcctaaaccccagccctacgtgatgcctcccccaccgcagttgcactataatggacattatacagaaccatatgcttcttcccaagataacctctttgtgcccaaccagaacggatactactgtcactctcagacaagcttggatagagcccagattgacctcaacggtcggatccgtaatggcagtgtctacagtgcacacagcaccaactccttaaataatcctcagccctacttgcagccctcgccgatgtcgtccaaccctagcatcaccgggagtgacgtcatgaggcctgactacctcccgtcccatcggcacagcgccgtgatacccccgtcctaccgccccaccccagactatgagactgtgatgaagcagctcaacaggggcctggtgcatgcggaacggcagagccactcgctgcgaaacctcaacatcggcagctcgtacgcctacagcaggcccgcggcgctggtctacagccagcccgagatccgcgagcacgcacagctcccctcgccagcggccgcacactgcccgttcagcctgagctacagcttccacagcccgtctccctacccctaccctgccgagcggcggcccgtggtgggcgcggtcagcgtgccggagctgaccaatgcgcagctgcaggcgcaggactacccgtctcccaacatcatgcggacgcaggtgtaccggccacccccaccctacccgccccccaggcccgccaacagcacgccagacctgtcccgccacctttacatcagcagcagcaaccccgacctcatcacgcggcgcgtgcaccactcggtgcaaacgttccaggaggacagcctgcccgtggcgcactcgctgcaggaggtcagcgagcccctcaccgccgcgcgccacgcgcagctgcacaaacggaacagcatcgaggtggccgggctcagccacggcctggagggcctgcggctcaaggagcgcaccctatccgcgtcggcggcagaggtggcgccgcgagccgtctcggtgggctcccagcccagcgttttcaccgagaggacacagcgagaagggccggaggaggcggagggcttgaggtacggccataagaagtccctgtcggacgccaccatgctaatccacagcagcgaggaggaggaggacgaggacttcgaggaggagagcggggcccgggcgcctcctgcacgtgcgcgcgagcctcggcccggcctggcccaggacccacctggctgccctcgcgtcctgctcgccgggcccctgcacatcctggagcccaaggcccacgtcccagacgcggagaagaggatgatggacagcagccccgtccgcacgaccgcagaggcccagcggccctggagagacgggctgctgatgccctccatgtcggagtccgacctcaccacgtcaggccgctaccgagcccggagggactctctgaagaaaaggccggtgtcggaccttctctctgggaagaagaacatcgtggaagggctcccgcctctagggggaatgaaaaagactcgagtagatgcaaaaaaaattggtcctcttaaactggctgccctaaatggactctccctatctcgagtgcctctgcctgatgaaggaaaggaagtggctaccagagcaacgaatgatgaaaggtgtaaaattctggaacaacgattagaacaaggaatggtattcacagaatatgaaagaattcttaagaaacggctagttgatggggagtgctcaacagcacgactccctgaaaatgcagaaagaaatcgattccaagatgttcttccttatgatgatgtgagagtggagttggtcccaactaaagaaaacaacactggttacatcaacgcatcacatattaaggtctctgtcagtggaatcgaatgggattatattgccacacagggaccattacagaatacctgtcaagatttttggcagatggtatgggaacagggaattgcaattatagcaatggtgacagcagaagaggagggtggaagggagaagagctttaggtactggccacgacttggttccaggcacaacactgtcacctatggaaggtttaagatcacgacccggttccgcacagactctggctgctatgccaccacaggcctgaagatgaagcacctccttactgggcaagagaggaccgtctggcacctccaatacacagactggcctgaacatggctgtccagaagacctcaagggatttttatcatatcttgaagagatccagtctgttcgacgccatacaaatagcacaagtgatccccaaagccccaaccctccgttgttggtccactgcagtgctggggtaggaaggactggcgtggtgattttgtcggagatcatgatcgcctgcctggaacacaatgaggtgctggacatcccgagagtgctggacatgctgaggcaacagagaatgatgctggtgcagactctctgccagtacacatttgtgtacagagtcctcatccagttcctgaaaagctccaggctcatctaagctcccacaatttcttacggggccagtcatgtgaagcgtttacagcttaaaaaaaaagcgcttgcctaactcatactttcccgttgacacttgatccacgcagcgtggcactgggacgtaagtggcgcagtctgaatggcggcacgctgaaggaaacgtgcgaagcacaggctgaagaggggtttctaacctgggaaaggtgctcaaggaggacttggtttcaagggccttgccctgccccggtctgtccggtttgcagtacttgcacacattttggagattgtattttctagacaattctctattttactgaagctatgctgggcaattctggcaatcattaaagtgcatagatttctatcttaaactaatttttgataatggagtttttattttatgacaaatatttagggatttttctagtgagaaacaactttgtgtaaggatgatccacagatatgagttgctcctatataactttgtatttaaaaatcatgttattatcttttgttattttttaaaaaccttgggtacttaataatggtttagttgccaaactgaaaactatactgagaatctgtgttattttgaaacatcaaaaggatttttctatccagaacattttttatcctaaaaattctatatagttgtaccttctgtttttcaaatgagagctcaattcatttagatactgaaatgagtcagttaatgtaaagttgaggatgaaggcacattatttaaaatgtaagagaataagcattattttttcagtattattcatagatctaaatgaatttgattttattggttgaaaatgaagtgaaaaacaattgcctagggtggttttaagcacttttttgttaaaaacaaatctgagttttaatatatgtgttgctttgtagatgacacaataacaatgggcgctgagaagcgttttgggagagattaaggactaagagtatgtaagatgactaggacaagagtaggtggagtgtgatggtaaatgcaggatgccttcgtctttacaaaaatgcagtattatctatactcagactgaggtgctgggatggcgagcaggggaccccacagcactgtccccagggaattcaagtcctgtgaccgccagtgacttactccgtttccttggggcttttcccacctcaacctgtattgtttctttttcataaataaattcagcattatagtatcattaaaagaagccttaaagaggcgtatttttccttttggttgaaggaagggaatagttaataatagttttcacctcttctcccaaaaagtacagtccaaatttgtgcacagagattgctgtggtattcaagaggtacttgcattttagctccttaataattccctggccagtgttagctgtttagtgccccctcacccatcccatttaggcacatcccaatagacagagccaggctgagttacagggggagagtgtcatctctggccccgattaagatggccttgtcacagtgaccgctgagtaggcatggatgagtgggatatttagctgaggaaccctttcccttttccttctttttggggtctcttcttacagtgaacttccaaaatgtcaaatctagggctgtttcccaaattacactattctaggcatcattttgattcccatgtcactccttaactcacttccttgagcactacatgtatgttgtcagccacgagacaggacttcctaaatagtgtgtgcaccagcctaactctgccttacccagaaaccaaccacctaagaggaaaactcagaagatattaatgaaaactaattgaaagtacgcacacttctcatgtaggaacaaaattaaaattttacatttttattttacaaaattaaaaaattacattttgtaggaacaaaatgtaaattttgtaaatacaaaattctttttaaagtcctgtttaaagaacagtagaactaagtgaaaatattcagaacgagctccttagaagaaaggaataagaactttttactggaactattttccatctctagaaaaagtgcttcttcccctccccctccctctccatggtacgtttttgtgaaaatgcttttctgtcaggtttaaacaaacagtttgacatagctcgttgacaagaacatattgtaaaacaaatctaattaaagagtaatatgtggtctatttgtgttcctgttgtaataatttgataagtaaacttctgagggcaaaattactgtttaatattactcttaaaatgttgcatgtttggcgtcattcctaagagccatgtaattttaaacttttaattgcagttagtgaatatgaaaggatttctgaataaaaatctatccaca

SEQ ID NO: 171663 - DNA, 3654 bp, Homo sapiens
  Payload ID: 13747
  Gene Symbol: PTPN22
  Gene Name: protein tyrosine phosphatase, non-receptor type 22 (lymphoid)
  ENST ID: ENST00000359785
  CDS Start-End: 137-2560
gaagtcagtaaaccacagccttcagcatgctctgctcaggcggcagcagtggctttttggaggtgtctcggccatgacacacatttgacatgccctccctcaacctacttatagactatttttcttgctctgcagcatggaccaaagagaaattctgcagaagttcctggatgaggcccaaagcaagaaaattactaaagaggagtttgccaatgaatttctgaagctgaaaaggcaatctaccaagtacaaggcagacaaaacctatcctacaactgtggctgagaagcccaagaatatcaagaaaaacagatataaggatattttgccctatgattatagccgggtagaactatccctgataacctctgatgaggattccagctacatcaatgccaacttcattaagggagtttatggacccaaggcttatattgccacccagggtcctttatctacaaccctcctggacttctggaggatgatttgggaatatagtgtccttatcattgttatggcatgcatggagtatgaaatgggaaagaaaaagtgtgagcgctactgggctgagccaggagagatgcagctggaatttggccctttctctgtatcctgtgaagctgaaaaaaggaaatctgattatataatcaggactctaaaagttaagttcaatagtgaaactcgaactatctaccagtttcattacaagaattggccagaccatgatgtaccttcatctatagaccctattcttgagctcatctgggatgtacgttgttaccaagaggatgacagtgttcccatatgcattcactgcagtgctggctgtggaaggactggtgttatttgtgctattgattatacatggatgttgctaaaagatgggataattcctgagaacttcagtgttttcagtttgatccgggaaatgcggacacagaggccttcattagttcaaacgcaggaacaatatgaactggtctacaatgctgtattagaactatttaagagacagatggatgttatcagagataaacattctggaacagagagtcaagcaaagcattgtattcctgagaaaaatcacactctccaagcagactcttattctcctaatttaccaaaaagtaccacaaaagcagcaaaaatgatgaaccaacaaaggacaaaaatggaaatcaaagaatcttcttcctttgactttaggacttctgaaataagtgcaaaagaagagctagttttgcaccctgctaaatcaagcacttcttttgactttctggagctaaattacagttttgacaaaaatgctgacacaaccatgaaatggcagacaaaggcatttccaatagttggggagcctcttcagaagcatcaaagtttggatttgggctctcttttgtttgagggatgttctaattctaaacctgtaaatgcagcaggaagatattttaattcaaaggtgccaataacacggaccaaatcaactccttttgaattgatacagcagagagaaaccaaggaggtggacagcaaggaaaacttttcttatttggaatctcaaccacatgattcttgttttgtagagatgcaggctcaaaaagtaatgcatgtttcttcagcagaactgaattattcactgccatatgactctaaacaccaaatacgtaatgcctctaatgtaaagcaccatgactctagtgctcttggtgtatattcttacatacctttagtggaaaatccttatttttcatcatggcctccaagtggtaccagttctaagatgtctcttgatttacctgagaagcaagatggaactgtttttccttcttctctgttgccaacatcctctacatccctcttctcttattacaattcacatgattctttatcactgaattctccaaccaatatttcctcactattgaaccaggagtcagctgtactagcaactgctccaaggatagatgatgaaatcccccctccacttcctgtatggacacctgaatcatttattgtggttgaggaagctggagaattctcaccaaatgttcccaaatccttatcctcagctgtgaaggtaaaaattggaacatcactggaatggggtggaacatctgaaccaaagaaatttgatgactctgtgatacttagaccaagcaagagtgtaaaactccgaagtcctaaatcagaactacatcaagatcgttcttctcccccacctcctctcccagaaagaactctagagtccttctttcttgccgatgaagattgtatgcaggcccaatctatagaaacatattctactagctatcctgacaccatggaaaattcaacatcttcaaaacagacactgaagactcctggaaaaagtttcacaaggagtaagagtttgaaaattttgcgaaacatgaaaaagagtatctgtaattcttgcccaccaaacaagcctgcagaatctgttcagtcaaataactccagctcatttctgaattttggttttgcaaaccgtttttcaaaacccaaaggaccaaggaatccaccaccaacttggaatatttaataaaactccagatttataataatatgggctgcaagtacacctgcaaataaaactactagaatactgctagttaaaataagtgctctatatgcataatatcaaatatgaagatatgctaatgtgttaatagcttttaaaagaaaagcaaaatgccaataagtgccagttttgcattttcatatcatttgcattgagttgaaaactgcaaataaaagtttgtcacttgagcttatgtacagaatgctatatgagaaacacttttagaatggatttatttttcatttttgccagttatttttattttcttttacttttctacataaacataaacttcaaaaggtttgtaagatttggatctcaactaatttctacattgccagaatatactataaaaagttaaaaaaaaaacttactttgtgggttgcaatacaaactgctcttgacaatgactattccctgacagttatttttgcctaaatggagtataccttgtaaatcttcccaaatgttgtggaaaactggaatattaagaaaatgagaaattatatttattagaataaaatgtgcaaataatgacaattatttgaatgtaacaaggaattcaactgaaatcctgataagttttaaccaaagtcattaaattaccaattctagaaaagtaatcaatgaaatataatagctatcttttggtagcaaaagatataaattgtatatgtttatacaggatctttcagatcatgtgcaatttttatctaaccaatcagaaatactagtttaaaatgaatttctatatgaatatggatctgccataagaaaatctagttcaactctaattttatgtagtaaataaattggcaggtaattgtttttacaaagaatccacctgacttcccctaatgcattaaaaatatttttatttaaataactttatttataacttttagaaacatgtagtattgtttaaacatcatttgttcttcagtatttttcatttggaagtccaatagggcaaattgaatgaagtattattatctgtctcttgtagtacaatgtatccaacagacactcaataaactttttggttgttaaactga

SEQ ID NO: 171664 - DNA, 2726 bp, Homo sapiens
  Payload ID: 13747
  Gene Symbol: PTPN22
  Gene Name: protein tyrosine phosphatase, non-receptor type 22 (lymphoid)
  ENST ID: ENST00000420377
  CDS Start-End: 90-2477
agtggctttttggaggtgtctcggccatgacacacatttgacatgccctccctcaacctacttatagactatttttcttgctctgcagcatggaccaaagagaaattctgcagaagttcctggatgaggcccaaagcaagaaaattactaaagaggagtttgccaatgaatttctgaagctgaaaaggcaatctaccaagtacaaggcagacaaaacctatcctacaactgtggctgagaagcccaagaatatcaagaaaaacagatataaggatattttgccctatgattatagccgggtagaactatccctgataacctctgatgaggattccagctacatcaatgccaacttcattaagggagtttatggacccaaggcttatattgccacccagggtcctttatctacaaccctcctggacttctggaggatgatttgggaatatagtgtccttatcattgttatggcatgcatggagtatgaaatgggaaagaaaaagtgtgagcgctactgggctgagccaggagagatgcagctggaatttggccctttctctgtatcctgtgaagctgaaaaaaggaaatctgattatataatcaggactctaaaagttaagttcaatagtgaaactcgaactatctaccagtttcattacaagaattggccagaccatgatgtaccttcatctatagaccctattcttgagctcatctgggatgtacgttgttaccaagaggatgacagtgttcccatatgcattcactgcagtgctggctgtggaaggactggtgttatttgtgctattgattatacatggatgttgctaaaagatgggataattcctgagaacttcagtgttttcagtttgatccgggaaatgcggacacagaggccttcattagttcaaacgcaggaacaatatgaactggtctacaatgctgtattagaactatttaagagacagatggatgttatcagagataaacattctggaacagagagtcaagcaaagcattgtattcctgagaaaaatcacactctccaagcagactcttattctcctaatttaccaaaaagtaccacaaaagcagcaaaaatgatgaaccaacaaaggacaaaaatggaaatcaaagaatcttcttcctttgactttaggacttctgaaataagtgcaaaagaagagctagttttgcaccctgctaaatcaagcacttcttttgactttctggagctaaattacagttttgacaaaaatgctgacacaaccatgaaatggcagacaaaggcatttccaatagttggggagcctcttcagaagcatcaaagtttggatttgggctctcttttgtttgagggatgttctaattctaaacctgtaaatgcagcaggaagatattttaattcaaaggtgccaataacacggaccaaatcaactccttttgaattgatacagcagagagaaaccaaggaggtggacagcaaggaaaacttttcttatttggaatctcaaccacatgattcttgttttgtagagatgcaggctcaaaaagtaatgcatgtttcttcagcagaactgaattattcactgccatatgactctaaacaccaaatacgtaatgcctctaatgtaaagcaccatgactctagtgctcttggtgtatattcttacatacctttagtggaaaatccttatttttcatcatggcctccaagtggtaccagttctaagatgtctcttgatttacctgagaagcaagatggaactgtttttccttcttctctgttgccaacatcctctacatccctcttctcttattacaattcacatgattctttatcactgaattctccaaccaatatttcctcactattgaaccaggagtcagctgtactagcaactgctccaaggatagatgatgaaatcccccctccacttcctgtatggacacctgaatcatttattgtggttgaggaagctggagaattctcaccaaatgttcccaaatccttatcctcagctgtgaaggtaaaaattggaacatcactggaatggggtggaacatctgaaccaaagaaatttgatgactctgtgatacttagaccaagcaagagtgtaaaactccgaagtcctaaatcagaactacatcaagatcgttcttctcccccacctcctctcccagaaagaactctagagtccttctttcttgccgatgaagattgtatgcaggcccaatctatagaaacatattctactagctatcctgacaccatggaaaattcaacatcttcaaaacagacactgaagactcctggaaaaagtttcacaaggagtaagagtttgaaaattttgcgaaacatgaaaaagagtatctgtaattcttgcccaccaaacaagcctgcagaatctgttcagtcaaataactccagctcatttctgaattttggtatgtgtgttattttactgaagagttaaaaaaattacctaaattactcatttacagtataactgattcaactttaaatatgattttaggttgcatgtataggtccttatgtttatattcttttccatgcaatttatctttttatttttaaccttaactacctcttaacatctcacacagaactaaattatctagtatatgtggaaaataaagctaggtaaccaaattattgtgttggcatgtagtaaataaatatgactatccaaatggagaaattg

SEQ ID NO: 171665 - DNA, 2421 bp, Homo sapiens
  Payload ID: 13747
  Gene Symbol: PTPN22
  Gene Name: protein tyrosine phosphatase, non-receptor type 22 (lymphoid)
  ENST ID: ENST00000532224
  CDS Start-End: 86-493
gctttttggaggtgtctcggccatgacacacatttgacatgccctccctcaacctacttatagactatttttcttgctctgcagcatggaccaaagagaaattctgcagaagttcctggatgaggcccaaagcaagaaaattactaaagaggagtttgccaatgaatttctgaagctgaaaaggcaatctaccaagtacaaggcagacaaaacctatcctacaactgtggctgagaagcccaagaatatcaagaaaaacagatataaggatattttgccctatgattatagccgggtagaactatccctgataacctctgatgaggattccagctacatcaatgccaacttcattaagggagtttatggacccaaggcttatattgccacccagggtcctttatctacaaccctcctggacttctggaggatgatttgggaatatagtgtcctttgctggctgtggaaggactggtgttatttgtgctattgattatacatggatgttgctaaaagatgggataattcctgagaacttcagtgttttcagtttgatccgggaaatgcggacacagaggccttcattagttcaaacgcaggaacaatatgaactggtctacaatgctgtattagaactatttaagagacagatggatgttatcagagataaacattctggaacagagagtcaagcaaagcattgtattcctgagaaaaatcacactctccaagcagactcttattctcctaatttaccaaaaagtaccacaaaagcagcaaaaatgatgaaccaacaaaggacaaaaatggaaatcaaagaatcttcttcctttgactttaggacttctgaaataagtgcaaaagaagagctagttttgcaccctgctaaatcaagcacttcttttgactttctggagctaaattacagttttgacaaaaatgctgacacaaccatgaaatggcagacaaaggcatttccaatagttggggagcctcttcagaagcatcaaagtttggatttgggctctcttttgtttgagggatgttctaattctaaacctgtaaatgcagcaggaagatattttaattcaaaggtgccaataacacggaccaaatcaactccttttgaattgatacagcagagagaaaccaaggaggtggacagcaaggaaaacttttcttatttggaatctcaaccacatgattcttgttttgtagagatgcaggctcaaaaagtaatgcatgtttcttcagcagaactgaattattcactgccatatgactctaaacaccaaatacgtaatgcctctaatgtaaagcaccatgactctagtgctcttggtgtatattcttacatacctttagtggaaaatccttatttttcatcatggcctccaagtggtaccagttctaagatgtctcttgatttacctgagaagcaagatggaactgtttttccttcttctctgttgccaacatcctctacatccctcttctcttattacaattcacatgattctttatcactgaattctccaaccaatatttcctcactattgaaccaggagtcagctgtactagcaactgctccaaggatagatgatgaaatcccccctccacttcctgtatggacacctgaatcatttattgtggttgaggaagctggagaattctcaccaaatgttcccaaatccttatcctcagctgtgaaggtaaaaattggaacatcactggaatggggtggaacatctgaaccaaagaaatttgatgactctgtgatacttagaccaagcaagagtgtaaaactccgaagtcctaaatcagaactacatcaagatcgttcttctcccccacctcctctcccagaaagaactctagagtccttctttcttgccgatgaagattgtatgcaggcccaatctatagaaacatattctactagctatcctgacaccatggaaaattcaacatcttcaaaacagacactgaagactcctggaaaaagtttcacaaggagtaagagtttgaaaattttgcgaaacatgaaaaagagtatctgtaattcttgcccaccaaacaagcctgcagaatctgttcagtcaaataactccagctcatttctgaattttggttttgcaaaccgtttttcaaaacccaaaggaccaaggaatccaccaccaacttggaatatttaataaaactccagatttataataatatgggctgcaagtacacctgcaaataaaactactagaatactgctagttaaaataagtgctctatatgcataatatcaaatatgaagatatgctaatgtgttaatagcttttaaaagaaaagcaaaatgccaataagtgccagttttgcattttcatatcatttgcattgagttgaaaactgcaaataaaagtttgtcacttg

SEQ ID NO: 171666 - DNA, 2118 bp, Homo sapiens
  Payload ID: 13747
  Gene Symbol: PTPN22
  Gene Name: protein tyrosine phosphatase, non-receptor type 22 (lymphoid)
  ENST ID: ENST00000525799
  CDS Start-End: 90-2096
agtggctttttggaggtgtctcggccatgacacacatttgacatgccctccctcaacctacttatagactatttttcttgctctgcagcatggaccaaagagaaattctgcagaagttcctggatgaggcccaaagcaagaaaattactaaagaggagtttgccaatgaatttctgaagctgaaaaggcaatctaccaagtacaaggcagacaaaacctatcctacaactgtggctgagaagcccaagaatatcaagaaaaacagatataaggatattttgccctatgattatagccgggtagaactatccctgataacctctgatgaggattccagctacatcaatgccaacttcattaagggagtttatggacccaaggcttatattgccacccagggtcctttatctacaaccctcctggacttctggaggatgatttgggaatatagtgtccttataattcctgagaacttcagtgttttcagtttgatccgggaaatgcggacacagaggccttcattagttcaaacgcaggaacaatatgaactggtctacaatgctgtattagaactatttaagagacagatggatgttatcagagataaacattctggaacagagagtcaagcaaagcattgtattcctgagaaaaatcacactctccaagcagactcttattctcctaatttaccaaaaagtaccacaaaagcagcaaaaatgatgaaccaacaaaggacaaaaatggaaatcaaagaatcttcttcctttgactttaggacttctgaaataagtgcaaaagaagagctagttttgcaccctgctaaatcaagcacttcttttgactttctggagctaaattacagttttgacaaaaatgctgacacaaccatgaaatggcagacaaaggcatttccaatagttggggagcctcttcagaagcatcaaagtttggatttgggctctcttttgtttgagggatgttctaattctaaacctgtaaatgcagcaggaagatattttaattcaaaggtgccaataacacggaccaaatcaactccttttgaattgatacagcagagagaaaccaaggaggtggacagcaaggaaaacttttcttatttggaatctcaaccacatgattcttgttttgtagagatgcaggctcaaaaagtaatgcatgtttcttcagcagaactgaattattcactgccatatgactctaaacaccaaatacgtaatgcctctaatgtaaagcaccatgactctagtgctcttggtgtatattcttacatacctttagtggaaaatccttatttttcatcatggcctccaagtggtaccagttctaagatgtctcttgatttacctgagaagcaagatggaactgtttttccttcttctctgttgccaacatcctctacatccctcttctcttattacaattcacatgattctttatcactgaattctccaaccaatatttcctcactattgaaccaggagtcagctgtactagcaactgctccaaggatagatgatgaaatcccccctccacttcctgtatggacacctgaatcatttattgtggttgaggaagctggagaattctcaccaaatgttcccaaatccttatcctcagctgtgaaggtaaaaattggaacatcactggaatggggtggaacatctgaaccaaagaaatttgatgactctgtgatacttagaccaagcaagagtgtaaaactccgaagtcctaaatcagaactacatcaagatcgttcttctcccccacctcctctcccagaaagaactctagagtccttctttcttgccgatgaagattgtatgcaggcccaatctatagaaacatattctactagctatcctgacaccatggaaaattcaacatcttcaaaacagacactgaagactcctggaaaaagtttcacaaggagtaagagtttgaaaattttgcgaaacatgaaaaagagtatctgtaattcttgcccaccaaacaagcctgcagaatctgttcagtcaaataactccagctcatttctgaattttggtatgtgtgttattttactgaagagttaaaaaaattacctaaattactcat

SEQ ID NO: 171667 - DNA, 1794 bp, Homo sapiens
  Payload ID: 13747
  Gene Symbol: PTPN22
  Gene Name: protein tyrosine phosphatase, non-receptor type 22 (lymphoid)
  Uniprot ID: Q9Y2R2
  ENST ID: ENST00000460620
  CDS Start-End: 90-629
agtggctttttggaggtgtctcggccatgacacacatttgacatgccctccctcaacctacttatagactatttttcttgctctgcagcatggaccaaagagaaattctgcagaagttcctggatgaggcccaaagcaagaaaattactaaagaggagtttgccaatgaatttctgaagctgaaaaggcaatctaccaagtacaaggcagacaaaacctatcctacaactgtggctgagaagcccaagaatatcaagaaaaacagatataaggatattttgccctatgattatagccgggtagaactatccctgataacctctgatgaggattccagctacatcaatgccaacttcattaagggagtttatggacccaaggcttatattgccacccagggtcctttatctacaaccctcctggacttctggaggatgatttgggaatatagtgtccttatcattgttatggcatgcatggagtatgaaatgggaaaggaagctgaaaaaaggaaatctgattatataatcaggactctaaaagttaagttcaatagtgtatctgtaattcttgcccaccaaacaagcctgcagaatctgttcagtcaaataactccagctcatttctgaattttggttttgcaaaccgtttttcaaaacccaaaggaccaaggaatccaccaccaacttggaatatttaataaaactccagatttataataatatgggctgcaagtacacctgcaaataaaactactagaatactgctagttaaaataagtgctctatatgcataatatcaaatatgaagatatgctaatgtgttaatagcttttaaaagaaaagcaaaatgccaataagtgccagttttgcattttcatatcatttgcattgagttgaaaactgcaaataaaagtttgtcacttgagcttatgtacagaatgctatatgagaaacacttttagaatggatttatttttcatttttgccagttatttttattttcttttacttttctacataaacataaacttcaaaaggtttgtaagatttggatctcaactaatttctacattgccagaatatactataaaaagttaaaaaaaaaacttactttgtgggttgcaatacaaactgctcttgacaatgactattccctgacagttatttttgcctaaatggagtataccttgtaaatcttcccaaatgttgtggaaaactggaatattaagaaaatgagaaattatatttattagaataaaatgtgcaaataatgacaattatttgaatgtaacaaggaattcaactgaaatcctgataagttttaaccaaagtcattaaattaccaattctagaaaagtaatcaatgaaatataatagctatcttttggtagcaaaagatataaattgtatatgtttatacaggatctttcagatcatgtgcaatttttatctaaccaatcagaaatactagtttaaaatgaatttctatatgaatatggatctgccataagaaaatctagttcaactctaattttatgtagtaaataaattggcaggtaattgtttttacaaagaatccacctgacttcccctaatgcattaaaaatatttttatttaaataactttatttataacttttagaaacatgtagtattgtttaaacatcatttgttcttcagtatttttcatttggaagtccaatagggcaaattgaatgaagtattattatctgtctcttgtagtacaatgtatccaacagacactcaataaactttttggttgttaaactga

SEQ ID NO: 171668 - DNA, 527 bp, Homo sapiens
  Payload ID: 13747
  Gene Symbol: PTPN22
  Gene Name: protein tyrosine phosphatase, non-receptor type 22 (lymphoid)
  ENST ID: ENST00000529045
  CDS Start-End: 131-409
agtaaaccacagccttcagcatgctctgctcaggcggcagcagtggctttttggaggtgtctcggccatgacacacatttgacatgccctccctcaacctacttatagactatttttcttgctctgcagcatggaccaaagagaaattctgcagaagttcctggatgaggcccaaagcaagaaaattactaaagaggagtttgccaatgaatttctgggtcttgctctgtcacccaggctggagtgccgtggcttgatcatagctcactgcagacttgacttcctggactcaagtgatcctccagcctcagcctcccaaagtgctgagattacaaccatgagccaccacacctggccagagaaagctttctggacctctttgaatagatcaaatcttctattaagctgaaaaggcaatctaccaagtacaaggcagacaaaacctatcctacaactgtggctgagaagcccaagaatatcaagaaaaacagatataaggatattttgccctatgattatagccgggt

SEQ ID NO: 171669 - DNA, 3424 bp, Homo sapiens
  Payload ID: 13747
  Gene Symbol: PTPN22
  Gene Name: protein tyrosine phosphatase, non-receptor type 22 (lymphoid)
  ENST ID: ENST00000528414
  CDS Start-End: 76-2334
ggtgtctcggccatgacacacatttgacatgccctccctcaacctacttatagactatttttcttgctctgcagcatggaccaaagagaaattctgcagaagttcctggatgaggcccaaagcaagaaaattactaaagaggagtttgccaatgaatttctgaagctgaaaaggcaatctaccaagtacaaggcagacaaaacctatcctacaactgtggctgagaagcccaagaatatcaagaaaaacagatataaggatattttgccctatgattatagccgggtagaactatccctgataacctctgatgaggattccagctacatcaatgccaacttcattaagggagtttatggacccaaggcttatattgccacccagggtcctttatctacaaccctcctggacttctggaggatgatttgggaatatagtgtccttatcattgttatggcatgcatggagtatgaaatgggaaagaaaaagtgtgagcgctactgggctgagccaggagagatgcagctggaatttggccctttctctgtatcctgtgaagctgaaaaaaggaaatctgattatataatcaggactctaaaagttaagttcaatagtgaaactcgaactatctaccagtttcattacaagaattggccagaccatgatgtaccttcatctatagaccctattcttgagctcatctgggatgtacgttgttaccaagaggatgacagtgttcccatatgcattcactgcagtgctggctgtggaaggactggtgttatttgtgctattgattatacatggatgttgctaaaagatgggagtcaagcaaagcattgtattcctgagaaaaatcacactctccaagcagactcttattctcctaatttaccaaaaagtaccacaaaagcagcaaaaatgatgaaccaacaaaggacaaaaatggaaatcaaagaatcttcttcctttgactttaggacttctgaaataagtgcaaaagaagagctagttttgcaccctgctaaatcaagcacttcttttgactttctggagctaaattacagttttgacaaaaatgctgacacaaccatgaaatggcagacaaaggcatttccaatagttggggagcctcttcagaagcatcaaagtttggatttgggctctcttttgtttgagggatgttctaattctaaacctgtaaatgcagcaggaagatattttaattcaaaggtgccaataacacggaccaaatcaactccttttgaattgatacagcagagagaaaccaaggaggtggacagcaaggaaaacttttcttatttggaatctcaaccacatgattcttgttttgtagagatgcaggctcaaaaagtaatgcatgtttcttcagcagaactgaattattcactgccatatgactctaaacaccaaatacgtaatgcctctaatgtaaagcaccatgactctagtgctcttggtgtatattcttacatacctttagtggaaaatccttatttttcatcatggcctccaagtggtaccagttctaagatgtctcttgatttacctgagaagcaagatggaactgtttttccttcttctctgttgccaacatcctctacatccctcttctcttattacaattcacatgattctttatcactgaattctccaaccaatatttcctcactattgaaccaggagtcagctgtactagcaactgctccaaggatagatgatgaaatcccccctccacttcctgtatggacacctgaatcatttattgtggttgaggaagctggagaattctcaccaaatgttcccaaatccttatcctcagctgtgaaggtaaaaattggaacatcactggaatggggtggaacatctgaaccaaagaaatttgatgactctgtgatacttagaccaagcaagagtgtaaaactccgaagtcctaaatcagaactacatcaagatcgttcttctcccccacctcctctcccagaaagaactctagagtccttctttcttgccgatgaagattgtatgcaggcccaatctatagaaacatattctactagctatcctgacaccatggaaaattcaacatcttcaaaacagacactgaagactcctggaaaaagtttcacaaggagtaagagtttgaaaattttgcgaaacatgaaaaagagtatctgtaattcttgcccaccaaacaagcctgcagaatctgttcagtcaaataactccagctcatttctgaattttggttttgcaaaccgtttttcaaaacccaaaggaccaaggaatccaccaccaacttggaatatttaataaaactccagatttataataatatgggctgcaagtacacctgcaaataaaactactagaatactgctagttaaaataagtgctctatatgcataatatcaaatatgaagatatgctaatgtgttaatagcttttaaaagaaaagcaaaatgccaataagtgccagttttgcattttcatatcatttgcattgagttgaaaactgcaaataaaagtttgtcacttgagcttatgtacagaatgctatatgagaaacacttttagaatggatttatttttcatttttgccagttatttttattttcttttacttttctacataaacataaacttcaaaaggtttgtaagatttggatctcaactaatttctacattgccagaatatactataaaaagttaaaaaaaaaacttactttgtgggttgcaatacaaactgctcttgacaatgactattccctgacagttatttttgcctaaatggagtataccttgtaaatcttcccaaatgttgtggaaaactggaatattaagaaaatgagaaattatatttattagaataaaatgtgcaaataatgacaattatttgaatgtaacaaggaattcaactgaaatcctgataagttttaaccaaagtcattaaattaccaattctagaaaagtaatcaatgaaatataatagctatcttttggtagcaaaagatataaattgtatatgtttatacaggatctttcagatcatgtgcaatttttatctaaccaatcagaaatactagtttaaaatgaatttctatatgaatatggatctgccataagaaaatctagttcaactctaattttatgtagtaaataaattggcaggtaattgtttttacaaagaatccacctgacttcccctaatgcattaaaaatatttttatttaaataactttatttataacttttagaaacatgtagtattgtttaaacatcatttgttcttcagtatttttcatttggaagtccaatagggcaaattgaatgaagtattattatctgtctcttgtagtacaatgtatccaacagacactcaataaactttttggttgttaaa

SEQ ID NO: 171670 - DNA, 3575 bp, Homo sapiens
  Payload ID: 13747
  Gene Symbol: PTPN22
  Gene Name: protein tyrosine phosphatase, non-receptor type 22 (lymphoid)
  ENST ID: ENST00000538253
  CDS Start-End: 131-2482
agtaaaccacagccttcagcatgctctgctcaggcggcagcagtggctttttggaggtgtctcggccatgacacacatttgacatgccctccctcaacctacttatagactatttttcttgctctgcagcatggaccaaagagaaattctgcagaagttcctggatgaggcccaaagcaagaaaattactaaagaggagtttgccaatgaatttctgaagctgaaaaggcaatctaccaagtacaaggcagacaaaacctatcctacaactgtggctgagaagcccaagaatatcaagaaaaacagatataaggatattttgccctatgattatagccgggtagaactatccctgataacctctgatgaggattccagctacatcaatgccaacttcattaagggagtttatggacccaaggcttatattgccacccagggtcctttatctacaaccctcctggacttctggaggatgatttgggaatatagtgtccttatcattgttatggcatgcatggagtatgaaatgggaaaggaagctgaaaaaaggaaatctgattatataatcaggactctaaaagttaagttcaatagtgaaactcgaactatctaccagtttcattacaagaattggccagaccatgatgtaccttcatctatagaccctattcttgagctcatctgggatgtacgttgttaccaagaggatgacagtgttcccatatgcattcactgcagtgctggctgtggaaggactggtgttatttgtgctattgattatacatggatgttgctaaaagatgggataattcctgagaacttcagtgttttcagtttgatccgggaaatgcggacacagaggccttcattagttcaaacgcaggaacaatatgaactggtctacaatgctgtattagaactatttaagagacagatggatgttatcagagataaacattctggaacagagagtcaagcaaagcattgtattcctgagaaaaatcacactctccaagcagactcttattctcctaatttaccaaaaagtaccacaaaagcagcaaaaatgatgaaccaacaaaggacaaaaatggaaatcaaagaatcttcttcctttgactttaggacttctgaaataagtgcaaaagaagagctagttttgcaccctgctaaatcaagcacttcttttgactttctggagctaaattacagttttgacaaaaatgctgacacaaccatgaaatggcagacaaaggcatttccaatagttggggagcctcttcagaagcatcaaagtttggatttgggctctcttttgtttgagggatgttctaattctaaacctgtaaatgcagcaggaagatattttaattcaaaggtgccaataacacggaccaaatcaactccttttgaattgatacagcagagagaaaccaaggaggtggacagcaaggaaaacttttcttatttggaatctcaaccacatgattcttgttttgtagagatgcaggctcaaaaagtaatgcatgtttcttcagcagaactgaattattcactgccatatgactctaaacaccaaatacgtaatgcctctaatgtaaagcaccatgactctagtgctcttggtgtatattcttacatacctttagtggaaaatccttatttttcatcatggcctccaagtggtaccagttctaagatgtctcttgatttacctgagaagcaagatggaactgtttttccttcttctctgttgccaacatcctctacatccctcttctcttattacaattcacatgattctttatcactgaattctccaaccaatatttcctcactattgaaccaggagtcagctgtactagcaactgctccaaggatagatgatgaaatcccccctccacttcctgtatggacacctgaatcatttattgtggttgaggaagctggagaattctcaccaaatgttcccaaatccttatcctcagctgtgaaggtaaaaattggaacatcactggaatggggtggaacatctgaaccaaagaaatttgatgactctgtgatacttagaccaagcaagagtgtaaaactccgaagtcctaaatcagaactacatcaagatcgttcttctcccccacctcctctcccagaaagaactctagagtccttctttcttgccgatgaagattgtatgcaggcccaatctatagaaacatattctactagctatcctgacaccatggaaaattcaacatcttcaaaacagacactgaagactcctggaaaaagtttcacaaggagtaagagtttgaaaattttgcgaaacatgaaaaagagtatctgtaattcttgcccaccaaacaagcctgcagaatctgttcagtcaaataactccagctcatttctgaattttggttttgcaaaccgtttttcaaaacccaaaggaccaaggaatccaccaccaacttggaatatttaataaaactccagatttataataatatgggctgcaagtacacctgcaaataaaactactagaatactgctagttaaaataagtgctctatatgcataatatcaaatatgaagatatgctaatgtgttaatagcttttaaaagaaaagcaaaatgccaataagtgccagttttgcattttcatatcatttgcattgagttgaaaactgcaaataaaagtttgtcacttgagcttatgtacagaatgctatatgagaaacacttttagaatggatttatttttcatttttgccagttatttttattttcttttacttttctacataaacataaacttcaaaaggtttgtaagatttggatctcaactaatttctacattgccagaatatactataaaaagttaaaaaaaaaacttactttgtgggttgcaatacaaactgctcttgacaatgactattccctgacagttatttttgcctaaatggagtataccttgtaaatcttcccaaatgttgtggaaaactggaatattaagaaaatgagaaattatatttattagaataaaatgtgcaaataatgacaattatttgaatgtaacaaggaattcaactgaaatcctgataagttttaaccaaagtcattaaattaccaattctagaaaagtaatcaatgaaatataatagctatcttttggtagcaaaagatataaattgtatatgtttatacaggatctttcagatcatgtgcaatttttatctaaccaatcagaaatactagtttaaaatgaatttctatatgaatatggatctgccataagaaaatctagttcaactctaattttatgtagtaaataaattggcaggtaattgtttttacaaagaatccacctgacttcccctaatgcattaaaaatatttttatttaaataactttatttataacttttagaaacatgtagtattgtttaaacatcatttgttcttcagtatttttcatttggaagtccaatagggcaaattgaatgaagtattattatctgtctcttgtagtacaatgtatccaacagacactcaataaactttttggttgttaaactg

SEQ ID NO: 171671 - DNA, 5244 bp, Homo sapiens
  Payload ID: 13748
  Gene Symbol: PTPN23
  Gene Name: protein tyrosine phosphatase, non-receptor type 23
  Uniprot ID: Q9H3S7
  ENST ID: ENST00000265562
  CDS Start-End: 78-4988
cggggctgggctcgtggctgagccagcagctgcagcagctacgggagtggccgggtggccggcgggtgccagccgccatggaggccgtgccccgcatgcccatgatctggctggacctgaaggaggccggtgactttcacttccagccagctgtgaagaagtttgtcctgaagaattatggagagaacccagaagcctacaatgaagaactgaagaagctggagttgctcagacagaatgctgtccgtgtcccacgagactttgagggctgtagtgtcctccgcaagtacctcggccagcttcattacctgcagagtcgggtccccatgggctcgggccaggaggccgctgtccctgtcacctggacagagatcttctcaggcaagtctgtggcccatgaggacatcaagtacgagcaggcctgtattctctacaaccttggagcgctgcactccatgctgggggccatggacaagcgggtgtctgaggagggcatgaaggtctcctgtacccatttccagtgcgcagccggcgccttcgcctacctacgggagcacttccctcaagcctacagcgtcgacatgagccgccagatccttacgctcaacgtcaacctcatgctgggccaggctcaggagtgcctcctggagaagtcgatgttggacaacaggaagagctttctggtggcccgcatcagtgcacaggtggtagattactacaaggaggcatgccgggccttggagaaccccgacactgcctcactgctgggccggatccagaaggactggaagaaacttgtgcagatgaagatctactacttcgcagccgtggctcatctgcacatgggaaagcaggccgaggagcagcagaagttcggggagcgggttgcatacttccagagcgccctggacaagctcaatgaagccatcaagttggccaagggccagcctgacactgtgcaagacgcgcttcgcttcactatggatgtcattgggggaaagtacaattctgccaagaaggacaacgacttcatttaccatgaggctgtcccagcattggacactcttcagcctgtaaaaggagcccccttggtgaagcccttgccagtgaaccccacagacccagctgttacaggccctgacatctttgccaaactggtacccatggctgcccacgaggcctcgtcactgtacagtgaggagaaggccaagctgctccgggagatgatggccaagattgaggacaagaatgaggtcctggaccagttcatggattcaatgcagttggatcccgagacggtggacaaccttgatgcctacagccacatcccaccccagctcatggagaagtgcgcggctctcagcgtccggcccgacactgtcaggaaccttgtacagtccatgcaagtgctgtcaggtgtgttcacggatgtggaggcttccctgaaggacatcagagatctgttggaggaggatgagctgctagagcagaagtttcaggaggcggtgggccaggcaggggccatctccatcacctccaaggctgagctggcagaggtgaggcgagaatgggccaagtacatggaagtccatgagaaggcctccttcaccaacagtgagctgcaccgtgccatgaacctgcacgtcggcaacctgcgcctgctcagcgggccgcttgaccaggtccgggctgccctgcccacaccggccctctccccagaggacaaggccgtgctgcaaaacctaaagcgcatcctggctaaggtgcaggagatgcgggaccagcgcgtgtccctggagcagcagctgcgtgagcttatccagaaagatgacatcactgcctcgctggtcaccacagaccactcagagatgaagaagttgttcgaggagcagctgaaaaagtatgaccagctgaaggtgtacctggagcagaacctggccgcccaggaccgtgtcctctgtgcactgacagaggccaacgtgcagtacgcagccgtgcggcgggtactcagcgacttggaccaaaagtggaactccacgctgcagaccctggtggcctcgtatgaagcctatgaggacctgatgaagaagtcgcaggagggcagggacttctacgcagatctggagagcaaggtggctgctctgctggagcgcacgcagtccacctgccaggcccgcgaggctgcccgccagcagctcctggacagggagctgaagaagaagccgccgccacggcccacagccccaaagccgctgctgccccgcagggaggagagtgaggcagtggaagcaggagacccccctgaggagctgcgcagcctcccccctgacatggtggctggcccacgactgcctgacaccttcctgggaagtgccaccccgctccactttcctcccagccccttccccagctccacaggcccaggaccccactatctctcaggccccttgccccctggtacctactcgggccccacccagctgatacagcccagggccccagggccccatgcaatgcccgtagcacctgggcctgccctctacccagcccctgcctacacaccggagctgggccttgtgccccgatcctccccacagcatggcgtggtgagcagtccctatgtgggggtagggccggccccaccagttgcaggtctcccctcggccccacctcctcaattctcaggccccgagttggccatggcggttcggccagccaccaccacagtagatagcatccaggcgcccatccccagccacacagccccacggccaaaccccacccctgctcctcccccgccctgcttccctgtgcccccaccgcagccactgcccacgccttacacctaccctgcaggggctaagcaacccatcccggcacagcaccacttctcttctgggatccccgcaggttttccagccccaaggattgggccccagccccagccccatcctcagccccatccttcacaagcgtttgggcctcagcccccacagcagccccttccactccagcatccacatctcttcccaccccaggccccaggactcctacccccacaatccccctacccctatgcccctcagcctggggtcctggggcagccgccaccccccctacacacccagctctacccaggtcccgctcaagaccctctgccagcccactcaggggctctgcctttccccagccctgggccccctcagcctccccatcccccactggcatatggtcctgccccttctaccagacccatgggcccccaggcagcccctcttaccattcgagggccctcgtctgctggccagtccacccctagtccccacctggtgccttcacctgccccatctccagggcctggtccggtaccccctcgccccccagcagcagaaccacccccttgcctgcgccgaggcgccgcagctgcagacctgctctcctccagcccggagagccagcatggcggcactcagtctcctgggggtgggcagcccctgctgcagcccaccaaggtggatgcagctgagggtcgtcggccgcaggccctgcggctgattgagcgggacccctatgagcatcctgagaggctgcggcagttgcagcaggagctggaggcctttcggggtcagctgggggatgtgggagctctggacactgtctggcgagagctgcaagatgcgcaggaacatgatgcccgaggccgttccatcgccattgcccgctgctactcactgaagaaccggcaccaggatgtcatgccctatgacagtaaccgtgtggtgctgcgctcaggcaaggatgactacatcaatgccagctgcgtggaggggctctccccatactgccccccgctagtggcaacccaggccccactgcctggcacagctgctgacttctggctcatggtccatgagcagaaagtgtcagtcattgtcatgctggtttctgaggctgagatggagaagcaaaaagtggcacgctacttccccaccgagaggggccagcccatggtgcacggtgccctgagcctggcattgagcagcgtccgcagcaccgaaacccatgtggagcgcgtgctgagcctgcagttccgagaccagagcctcaagcgctctcttgtgcacctgcacttccccacttggcctgagttaggcctgcccgacagccccagcaacttgctgcgcttcatccaggaggtgcacgcacattacctgcatcagcggccgctgcacacgcccatcattgtgcactgcagctctggtgtgggccgcacgggagcctttgcactgctctatgcagctgtgcaggaggtggaggctgggaacggaatccctgagctgcctcagctggtgcggcgcatgcggcagcagagaaagcacatgctgcaggagaagctgcacctcaggttctgctatgaggcagtggtgagacacgtggagcaggtcctgcagcgccatggtgtgcctcctccatgcaaacccttggccagtgcaagcatcagccagaagaaccaccttcctcaggactcccaggacctggtcctcggtggggatgtgcccatcagctccatccaggccaccattgccaagctcagcattcggcctcctggggggttggagtccccggttgccagcttgccaggccctgcagagcccccaggcctcccgccagccagcctcccagagtctaccccaatcccatcttcctccccgccccccctttcctccccactacctgaggctccccagcctaaggaggagccgccagtgcctgaagcccccagctcggggcccccctcctcctccctggaattgctggcctccttgaccccagaggccttctccctggacagctccctgcggggcaaacagcggatgagcaagcataactttctgcaggcccataacgggcaagggctgcgggccacccggccctctgacgaccccctcagccttctggatccactctggacactcaacaagacctgaacaggttttgcctacctggtccttacactacatcatcatcatctcatgcccacctgcccacacccagcagagcttctcagtgggcacagtctcttactcccatttctgctgcctttggccctgcctggcccagcctgcacccctgtggggtggaaatgtactgcaggctctgggtcaggttctgctcctttatgggacccgacatttttcagctctttgctattgaaataataaaccaccctgttctgtggcccgt

SEQ ID NO: 171672 - DNA, 592 bp, Homo sapiens
  Payload ID: 13748
  Gene Symbol: PTPN23
  Gene Name: protein tyrosine phosphatase, non-receptor type 23
  ENST ID: ENST00000456221
  CDS Start-End: 84-592
aaggggcggggctgggctcgtggctgagccagcagctgcagcagctacgggagtggccgggtggccggcgggtgccagccgccatggaggccgtgccccgcatgcccatgatctggctggacctgaaggaggccggtgactttcacttccagccagctgtgaagaagaatgctgtccgtgtcccacgagactttgagggctgtagtgtcctccgcaagtacctcggccagcttcattacctgcagagtcgggtccccatgggctcgggccaggaggccgctgtccctgtcacctggacagagatcttctcaggcaagtctgtggcccatgaggacatcaagtacgagcaggcctgtattctctacaaccttggagcgctgcactccatgctgggggccatggacaagcgggtgtctgaggagtgcgcagccggcgccttcgcctacctacgggagcacttccctcaagcctacagcgtcgacatgagccgccagatccttacgctcaacgtcaacctcatgctgggccaggctcaggagtgcctcctggagaagtcgatgttggacaacaggaagagctttctggtggcccg

SEQ ID NO: 171673 - DNA, 5119 bp, Homo sapiens
  Payload ID: 13748
  Gene Symbol: PTPN23
  Gene Name: protein tyrosine phosphatase, non-receptor type 23
  ENST ID: ENST00000602307
  CDS Start-End: 87-281
acgaaggggcggggctgggctcgtggctgagccagcagctgcagcagctacgggagtggccgggtggccggcgggtgccagccgccatggaggccgtgccccgcatgcccatgatctggctggacctgaaggaggccggtgactttcacttccagccagctgtgaagaagtttgtcctgaagaattatggagagaacccagaagcctacaatgaagaactgaagaagctggagttgctcagacaggacagagatcttctcaggcaagtctgtggcccatgaggacatcaagtacgagcaggcctgtattctctacaaccttggagcgctgcactccatgctgggggccatggacaagcgggtgtctgaggagggcatgaaggtctcctgtacccatttccagtgcgcagccggcgccttcgcctacctacgggagcacttccctcaagcctacagcgtcgacatgagccgccagatccttacgctcaacgtcaacctcatgctgggccaggctcaggagtgcctcctggagaagtcgatgttggacaacaggaagagctttctggtggcccgcatcagtgcacaggtggtagattactacaaggaggcatgccgggccttggagaaccccgacactgcctcactgctgggccggatccagaaggactggaagaaacttgtgcagatgaagatctactacttcgcagccgtggctcatctgcacatgggaaagcaggccgaggagcagcagaagttcggggagcgggttgcatacttccagagcgccctggacaagctcaatgaagccatcaagttggccaagggccagcctgacactgtgcaagacgcgcttcgcttcactatggatgtcattgggggaaagtacaattctgccaagaaggacaacgacttcatttaccatgaggctgtcccagcattggacactcttcagcctgtaaaaggagcccccttggtgaagcccttgccagtgaaccccacagacccagctgttacaggccctgacatctttgccaaactggtacccatggctgcccacgaggcctcgtcactgtacagtgaggagaaggccaagctgctccgggagatgatggccaagattgaggacaagaatgaggtcctggaccagttcatggattcaatgcagttggatcccgagacggtggacaaccttgatgcctacagccacatcccaccccagctcatggagaagtgcgcggctctcagcgtccggcccgacactgtcaggaaccttgtacagtccatgcaagtgctgtcaggtgtgttcacggatgtggaggcttccctgaaggacatcagagatctgttggaggaggatgagctgctagagcagaagtttcaggaggcggtgggccaggcaggggccatctccatcacctccaaggctgagctggcagaggtgaggcgagaatgggccaagtacatggaagtccatgagaaggcctccttcaccaacagtgagctgcaccgtgccatgaacctgcacgtcggcaacctgcgcctgctcagcgggccgcttgaccaggtccgggctgccctgcccacaccggccctctccccagaggacaaggccgtgctgcaaaacctaaagcgcatcctggctaaggtgcaggagatgcgggaccagcgcgtgtccctggagcagcagctgcgtgagcttatccagaaagatgacatcactgcctcgctggtcaccacagaccactcagagatgaagaagttgttcgaggagcagctgaaaaagtatgaccagctgaaggtgtacctggagcagaacctggccgcccaggaccgtgtcctctgtgcactgacagaggccaacgtgcagtacgcagccgtgcggcgggtactcagcgacttggaccaaaagtggaactccacgctgcagaccctggtggcctcgtatgaagcctatgaggacctgatgaagaagtcgcaggagggcagggacttctacgcagatctggagagcaaggtggctgctctgctggagcgcacgcagtccacctgccaggcccgcgaggctgcccgccagcagctcctggacagggagctgaagaagaagccgccgccacggcccacagccccaaagccgctgctgccccgcagggaggagagtgaggcagtggaagcaggagacccccctgaggagctgcgcagcctcccccctgacatggtggctggcccacgactgcctgacaccttcctgggaagtgccaccccgctccactttcctcccagccccttccccagctccacaggcccaggaccccactatctctcaggccccttgccccctggtacctactcgggccccacccagctgatacagcccagggccccagggccccatgcaatgcccgtagcacctgggcctgccctctacccagcccctgcctacacaccggagctgggccttgtgccccgatcctccccacagcatggcgtggtgagcagtccctatgtgggggtagggccggccccaccagttgcaggtctcccctcggccccacctcctcaattctcaggccccgagttggccatggcggttcggccagccaccaccacagtagatagcatccaggcgcccatccccagccacacagccccacggccaaaccccacccctgctcctcccccgccctgcttccctgtgcccccaccgcagccactgcccacgccttacacctaccctgcaggggctaagcaacccatcccggcacagcaccacttctcttctgggatccccgcaggttttccagccccaaggattgggccccagccccagccccatcctcagccccatccttcacaagcgtttgggcctcagcccccacagcagccccttccactccagcatccacatctcttcccaccccaggccccaggactcctacccccacaatccccctacccctatgcccctcagcctggggtcctggggcagccgccaccccccctacacacccagctctacccaggtcccgctcaagaccctctgccagcccactcaggggctctgcctttccccagccctgggccccctcagcctccccatcccccactggcatatggtcctgccccttctaccagacccatgggcccccaggcagcccctcttaccattcgagggccctcgtctgctggccagtccacccctagtccccacctggtgccttcacctgccccatctccagggcctggtccggtaccccctcgccccccagcagcagaaccacccccttgcctgcgccgaggcgccgcagctgcagacctgctctcctccagcccggagagccagcatggcggcactcagtctcctgggggtgggcagcccctgctgcagcccaccaaggtggatgcagctgagggtcgtcggccgcaggccctgcggctgattgagcgggacccctatgagcatcctgagaggctgcggcagttgcagcaggagctggaggcctttcggggtcagctgggggatgtgggagctctggacactgtctggcgagagctgcaagatgcgcaggaacatgatgcccgaggccgttccatcgccattgcccgctgctactcactgaagaaccggcaccaggatgtcatgccctatgacagtaaccgtgtggtgctgcgctcaggcaaggatgactacatcaatgccagctgcgtggaggggctctccccatactgccccccgctagtggcaacccaggccccactgcctggcacagctgctgacttctggctcatggtccatgagcagaaagtgtcagtcattgtcatgctggtttctgaggctgagatggagaagcaaaaagtggcacgctacttccccaccgagaggggccagcccatggtgcacggtgccctgagcctggcattgagcagcgtccgcagcaccgaaacccatgtggagcgcgtgctgagcctgcagttccgagaccagagcctcaagcgctctcttgtgcacctgcacttccccacttggcctgagttaggcctgcccgacagccccagcaacttgctgcgcttcatccaggaggtgcacgcacattacctgcatcagcggccgctgcacacgcccatcattgtgcactgcagctctggtgtgggccgcacgggagcctttgcactgctctatgcagctgtgcaggaggtggaggctgggaacggaatccctgagctgcctcagctggtgcggcgcatgcggcagcagagaaagcacatgctgcaggagaagctgcacctcaggttctgctatgaggcagtggtgagacacgtggagcaggtcctgcagcgccatggtgtgcctcctccatgcaaacccttggccagtgcaagcatcagccagaagaaccaccttcctcaggactcccaggacctggtcctcggtggggatgtgcccatcagctccatccaggccaccattgccaagctcagcattcggcctcctggggggttggagtccccggttgccagcttgccaggccctgcagagcccccaggcctcccgccagccagcctcccagagtctaccccaatcccatcttcctccccgccccccctttcctccccactacctgaggctccccagcctaaggaggagccgccagtgcctgaagcccccagctcggggcccccctcctcctccctggaattgctggcctccttgaccccagaggccttctccctggacagctccctgcggggcaaacagcggatgagcaagcataactttctgcaggcccataacgggcaagggctgcgggccacccggccctctgacgaccccctcagccttctggatccactctggacactcaacaagacctgaacaggttttgcctacctggtccttacactacatcatcatcatctcatgcccacctgcccacacccagcagagcttctcagtgggcacagtctcttactcccatttctgctgcctttggccctgcctggcccagcctgcacccctgtggggtggaaatgtactgcaggctctgggtcaggttctgctcctttatgggacccgacatttttcagctctttgctattgaaataataaaccaccctgttctgtg

SEQ ID NO: 171674 - DNA, 6832 bp, Homo sapiens
  Payload ID: 13749
  Gene Symbol: PTPN3
  Gene Name: protein tyrosine phosphatase, non-receptor type 3
  ENST ID: ENST00000262539
  CDS Start-End: 113-2632
atgctcagacggcggccaggtcgcgccgcgagcgagcttccgcgccgcccgcacgcgcgacctacctgggcgctccgcgcccccggatgctgcaggttattcagcgatagttatgacctcccggttacgtgcgttgggtggaagaattaataatatacgcacctcggagttacccaaagagaaaactcgatcagaagtcatttgcagcatccactttttagatggcgtggtacagacctttaaagttactaaacaagacactggccaggttcttctggatatggtgcacaaccacctgggtgtgactgaaaaggaatattttggtttacagcatgatgacgactccgtggactctcctagatggctggaagcaagcaaagccatcaggaagcagttaaaaggaggtttcccctgtaccctgcattttcgagtaagattttttatacctgatcccaacacactgcagcaagaacaaaccaggcacttgtatttcttacaactgaagatggatatttgcgaaggaaggttaacctgccctcttaactcagcagtggttctagcgtcctatgccgtacaatctcattttggagactataattcttccatacatcatccaggctatctttccgatagtcactttatacccgatcaaaatgaggactttttaacaaaagtcgaatctctgcatgagcagcacagtgggctaaaacaatcagaagcagaatcctgctatatcaacatagcgcggaccctcgacttctatggagtagaactgcacagtggtagggatctgcacaatttagacctaatgattggaattgcttccgcgggtgttgctgtgtaccgaaaatacatttgcacaagtttctatccttgggtgaacattctcaaaatttctttcaaaaggaaaaagttcttcatacatcagcgacagaaacaggctgaatccagggaacatattgtggccttcaacatgctgaattaccgatcttgcaaaaacttgtggaaatcctgtgttgagcaccatacgttctttcaggcaaagaagctactacctcaggaaaagaatgttctgtctcagtactggactatgggctctcggaacaccaaaaagtcggtaaataaccaatattgcaaaaaggtgattggcgggatggtgtggaacccagccatgcggagatccttatcagtggagcacttagaaaccaagagtctgccttctcgttcccctcccattactcccaactggcgaagtcctcggctccggcacgaaatccgaaagccacgccactcttctgcagataaccttgcaaatgaaatgacctacatcacggaaacggaagatgtattttacacgtacaagggctctctggcccctcaagacagcgattctgaagtttctcagaaccgaagcccgcaccaagagagtttatccgagaacaatccggcacaaagctacctgacccagaagtcatccagttctgtgtctccatcttcaaatgctccaggctcctgctcacctgacggcgttgatcagcagctcttagatgacttccacagggtgaccaaagggggctccaccgaggacgccagccagtactactgtgacaagaatgataatggtgacagctacttagtcttgatccgtatcacaccagatgaagatggaaaatttggatttaatcttaagggaggagtggatcaaaagatgcctcttgtggtatcaaggataaacccagagtcacctgcggacacctgcattcctaagctgaacgaaggggatcaaatcgtgttaatcaatggccgggacatctcagaacacacgcatgaccaagtggtgatgttcatcaaagccagccgggagtcccactcacgggagctggccctggtgatcaggaggagagctgtccgctcatttgctgacttcaagtctgaagatgaactgaaccagcttttccccgaagccattttccccatgtgtccggagggtggggacactttggagggatccatggcacagctaaagaagggcctcgaaagcgggacggtgctgatccagtttgagcaactctacagaaaaaagccaggtttggccatcacgtttgcaaagctgcctcaaaatttggacaaaaaccgatataaagatgtgctgccttatgacaccacccgggtattattgcagggaaatgaagattatattaatgcaagttacgtgaacatggaaattcctgctgctaaccttgtgaacaagtacatcgccactcaggggcccctgccgcatacctgtgcacagttttggcaggttgtctgggatcagaagttgtcactcattgtcatgttgacgactctcacagaacgagggcggaccaaatgtcaccagtactggccagatccccccgacgtcatgaaccacggcggctttcacatccagtgtcagtcagaggactgcaccatcgcctatgtgtcccgagaaatgctggtcacaaacacccaggtgagccgcagcctgaggggcacggtggaggggcaggtgctgaatcagcggccactgtcatcccaggtggtcacgcttctaggtgtgcactctgtttgcacctggcaagcgtgtcaaccggggaagaacacacagtgacacatctccagtacgtcgcatggcctgaccacggtgtgcccgatgactcctccgactttctggaatttgtaaactatgtgaggtctctgagagtggacagcgagcccgtcctagttcactgcagtgctggaataggtcgaaccggtgtgttggtcactatggaaacagccatgtgcctaactgagaggaacctgcccatttacccactggatattgtccgaaaaatgcgagaccagcgcgccatgatggtgcagacatcaagccagtacaagtttgtgtgtgaagcgattcttcgtgtgtatgaagaaggtttagtccaaatgctggatcctagttaagacaactgtgaaaaagttcattcctctttcccaagggcatcctccttgaaagaggaggacagacctctctggaagcagcaagaggaaccagtagctgtgggaaaggaatgggcacctctgaacccaggcactttaaacttctatagaaaagatatcgtgtacataggaactggtgtagataagcatgcaattatggcatcatttaggcctgtatttctatggaaagatacaaaaaggatctcagtttggggcctgtcctaatgccttcttccctaacatcaccacacacacccctgtcggcatcctggagcaattgagaccggacacccacagagctgttgtcctcccagcaacaagatggtgtggttatcttgggtcatttggatgttttgtttgtttctgtgtgtcagactgtaagggctgagctttctgtgcttctaggtggagctggaacaattcagattcacccgccctgatgctaaggaaaccctgacgtatgtactagatggcagggcactgggggtcaggctgaaggctgagcaacacctctctgccctccctccctttgtcccatctcccagcgacttccaatattcatgtttctgagaattgtgtccctcttcaggttccctcttggtgcctaacctggattagtaatgtgcattcaggtgaattttcagctgaggctctgagaactggtactctcagtgtgttctggtcatcttgtggcttagttgtagaagcaggtgtgtctcttgcctctgcttgcctcctactgcacactcagcacccaggactggaatcaccgactactgaatctcctacatgtattgctgctacttcaagctcctccacttgaaaccttatgattttcccaaggggagatgggacagtgtcatctaaatattccgaatgtttggccttctgagaaaagagcttctagtaattgaaccatgggaaacccagcttctggagggttggccgtggggctgtgtacatgtgtgtgcccaggggtgagtgtttctcaggattcctaacgattcaaattaccgttgagtatatataaagaatgagtctctgtatggaagaacaaatgtgtgcattcacccccagtcacaatggtctccattgcatttcaaaggagaggatcagactatctgaatataaacacaatctgatgttaatttattctaagaacaccatcattttgattgtcctaaagaattctgcctttgtgaataccgtgttaaatttttttaaatttgtgacaggattgtagcaaattattatttaaggaaaataaattgtgtaaacatttaatgtggtatttttgaacagcggtttttatgtactcagaagaggaagtaaagccaggttcttaatggtatttatagaaaagatgttttcatattataatgcacataaatgaagccattttgatattcagcaaattcggtgccaattgaatagtttgctggtagcaagacggatgaagacctatatgggagattctttatctctagagctagcatatttacttgcatactttgtttcttttccacatggatattttactgctaaatggcagaggtgggagggagatgtcacacagtaccataaccccatattgaaaacaagaaaccaccagaaagtttgcagctaaggggcaggggattcagttcctacgcccactcagcactaactacttgcgggcctggttgcttagaagctctacctctctttcattatctgtaaaatagaaacaatacttaggactttagttggaacatgaggattgaataagatcacgctattcatgtgactttttatcggctagaacagcaacagacactgctgtgggtgagttacttagaaaagtttagttatcagtgattagcccaaaaacacatcagtcaaaaatagaatccactggatttttgtctctctttttagagacagggtctcactgtcgcccaggctggagtacagtggcatgatcattgttcactgcagcctcaaattcctgggctcaagcaatcctcgcacctcagcctcctgagtagccgggactataggcacatgccacctcacctggcttgtgtgtgtgtgtgtgtgtgtgtgtgtgtgtgtgtgtgtgtgtgtgtgtgtgtgtgtgtgtgtagagacaggatcttgatgtgttgcctaggctggtctcaaactcctggcctcaagtgatcttcccacctcagcctccaaaactgttgggattataggcgtgagccactgtgcccagcctaactgggtttttatgagaggaaaatagaaaatgctcttctagaagagagagaacaagagcacaaaataatctggactcacaaaaattcagcaagctccaagaaagggggatggagggaacgctggcaaaaatttaaatgccattaggatatttagcaagttattactgtttggtaaaaatgcatcatcaccctgtgtgcaaaatgcttgcaaagtagtctaaatgtctttggagatgggtgttttactgcttttttccaaaaacaaattgtttattatggttgcagaaatgcagccattacggtcacataaatttctaaaaagcctaccaaaggttgcaagcagtcttctgccactgggcaggccagcagttcagacccagcgaggttgccaggaacaaatccaggaaatactgggaagaacaagacaagagaattacctaaaagagcaaacaattcaagtaaatcctgtagctattaccacttaaaatccgtagctcaagattcctgtttcaccaccttatacacttaagcaattatacttaagcctttttttagtcctaagtgaagaactacatcagaatcaggataagtattttgcctgggaaatttggctgcatatgaatggagaagacatttacatcctatgttctggcactttctgaaagatctaattaaacatgttgatgtgccaatttaatcaagatgagagatccctgctggtgtcaccctctagaacctgcacttggtgttttgactttccagaagaaaaaaatgcaactttggttagggggcagtggttggatcacacagttgtctttcgtttcctaccacagtaattcatatttaaatatgcttttagattagtgtggatactattgctgctgtgttgctacctgacctttttctggggggggtacctcagaaatgagcatttgagggcaagcgaaaaagccctcttcatcctccagaggcaacaaagaggcagcagaaatggggaaagattgtgagaggcagggcttgggtctagacctggacttaggcaagatatgttgccctcaaccctgagttttcttatatgtaaaaagggaaggttgggctggactagatgaggtcaagatttgccattctgggaggctgatattccagagaatcaaaattaatcctaaaccaaagctttatggctgctacagagacatgtcacatttctgagacttgtcaccaagagtttgtccctcagactttggcgctgttgaatgcaaagacaaggatggccaccttctggttcttgcctgttgtcctcagctgagagcagtctcggtaaaggtggcaaagattctgtgacctcagaccggggaccaaatgcttgggagtctgatggccgggctgggccaccattctcatagctctcattctgtttggagcaaccaaaggatttgtgtgaagttatttggaaaaggaccttaactgagcagtaatcttttttctgtatatttggaatgtttttcattctgacctgttctgtcagtgattctactgaaaaacaatttaatcaatataaaaatgttcaagctatgcaacactgt

SEQ ID NO: 171675 - DNA, 6703 bp, Homo sapiens
  Payload ID: 13749
  Gene Symbol: PTPN3
  Gene Name: protein tyrosine phosphatase, non-receptor type 3
  Uniprot ID: P26045
  ENST ID: ENST00000374541
  CDS Start-End: 106-2847
gacggcggccaggtcgcgccgcgagcgagcttccgcgccgcccgcacgcgcgacctacctgggcgctccgcgcccccggatgctgcaggttattcagcgatagttatgacctcccggttacgtgcgttgggtggaagaattaataatatacgcacctcggagttacccaaagagaaaactcgatcagaagtcatttgcagcatccactttttagatggcgtggtacagacctttaaagttactaaacaagacactggccaggttcttctggatatggtgcacaaccacctgggtgtgactgaaaaggaatattttggtttacagcatgatgacgactccgtggactctcctagatggctggaagcaagcaaagccatcaggaagcagttaaaaggaggtttcccctgtaccctgcattttcgagtaagattttttatacctgatcccaacacactgcagcaagaacaaaccaggcacttgtatttcttacaactgaagatggatatttgcgaaggaaggttaacctgccctcttaactcagcagtggttctagcgtcctatgccgtacaatctcattttggagactataattcttccatacatcatccaggctatctttccgatagtcactttatacccgatcaaaatgaggactttttaacaaaagtcgaatctctgcatgagcagcacagtgggctaaaacaatcagaagcagaatcctgctatatcaacatagcgcggaccctcgacttctatggagtagaactgcacagtggtagggatctgcacaatttagacctaatgattggaattgcttccgcgggtgttgctgtgtaccgaaaatacatttgcacaagtttctatccttgggtgaacattctcaaaatttctttcaaaaggaaaaagttcttcatacatcagcgacagaaacaggctgaatccagggaacatattgtggccttcaacatgctgaattaccgatcttgcaaaaacttgtggaaatcctgtgttgagcaccatacgttctttcaggcaaagaagctactacctcaggaaaagaatgttctgtctcagtactggactatgggctctcggaacaccaaaaagtcggtaaataaccaatattgcaaaaaggtgattggcgggatggtgtggaacccagccatgcggagatccttatcagtggagcacttagaaaccaagagtctgccttctcgttcccctcccattactcccaactggcgaagtcctcggctccggcacgaaatccgaaagccacgccactcttctgcagataaccttgcaaatgaaatgacctacatcacggaaacggaagatgtattttacacgtacaagggctctctggcccctcaagacagcgattctgaagtttctcagaaccgaagcccgcaccaagagagtttatccgagaacaatccggcacaaagctacctgacccagaagtcatccagttctgtgtctccatcttcaaatgctccaggctcctgctcacctgacggcgttgatcagcagctcttagatgacttccacagggtgaccaaagggggctccaccgaggacgccagccagtactactgtgacaagaatgataatggtgacagctacttagtcttgatccgtatcacaccagatgaagatggaaaatttggatttaatcttaagggaggagtggatcaaaagatgcctcttgtggtatcaaggataaacccagagtcacctgcggacacctgcattcctaagctgaacgaaggggatcaaatcgtgttaatcaatggccgggacatctcagaacacacgcatgaccaagtggtgatgttcatcaaagccagccgggagtcccactcacgggagctggccctggtgatcaggaggagagctgtccgctcatttgctgacttcaagtctgaagatgaactgaaccagcttttccccgaagccattttccccatgtgtccggagggtggggacactttggagggatccatggcacagctaaagaagggcctcgaaagcgggacggtgctgatccagtttgagcaactctacagaaaaaagccaggtttggccatcacgtttgcaaagctgcctcaaaatttggacaaaaaccgatataaagatgtgctgccttatgacaccacccgggtattattgcagggaaatgaagattatattaatgcaagttacgtgaacatggaaattcctgctgctaaccttgtgaacaagtacatcgccactcaggggcccctgccgcatacctgtgcacagttttggcaggttgtctgggatcagaagttgtcactcattgtcatgttgacgactctcacagaacgagggcggaccaaatgtcaccagtactggccagatccccccgacgtcatgaaccacggcggctttcacatccagtgtcagtcagaggactgcaccatcgcctatgtgtcccgagaaatgctggtcacaaacacccagaccggggaagaacacacagtgacacatctccagtacgtcgcatggcctgaccacggtgtgcccgatgactcctccgactttctggaatttgtaaactatgtgaggtctctgagagtggacagcgagcccgtcctagttcactgcagtgctggaataggtcgaaccggtgtgttggtcactatggaaacagccatgtgcctaactgagaggaacctgcccatttacccactggatattgtccgaaaaatgcgagaccagcgcgccatgatggtgcagacatcaagccagtacaagtttgtgtgtgaagcgattcttcgtgtgtatgaagaaggtttagtccaaatgctggatcctagttaagacaactgtgaaaaagttcattcctctttcccaagggcatcctccttgaaagaggaggacagacctctctggaagcagcaagaggaaccagtagctgtgggaaaggaatgggcacctctgaacccaggcactttaaacttctatagaaaagatatcgtgtacataggaactggtgtagataagcatgcaattatggcatcatttaggcctgtatttctatggaaagatacaaaaaggatctcagtttggggcctgtcctaatgccttcttccctaacatcaccacacacacccctgtcggcatcctggagcaattgagaccggacacccacagagctgttgtcctcccagcaacaagatggtgtggttatcttgggtcatttggatgttttgtttgtttctgtgtgtcagactgtaagggctgagctttctgtgcttctaggtggagctggaacaattcagattcacccgccctgatgctaaggaaaccctgacgtatgtactagatggcagggcactgggggtcaggctgaaggctgagcaacacctctctgccctccctccctttgtcccatctcccagcgacttccaatattcatgtttctgagaattgtgtccctcttcaggttccctcttggtgcctaacctggattagtaatgtgcattcaggtgaattttcagctgaggctctgagaactggtactctcagtgtgttctggtcatcttgtggcttagttgtagaagcaggtgtgtctcttgcctctgcttgcctcctactgcacactcagcacccaggactggaatcaccgactactgaatctcctacatgtattgctgctacttcaagctcctccacttgaaaccttatgattttcccaaggggagatgggacagtgtcatctaaatattccgaatgtttggccttctgagaaaagagcttctagtaattgaaccatgggaaacccagcttctggagggttggccgtggggctgtgtacatgtgtgtgcccaggggtgagtgtttctcaggattcctaacgattcaaattaccgttgagtatatataaagaatgagtctctgtatggaagaacaaatgtgtgcattcacccccagtcacaatggtctccattgcatttcaaaggagaggatcagactatctgaatataaacacaatctgatgttaatttattctaagaacaccatcattttgattgtcctaaagaattctgcctttgtgaataccgtgttaaatttttttaaatttgtgacaggattgtagcaaattattatttaaggaaaataaattgtgtaaacatttaatgtggtatttttgaacagcggtttttatgtactcagaagaggaagtaaagccaggttcttaatggtatttatagaaaagatgttttcatattataatgcacataaatgaagccattttgatattcagcaaattcggtgccaattgaatagtttgctggtagcaagacggatgaagacctatatgggagattctttatctctagagctagcatatttacttgcatactttgtttcttttccacatggatattttactgctaaatggcagaggtgggagggagatgtcacacagtaccataaccccatattgaaaacaagaaaccaccagaaagtttgcagctaaggggcaggggattcagttcctacgcccactcagcactaactacttgcgggcctggttgcttagaagctctacctctctttcattatctgtaaaatagaaacaatacttaggactttagttggaacatgaggattgaataagatcacgctattcatgtgactttttatcggctagaacagcaacagacactgctgtgggtgagttacttagaaaagtttagttatcagtgattagcccaaaaacacatcagtcaaaaatagaatccactggatttttgtctctctttttagagacagggtctcactgtcgcccaggctggagtacagtggcatgatcattgttcactgcagcctcaaattcctgggctcaagcaatcctcgcacctcagcctcctgagtagccgggactataggcacatgccacctcacctggcttgtgtgtgtgtgtgtgtgtgtgtgtgtgtgtgtgtgtgtgtgtgtgtgtgtgtgtgtgtgtgtagagacaggatcttgatgtgttgcctaggctggtctcaaactcctggcctcaagtgatcttcccacctcagcctccaaaactgttgggattataggcgtgagccactgtgcccagcctaactgggtttttatgagaggaaaatagaaaatgctcttctagaagagagagaacaagagcacaaaataatctggactcacaaaaattcagcaagctccaagaaagggggatggagggaacgctggcaaaaatttaaatgccattaggatatttagcaagttattactgtttggtaaaaatgcatcatcaccctgtgtgcaaaatgcttgcaaagtagtctaaatgtctttggagatgggtgttttactgcttttttccaaaaacaaattgtttattatggttgcagaaatgcagccattacggtcacataaatttctaaaaagcctaccaaaggttgcaagcagtcttctgccactgggcaggccagcagttcagacccagcgaggttgccaggaacaaatccaggaaatactgggaagaacaagacaagagaattacctaaaagagcaaacaattcaagtaaatcctgtagctattaccacttaaaatccgtagctcaagattcctgtttcaccaccttatacacttaagcaattatacttaagcctttttttagtcctaagtgaagaactacatcagaatcaggataagtattttgcctgggaaatttggctgcatatgaatggagaagacatttacatcctatgttctggcactttctgaaagatctaattaaacatgttgatgtgccaatttaatcaagatgagagatccctgctggtgtcaccctctagaacctgcacttggtgttttgactttccagaagaaaaaaatgcaactttggttagggggcagtggttggatcacacagttgtctttcgtttcctaccacagtaattcatatttaaatatgcttttagattagtgtggatactattgctgctgtgttgctacctgacctttttctggggggggtacctcagaaatgagcatttgagggcaagcgaaaaagccctcttcatcctccagaggcaacaaagaggcagcagaaatggggaaagattgtgagaggcagggcttgggtctagacctggacttaggcaagatatgttgccctcaaccctgagttttcttatatgtaaaaagggaaggttgggctggactagatgaggtcaagatttgccattctgggaggctgatattccagagaatcaaaattaatcctaaaccaaagctttatggctgctacagagacatgtcacatttctgagacttgtcaccaagagtttgtccctcagactttggcgctgttgaatgcaaagacaaggatggccaccttctggttcttgcctgttgtcctcagctgagagcagtctcggtaaaggtggcaaagattctgtgacctcagaccggggaccaaatgcttgggagtctgatggccgggctgggccaccattctcatagctctcattctgtttggagcaaccaaaggatttgtgtgaagttatttggaaaaggaccttaactgagcagtaatcttttttctgtatatttggaatgtttttcattctgacctgttctgtcagtgattctactgaaaaacaatttaatcaatataaaaatgttcaagctatgcaa

SEQ ID NO: 171676 - DNA, 8630 bp, Homo sapiens
  Payload ID: 13749
  Gene Symbol: PTPN3
  Gene Name: protein tyrosine phosphatase, non-receptor type 3
  Uniprot ID: P26045
  ENST ID: ENST00000446349
  CDS Start-End: 2555-4768
gaagggtggtatcccgttgtggagtagaatgtaactatgaccttctgggatttgggcaccagatttatcttactgcaacaggagccatggtgggagccacccccataactcttatagagctggtgggccaccaggactgccagatatatatatatattttttgaaacagggtcttgctatgttgcccagactggcctcaaactcctggactcaaaggatcctccctcagcctcctgagtagctgggattataggcacataccaccacgactagctgccagatcatcttatcttggaccaggcttctaccattaattcacatgctttaaaaaaattaaaaattaaaaaaatgaaaaataaaaaaacttaaaagattttacctatattcctggaacatagttatcttaccccagctttgtagttcctgtttaaggaaattccctctgaaggaaattttagctctcaagagtcaaagaagatgtatagaggtggtatctgttagtttttgtttgtttgttaaggatctaggcagagaggtcattacatttttctgaagttgaggtcacaggtggggtacccacaagagaggtcattacatttctgaagttaggcatcccaggcatctcttctaaagaactatcctgtattctaattgttaaataaatatcttcttcattgtgagcctccacaactgctgtttctgataaatttagatcattctttgcagaattttatatactggcaatctcaaaactaggctccttcaagattcctaggaagtctcccaagctcgggttgggttccactattctagtttctttgtgtatgatgccatggggttgactcagaaactttgctcaatatatgacaaggcagcatttggtgagtggtgatctccacgtttatcttctcatttatatccctaggaagacatactgattagctgagcttgtcaatgaaagcccgggttcaccattggattatctataactctcctttctctttttttctctcagtagcattgtaggaggagagaacacttaattctggttgaatgtcagcttggataaacatagaaacaaactagaaagaactgatgatgttctcctaggtggaaaagatggagattccaataccaaataggtgtgaatcagcaaatgtatgttatactgtctctcaaggccaggtgttcaatacattgtgggtagttaattataatcaaagtaataatattagagttacgacatggatcctaagctttttagccattaaacatataagaaatttgtagcatagtgagtttttttataacatgatcatccaggttaaaataagacacaattgacctcacatatcctatctgagctccgattttgtcatctgtaaaaatggagatagtggtacctaccttacagagttatgaggctgagataagagggaaagttacaaagtagtaccatgtacaaagcccggaactgtgcaaataggaggttgtaatactgtttgaagcattcccatctcaaaaagccagttccttggcctttataaatttgaaggaataatgaaactgatttgtttcaattgtgaaaattatttctctcctgcccctgtgcacttctgccctgtctatattagatttcaagaggtttcccttttgtcatcttggccagacaatggaatgtctatcccgtttgaatctgggtttaaaaaagcatgggagctagtggccaagtgtcacatgtatgccgcatccctaaatagaagtctccccagggcgcttcctgacctgcgcaatgctgccgaaggcctcctttccccgctccccaggcagaggagcaaagtcacaggctgaggggcctgccacgacttgcccacaaaacaggtctggagtttggaagttacatttgctggttgcccagagatgagtgcagaattcagcttggaggtcctggaaacttctagtttactgatgtttatgcttttgctcatgcacccacagttcctgggacacagaatgctcacctgggggtttgtaccccagccaagaaggtgtcttcacagactcccctccttttagcaacttcatgcagatggagcttgggtggatggatcctggcacagtgttcagaacagtggccctgccagtgtgtgggcgccgcttgtgcagagcccctgtgggttctggtcctcaagggcaggggcgctcactgacagcggaacccatagtaccagcccatctttggtgggctgtttccaccccattcatccctgctcagctcttcataggacagcctgtgctggcagaaaattgcccccaccagtcaagacgtagggcatcaacatgagccatcagtaatgacagggcagctttgcagagcgtaaggtagcacctgataccttggaccaaaaccgtatttttatgtatctttcacatgtacagctcttgtctttgactcatcaaactttcttttttttttttttttgcttatttcagtttgagtatgaattaatgaaaacaattgtttcataggcacttgtatttcttacaactgaagatggatatttgcgaaggaaggttaacctgccctcttaactcagcagtggttctagcgtcctatgccgtacaatctcattttggagactataattcttccatacatcatccaggctatctttccgatagtcactttatacccgatcaaaatgaggactttttaacaaaagtcgaatctctgcatgagcagcacagtgggctaaaacaatcagaagcagaatcctgctatatcaacatagcgcggaccctcgacttctatggagtagaactgcacagtggtagggatctgcacaatttagacctaatgattggaattgcttccgcgggtgttgctgtgtaccgaaaatacatttgcacaagtttctatccttgggtgaacattctcaaaatttctttcaaaaggaaaaagttcttcatacatcagcgacagaaacaggctgaatccagggaacatattgtggccttcaacatgctgaattaccgatcttgcaaaaacttgtggaaatcctgtgttgagcaccatacgttctttcaggcaaagaagctactacctcaggaaaagaatgttctgtctcagtactggactatgggctctcggaacaccaaaaagcgaagtcctcggctccggcacgaaatccgaaagccacgccactcttctgcagataaccttgcaaatgaaatgacctacatcacggaaacggaagatgtattttacacgtacaagggctctctggcccctcaagacagcgattctgaagtttctcagaaccgaagcccgcaccaagagagtttatccgagaacaatccggcacaaagctacctgacccagaagtcatccagttctgtgtctccatcttcaaatgctccaggctcctgctcacctgacggcgttgatcagcagctcttagatgacttccacagggtgaccaaagggggctccaccgaggacgccagccagtactactgtgacaagaatgataatggtgacagctacttagtcttgatccgtatcacaccagatgaagatggaaaatttggatttaatcttaagggaggagtggatcaaaagatgcctcttgtggtatcaaggataaacccagagtcacctgcggacacctgcattcctaagctgaacgaaggggatcaaatcgtgttaatcaatggccgggacatctcagaacacacgcatgaccaagtggtgatgttcatcaaagccagccgggagtcccactcacgggagctggccctggtgatcaggaggagagctgtccgctcatttgctgacttcaagtctgaagatgaactgaaccagcttttccccgaagccattttccccatgtgtccggagggtggggacactttggagggatccatggcacagctaaagaagggcctcgaaagcgggacggtgctgatccagtttgagcaactctacagaaaaaagccaggtttggccatcacgtttgcaaagctgcctcaaaatttggacaaaaaccgatataaagatgtgctgccttatgacaccacccgggtattattgcagggaaatgaagattatattaatgcaagttacgtgaacatggaaattcctgctgctaaccttgtgaacaagtacatcgccactcaggggcccctgccgcatacctgtgcacagttttggcaggttgtctgggatcagaagttgtcactcattgtcatgttgacgactctcacagaacgagggcggaccaaatgtcaccagtactggccagatccccccgacgtcatgaaccacggcggctttcacatccagtgtcagtcagaggactgcaccatcgcctatgtgtcccgagaaatgctggtcacaaacacccagaccggggaagaacacacagtgacacatctccagtacgtcgcatggcctgaccacggtgtgcccgatgactcctccgactttctggaatttgtaaactatgtgaggtctctgagagtggacagcgagcccgtcctagttcactgcagtgctggaataggtcgaaccggtgtgttggtcactatggaaacagccatgtgcctaactgagaggaacctgcccatttacccactggatattgtccgaaaaatgcgagaccagcgcgccatgatggtgcagacatcaagccagtacaagtttgtgtgtgaagcgattcttcgtgtgtatgaagaaggtttagtccaaatgctggatcctagttaagacaactgtgaaaaagttcattcctctttcccaagggcatcctccttgaaagaggaggacagacctctctggaagcagcaagaggaaccagtagctgtgggaaaggaatgggcacctctgaacccaggcactttaaacttctatagaaaagatatcgtgtacataggaactggtgtagataagcatgcaattatggcatcatttaggcctgtatttctatggaaagatacaaaaaggatctcagtttggggcctgtcctaatgccttcttccctaacatcaccacacacacccctgtcggcatcctggagcaattgagaccggacacccacagagctgttgtcctcccagcaacaagatggtgtggttatcttgggtcatttggatgttttgtttgtttctgtgtgtcagactgtaagggctgagctttctgtgcttctaggtggagctggaacaattcagattcacccgccctgatgctaaggaaaccctgacgtatgtactagatggcagggcactgggggtcaggctgaaggctgagcaacacctctctgccctccctccctttgtcccatctcccagcgacttccaatattcatgtttctgagaattgtgtccctcttcaggttccctcttggtgcctaacctggattagtaatgtgcattcaggtgaattttcagctgaggctctgagaactggtactctcagtgtgttctggtcatcttgtggcttagttgtagaagcaggtgtgtctcttgcctctgcttgcctcctactgcacactcagcacccaggactggaatcaccgactactgaatctcctacatgtattgctgctacttcaagctcctccacttgaaaccttatgattttcccaaggggagatgggacagtgtcatctaaatattccgaatgtttggccttctgagaaaagagcttctagtaattgaaccatgggaaacccagcttctggagggttggccgtggggctgtgtacatgtgtgtgcccaggggtgagtgtttctcaggattcctaacgattcaaattaccgttgagtatatataaagaatgagtctctgtatggaagaacaaatgtgtgcattcacccccagtcacaatggtctccattgcatttcaaaggagaggatcagactatctgaatataaacacaatctgatgttaatttattctaagaacaccatcattttgattgtcctaaagaattctgcctttgtgaataccgtgttaaatttttttaaatttgtgacaggattgtagcaaattattatttaaggaaaataaattgtgtaaacatttaatgtggtatttttgaacagcggtttttatgtactcagaagaggaagtaaagccaggttcttaatggtatttatagaaaagatgttttcatattataatgcacataaatgaagccattttgatattcagcaaattcggtgccaattgaatagtttgctggtagcaagacggatgaagacctatatgggagattctttatctctagagctagcatatttacttgcatactttgtttcttttccacatggatattttactgctaaatggcagaggtgggagggagatgtcacacagtaccataaccccatattgaaaacaagaaaccaccagaaagtttgcagctaaggggcaggggattcagttcctacgcccactcagcactaactacttgcgggcctggttgcttagaagctctacctctctttcattatctgtaaaatagaaacaatacttaggactttagttggaacatgaggattgaataagatcacgctattcatgtgactttttatcggctagaacagcaacagacactgctgtgggtgagttacttagaaaagtttagttatcagtgattagcccaaaaacacatcagtcaaaaatagaatccactggatttttgtctctctttttagagacagggtctcactgtcgcccaggctggagtacagtggcatgatcattgttcactgcagcctcaaattcctgggctcaagcaatcctcgcacctcagcctcctgagtagccgggactataggcacatgccacctcacctggcttgtgtgtgtgtgtgtgtgtgtgtgtgtgtgtgtgtgtgtgtgtgtgtgtgtgtgtgtgtgtgtagagacaggatcttgatgtgttgcctaggctggtctcaaactcctggcctcaagtgatcttcccacctcagcctccaaaactgttgggattataggcgtgagccactgtgcccagcctaactgggtttttatgagaggaaaatagaaaatgctcttctagaagagagagaacaagagcacaaaataatctggactcacaaaaattcagcaagctccaagaaagggggatggagggaacgctggcaaaaatttaaatgccattaggatatttagcaagttattactgtttggtaaaaatgcatcatcaccctgtgtgcaaaatgcttgcaaagtagtctaaatgtctttggagatgggtgttttactgcttttttccaaaaacaaattgtttattatggttgcagaaatgcagccattacggtcacataaatttctaaaaagcctaccaaaggttgcaagcagtcttctgccactgggcaggccagcagttcagacccagcgaggttgccaggaacaaatccaggaaatactgggaagaacaagacaagagaattacctaaaagagcaaacaattcaagtaaatcctgtagctattaccacttaaaatccgtagctcaagattcctgtttcaccaccttatacacttaagcaattatacttaagcctttttttagtcctaagtgaagaactacatcagaatcaggataagtattttgcctgggaaatttggctgcatatgaatggagaagacatttacatcctatgttctggcactttctgaaagatctaattaaacatgttgatgtgccaatttaatcaagatgagagatccctgctggtgtcaccctctagaacctgcacttggtgttttgactttccagaagaaaaaaatgcaactttggttagggggcagtggttggatcacacagttgtctttcgtttcctaccacagtaattcatatttaaatatgcttttagattagtgtggatactattgctgctgtgttgctacctgacctttttctggggggggtacctcagaaatgagcatttgagggcaagcgaaaaagccctcttcatcctccagaggcaacaaagaggcagcagaaatggggaaagattgtgagaggcagggcttgggtctagacctggacttaggcaagatatgttgccctcaaccctgagttttcttatatgtaaaaagggaaggttgggctggactagatgaggtcaagatttgccattctgggaggctgatattccagagaatcaaaattaatcctaaaccaaagctttatggctgctacagagacatgtcacatttctgagacttgtcaccaagagtttgtccctcagactttggcgctgttgaatgcaaagacaaggatggccaccttctggttcttgcctgttgtcctcagctgagagcagtctcggtaaaggtggcaaagattctgtgacctcagaccggggaccaaatgcttgggagtctgatggccgggctgggccaccattctcatagctctcattctgtttggagcaaccaaaggatttgtgtgaagttatttggaaaaggaccttaactgagcagtaatcttttttctgtatatttggaatgtttttcattctgacctgttctgtcagtgattctactgaaaaacaatttaatcaatataaaaatgttcaagctatgcaacactgt

SEQ ID NO: 171677 - DNA, 8765 bp, Homo sapiens
  Payload ID: 13749
  Gene Symbol: PTPN3
  Gene Name: protein tyrosine phosphatase, non-receptor type 3
  Uniprot ID: P26045
  ENST ID: ENST00000412145
  CDS Start-End: 2555-4903
gaagggtggtatcccgttgtggagtagaatgtaactatgaccttctgggatttgggcaccagatttatcttactgcaacaggagccatggtgggagccacccccataactcttatagagctggtgggccaccaggactgccagatatatatatatattttttgaaacagggtcttgctatgttgcccagactggcctcaaactcctggactcaaaggatcctccctcagcctcctgagtagctgggattataggcacataccaccacgactagctgccagatcatcttatcttggaccaggcttctaccattaattcacatgctttaaaaaaattaaaaattaaaaaaatgaaaaataaaaaaacttaaaagattttacctatattcctggaacatagttatcttaccccagctttgtagttcctgtttaaggaaattccctctgaaggaaattttagctctcaagagtcaaagaagatgtatagaggtggtatctgttagtttttgtttgtttgttaaggatctaggcagagaggtcattacatttttctgaagttgaggtcacaggtggggtacccacaagagaggtcattacatttctgaagttaggcatcccaggcatctcttctaaagaactatcctgtattctaattgttaaataaatatcttcttcattgtgagcctccacaactgctgtttctgataaatttagatcattctttgcagaattttatatactggcaatctcaaaactaggctccttcaagattcctaggaagtctcccaagctcgggttgggttccactattctagtttctttgtgtatgatgccatggggttgactcagaaactttgctcaatatatgacaaggcagcatttggtgagtggtgatctccacgtttatcttctcatttatatccctaggaagacatactgattagctgagcttgtcaatgaaagcccgggttcaccattggattatctataactctcctttctctttttttctctcagtagcattgtaggaggagagaacacttaattctggttgaatgtcagcttggataaacatagaaacaaactagaaagaactgatgatgttctcctaggtggaaaagatggagattccaataccaaataggtgtgaatcagcaaatgtatgttatactgtctctcaaggccaggtgttcaatacattgtgggtagttaattataatcaaagtaataatattagagttacgacatggatcctaagctttttagccattaaacatataagaaatttgtagcatagtgagtttttttataacatgatcatccaggttaaaataagacacaattgacctcacatatcctatctgagctccgattttgtcatctgtaaaaatggagatagtggtacctaccttacagagttatgaggctgagataagagggaaagttacaaagtagtaccatgtacaaagcccggaactgtgcaaataggaggttgtaatactgtttgaagcattcccatctcaaaaagccagttccttggcctttataaatttgaaggaataatgaaactgatttgtttcaattgtgaaaattatttctctcctgcccctgtgcacttctgccctgtctatattagatttcaagaggtttcccttttgtcatcttggccagacaatggaatgtctatcccgtttgaatctgggtttaaaaaagcatgggagctagtggccaagtgtcacatgtatgccgcatccctaaatagaagtctccccagggcgcttcctgacctgcgcaatgctgccgaaggcctcctttccccgctccccaggcagaggagcaaagtcacaggctgaggggcctgccacgacttgcccacaaaacaggtctggagtttggaagttacatttgctggttgcccagagatgagtgcagaattcagcttggaggtcctggaaacttctagtttactgatgtttatgcttttgctcatgcacccacagttcctgggacacagaatgctcacctgggggtttgtaccccagccaagaaggtgtcttcacagactcccctccttttagcaacttcatgcagatggagcttgggtggatggatcctggcacagtgttcagaacagtggccctgccagtgtgtgggcgccgcttgtgcagagcccctgtgggttctggtcctcaagggcaggggcgctcactgacagcggaacccatagtaccagcccatctttggtgggctgtttccaccccattcatccctgctcagctcttcataggacagcctgtgctggcagaaaattgcccccaccagtcaagacgtagggcatcaacatgagccatcagtaatgacagggcagctttgcagagcgtaaggtagcacctgataccttggaccaaaaccgtatttttatgtatctttcacatgtacagctcttgtctttgactcatcaaactttcttttttttttttttttgcttatttcagtttgagtatgaattaatgaaaacaattgtttcataggcacttgtatttcttacaactgaagatggatatttgcgaaggaaggttaacctgccctcttaactcagcagtggttctagcgtcctatgccgtacaatctcattttggagactataattcttccatacatcatccaggctatctttccgatagtcactttatacccgatcaaaatgaggactttttaacaaaagtcgaatctctgcatgagcagcacagtgggctaaaacaatcagaagcagaatcctgctatatcaacatagcgcggaccctcgacttctatggagtagaactgcacagtggtagggatctgcacaatttagacctaatgattggaattgcttccgcgggtgttgctgtgtaccgaaaatacatttgcacaagtttctatccttgggtgaacattctcaaaatttctttcaaaaggaaaaagttcttcatacatcagcgacagaaacaggctgaatccagggaacatattgtggccttcaacatgctgaattaccgatcttgcaaaaacttgtggaaatcctgtgttgagcaccatacgttctttcaggcaaagaagctactacctcaggaaaagaatgttctgtctcagtactggactatgggctctcggaacaccaaaaagtcggtaaataaccaatattgcaaaaaggtgattggcgggatggtgtggaacccagccatgcggagatccttatcagtggagcacttagaaaccaagagtctgccttctcgttcccctcccattactcccaactggcgaagtcctcggctccggcacgaaatccgaaagccacgccactcttctgcagataaccttgcaaatgaaatgacctacatcacggaaacggaagatgtattttacacgtacaagggctctctggcccctcaagacagcgattctgaagtttctcagaaccgaagcccgcaccaagagagtttatccgagaacaatccggcacaaagctacctgacccagaagtcatccagttctgtgtctccatcttcaaatgctccaggctcctgctcacctgacggcgttgatcagcagctcttagatgacttccacagggtgaccaaagggggctccaccgaggacgccagccagtactactgtgacaagaatgataatggtgacagctacttagtcttgatccgtatcacaccagatgaagatggaaaatttggatttaatcttaagggaggagtggatcaaaagatgcctcttgtggtatcaaggataaacccagagtcacctgcggacacctgcattcctaagctgaacgaaggggatcaaatcgtgttaatcaatggccgggacatctcagaacacacgcatgaccaagtggtgatgttcatcaaagccagccgggagtcccactcacgggagctggccctggtgatcaggaggagagctgtccgctcatttgctgacttcaagtctgaagatgaactgaaccagcttttccccgaagccattttccccatgtgtccggagggtggggacactttggagggatccatggcacagctaaagaagggcctcgaaagcgggacggtgctgatccagtttgagcaactctacagaaaaaagccaggtttggccatcacgtttgcaaagctgcctcaaaatttggacaaaaaccgatataaagatgtgctgccttatgacaccacccgggtattattgcagggaaatgaagattatattaatgcaagttacgtgaacatggaaattcctgctgctaaccttgtgaacaagtacatcgccactcaggggcccctgccgcatacctgtgcacagttttggcaggttgtctgggatcagaagttgtcactcattgtcatgttgacgactctcacagaacgagggcggaccaaatgtcaccagtactggccagatccccccgacgtcatgaaccacggcggctttcacatccagtgtcagtcagaggactgcaccatcgcctatgtgtcccgagaaatgctggtcacaaacacccagaccggggaagaacacacagtgacacatctccagtacgtcgcatggcctgaccacggtgtgcccgatgactcctccgactttctggaatttgtaaactatgtgaggtctctgagagtggacagcgagcccgtcctagttcactgcagtgctggaataggtcgaaccggtgtgttggtcactatggaaacagccatgtgcctaactgagaggaacctgcccatttacccactggatattgtccgaaaaatgcgagaccagcgcgccatgatggtgcagacatcaagccagtacaagtttgtgtgtgaagcgattcttcgtgtgtatgaagaaggtttagtccaaatgctggatcctagttaagacaactgtgaaaaagttcattcctctttcccaagggcatcctccttgaaagaggaggacagacctctctggaagcagcaagaggaaccagtagctgtgggaaaggaatgggcacctctgaacccaggcactttaaacttctatagaaaagatatcgtgtacataggaactggtgtagataagcatgcaattatggcatcatttaggcctgtatttctatggaaagatacaaaaaggatctcagtttggggcctgtcctaatgccttcttccctaacatcaccacacacacccctgtcggcatcctggagcaattgagaccggacacccacagagctgttgtcctcccagcaacaagatggtgtggttatcttgggtcatttggatgttttgtttgtttctgtgtgtcagactgtaagggctgagctttctgtgcttctaggtggagctggaacaattcagattcacccgccctgatgctaaggaaaccctgacgtatgtactagatggcagggcactgggggtcaggctgaaggctgagcaacacctctctgccctccctccctttgtcccatctcccagcgacttccaatattcatgtttctgagaattgtgtccctcttcaggttccctcttggtgcctaacctggattagtaatgtgcattcaggtgaattttcagctgaggctctgagaactggtactctcagtgtgttctggtcatcttgtggcttagttgtagaagcaggtgtgtctcttgcctctgcttgcctcctactgcacactcagcacccaggactggaatcaccgactactgaatctcctacatgtattgctgctacttcaagctcctccacttgaaaccttatgattttcccaaggggagatgggacagtgtcatctaaatattccgaatgtttggccttctgagaaaagagcttctagtaattgaaccatgggaaacccagcttctggagggttggccgtggggctgtgtacatgtgtgtgcccaggggtgagtgtttctcaggattcctaacgattcaaattaccgttgagtatatataaagaatgagtctctgtatggaagaacaaatgtgtgcattcacccccagtcacaatggtctccattgcatttcaaaggagaggatcagactatctgaatataaacacaatctgatgttaatttattctaagaacaccatcattttgattgtcctaaagaattctgcctttgtgaataccgtgttaaatttttttaaatttgtgacaggattgtagcaaattattatttaaggaaaataaattgtgtaaacatttaatgtggtatttttgaacagcggtttttatgtactcagaagaggaagtaaagccaggttcttaatggtatttatagaaaagatgttttcatattataatgcacataaatgaagccattttgatattcagcaaattcggtgccaattgaatagtttgctggtagcaagacggatgaagacctatatgggagattctttatctctagagctagcatatttacttgcatactttgtttcttttccacatggatattttactgctaaatggcagaggtgggagggagatgtcacacagtaccataaccccatattgaaaacaagaaaccaccagaaagtttgcagctaaggggcaggggattcagttcctacgcccactcagcactaactacttgcgggcctggttgcttagaagctctacctctctttcattatctgtaaaatagaaacaatacttaggactttagttggaacatgaggattgaataagatcacgctattcatgtgactttttatcggctagaacagcaacagacactgctgtgggtgagttacttagaaaagtttagttatcagtgattagcccaaaaacacatcagtcaaaaatagaatccactggatttttgtctctctttttagagacagggtctcactgtcgcccaggctggagtacagtggcatgatcattgttcactgcagcctcaaattcctgggctcaagcaatcctcgcacctcagcctcctgagtagccgggactataggcacatgccacctcacctggcttgtgtgtgtgtgtgtgtgtgtgtgtgtgtgtgtgtgtgtgtgtgtgtgtgtgtgtgtgtgtgtagagacaggatcttgatgtgttgcctaggctggtctcaaactcctggcctcaagtgatcttcccacctcagcctccaaaactgttgggattataggcgtgagccactgtgcccagcctaactgggtttttatgagaggaaaatagaaaatgctcttctagaagagagagaacaagagcacaaaataatctggactcacaaaaattcagcaagctccaagaaagggggatggagggaacgctggcaaaaatttaaatgccattaggatatttagcaagttattactgtttggtaaaaatgcatcatcaccctgtgtgcaaaatgcttgcaaagtagtctaaatgtctttggagatgggtgttttactgcttttttccaaaaacaaattgtttattatggttgcagaaatgcagccattacggtcacataaatttctaaaaagcctaccaaaggttgcaagcagtcttctgccactgggcaggccagcagttcagacccagcgaggttgccaggaacaaatccaggaaatactgggaagaacaagacaagagaattacctaaaagagcaaacaattcaagtaaatcctgtagctattaccacttaaaatccgtagctcaagattcctgtttcaccaccttatacacttaagcaattatacttaagcctttttttagtcctaagtgaagaactacatcagaatcaggataagtattttgcctgggaaatttggctgcatatgaatggagaagacatttacatcctatgttctggcactttctgaaagatctaattaaacatgttgatgtgccaatttaatcaagatgagagatccctgctggtgtcaccctctagaacctgcacttggtgttttgactttccagaagaaaaaaatgcaactttggttagggggcagtggttggatcacacagttgtctttcgtttcctaccacagtaattcatatttaaatatgcttttagattagtgtggatactattgctgctgtgttgctacctgacctttttctggggggggtacctcagaaatgagcatttgagggcaagcgaaaaagccctcttcatcctccagaggcaacaaagaggcagcagaaatggggaaagattgtgagaggcagggcttgggtctagacctggacttaggcaagatatgttgccctcaaccctgagttttcttatatgtaaaaagggaaggttgggctggactagatgaggtcaagatttgccattctgggaggctgatattccagagaatcaaaattaatcctaaaccaaagctttatggctgctacagagacatgtcacatttctgagacttgtcaccaagagtttgtccctcagactttggcgctgttgaatgcaaagacaaggatggccaccttctggttcttgcctgttgtcctcagctgagagcagtctcggtaaaggtggcaaagattctgtgacctcagaccggggaccaaatgcttgggagtctgatggccgggctgggccaccattctcatagctctcattctgtttggagcaaccaaaggatttgtgtgaagttatttggaaaaggaccttaactgagcagtaatcttttttctgtatatttggaatgtttttcattctgacctgttctgtcagtgattctactgaaaaacaatttaatcaatataaaaatgttcaagctatgcaacactgt

SEQ ID NO: 171678 - DNA, 10300 bp, Homo sapiens
  Payload ID: 13750
  Gene Symbol: PTPN4
  Gene Name: protein tyrosine phosphatase, non-receptor type 4 (megakaryocyte)
  Uniprot ID: P29074
  ENST ID: ENST00000263708
  CDS Start-End: 772-3552
cctgcgtgtccctctgcgctccgactggtgcgacttctccctgcgctagcgaggcagggttttggcctcgcctctcgcgagatcgcctcctgttgctgccgccgccgctcctggccactgactggcggcgcctgcgcagccgccatgttcggttgctatgctgcggcctaggagagggggtgtgcttgagggaggaggaagagatagaggaggaggagggggaggaagaggaggtggagaaggaggggggtgactgagctcctcttgcactctcacacacaaacgctgcccaggattacccgccagctcacgccgcgcagtgcgcttttccgctcctcgcgccccaccaccaacattgttctctcaggactcctgggtcccaggggccggaattgggcctgagcgggagaggaaagagacttggctttggccgcggggtcggaggattggggccaggccccctcccccacgcacttttgggggtgtggattatctcatccctgcagggaggtaggagaggtcgccggctgcccgcctccctgccacctccccagcggcgccggcccgcggctgcccagcagcatgaggtggtgctggcggctccgggtcgtggcgcgaccgctgcggcggcggctgctcggggggcgctgaggtagccccccggagcggcacggaggacgcgcttctcctctgcgcgccggggcctcgaggctttttttctccagccgagaggacgcggctgtgatatacgaagactttgtgtggacagtaatgacctcacgtttccgattgcctgctggcagaacctacaatgtacgagcatcagagttggcccgagacagacagcatactgaagtggtttgcaacatccttcttctggataacactgtacaagctttcaaagtcaataaacatgatcaggggcaagtcttgttggatgtcgtcttcaagcatctagatttgactgagcaggactattttggtttacagttggctgatgattccacagataacccaaggtggctggatccaaacaaaccaataaggaagcagctaaagagaggatctccttacagtttgaactttagagtcaaattttttgtaagtgaccccaacaagttacaagaagaatatacaaggtaccagtattttttgcaaattaaacaagacattcttactggaagattaccctgtccttctaatactgctgcccttttagcttcatttgctgttcagtctgaacttggagactacgatcagtcagagaacttgtcaggctacctctcagattattctttcattcctaatcaacctcaagattttgaaaaagaaattgcaaaattacatcagcaacacataggcttatctcctgcagaagcagaatttaattacctaaacacagcacgtaccttagaactctatggagttgaattccactatgcaagggatcagagtaacaatgaaattatgattggagtgatgtcaggaggaattctgatttataagaacagggtacgaatgaatacctttccatggttgaagattgtaaaaatttcttttaagtgcaaacagttttttattcaacttagaaaagaattgcatgaatctagagaaacattattgggatttaatatggtgaattacagagcatgtaaaaatttgtggaaagcatgtgtagaacatcacacattcttccgtttggacagaccacttccacctcaaaagaatttttttgcacattattttacattaggttcaaaattccggtactgtgggagaactgaagtccaatcagttcagtatggcaaagaaaaggcaaataaagacagggtatttgcaagatccccaagtaagcccttggcacggaaattaatggattgggaagtagtaagcagaaattcaatatctgatgacaggttagaaacacaaagtcttccatcacgatctccaccgggaactcctaatcatcgaaattctacattcacgcaggaaggaacccggttacgaccatcttcagttggtcatttggtagaccatatggttcatacttccccaagcgaagtgtttgtaaatcagagatctccgtcatcaacacaagctaatagcattgttctggaatcatcaccatcacaagagacccctggagatgggaagcctccagctttaccacccaaacagtcaaagaaaaacagttggaaccaaattcattattcacattcgcaacaagatctagaaagtcatattaatgaaacatttgatattccatcttctcctgaaaaacccactcctaatggtggtattccacatgataatcttgtcctaatcagaatgaaacctgatgaaaatgggaggtttggattcaatgtaaagggaggatatgatcagaagatgcctgtgattgtgtctcgagtagcaccaggaacacctgctgacctctgtgtccctagactgaatgaaggggaccaagttgtactgatcaatggtcgggacattgcagaacacactcatgatcaggttgtgctgtttattaaagctagttgtgagagacattctggggaactcatgcttctagttcgacctaatgctgtatatgatgtagtggaagaaaagctagaaaatgagccagatttccagtatattcctgagaaagccccactagatagtgtgcatcaggatgaccattccctgcgggagtcaatgatccagctagctgaggggcttatcactggaacagtcctgacacagtttgatcaactgtatcggaaaaaacctggaatgacaatgtcctgtgccaaattacctcagaatatttccaaaaatagatacagagatatttcgccttatgatgccacacgggtcattttaaaaggtaatgaagactacatcaatgcgaactatataaatatggaaattccttcttccagcattataaatcagtacattgcttgtcaagggccattaccacacacttgtacagatttttggcagatgacttgggaacaaggctcctctatggttgtaatgttgaccacacaagttgaacgtggcagagttaaatgtcaccaatattggccagaacccacaggcagttcatcttatggatgctaccaagttacctgccactctgaagaaggaaacactgcctatatcttcaggaagatgaccctatttaaccaagagaaaaatgaaagtcgtccactcactcagatccagtacatagcctggcctgaccatggagtccctgatgattcgagtgactttctagattttgtttgtcatgtacgaaacaagagggctggcaaggaagaacccgttgttgtccattgcagtgctggaatcggaagaactggggttcttattactatggaaacagccatgtgtctcattgaatgcaatcagccagtttatccactagatattgtaagaacaatgagagatcagcgagccatgatgatccaaacacctagtcaatacagatttgtatgtgaagctattttgaaagtttatgaagaaggctttgttaaacccttaacaacatcaacaaataaataagaaagcaaaaagatctgggatatgtgttggaaaactgctttcccttatgttcactgtgccataatgctgctcgcaggaaatggcattttacaaaaaaaaaatgaagaactcaaaaaaactttgaaaacttcagcactgttgcactttatgttttaaaaaatgtcactctttcaaaatctataactcatgtatttgaagactgtttcatgctttgctccgaacaaatagtaaataactgagtatgttcagggtaatttatgaaattttgtggtggtgccatgcaatccccttttggtagaattgccacaaacaaggctcaaaattctcatcatctctgttatacacctgtatcatgaaagcaaaaagaagtaaacatcaggagtcagctctggtcttttgcagtggtttgcgtacttactatactgattaccagattttatttttaaaattttagcaatatcgttcttaatattagccaatacactgcctatggatgcagcacatttttccctgcacaccccctgtagagacctgcctgctgctcagaagaagaaagatggaatttgctgttcccaggaaatgctgcacattgtccatttaccagcatcttatagaaaatataaatatgaatctacaaattctcttggatttaataatgtaacttatatttatcataaggttggcttattccaaatcatgtgatttcacatacttgatgtaaaggaatgcatgcattgtgtcttaaccccttaagtgccttgagacgtccttgtatgtctaacgaaaaggcactcatttgaccccactaggaggtatatatgtatattgtacattcgtatatttttatgcattttgaataagttcacattttaaaaaacagctatattgagtgttatacagtcaaagaagggtaaggaaattctgtttcttactcagtactcgtgatttgctataagaagcaaagataatttgtgttctactgagtgcacactgctgctatggaattgttcaaaatctgcacattcctttacttgagggactgaggggttacggtttagcagctcaactttaaaagatgcttttatgcttcaaatttcatatttatttcatccctaactttaggaagacatctaacatgcagattaatgttaaacatattgataatctaagctaaagttagagcaaataattgtgatttattcatgtccataactaaaatattattctttagcactcatttcagttaatatcaagctttgttcacactgatatattgattgggattcttcaaacgaagaatgaaacattattgacttatttctaagtgtaataactcaataactaaattgagaattttcttgtttttttgtgtacaattaaattattccattttatatatacttattaagttataagcatgttaataaggagacttttgactgtccagcctaatggaggatctgattcccattaaggatgtgggaattcccgtattttcctcttcaggtttttttgtttttaagtctacagagagatagaaccttaacattgcccagtttgataaaagtgaaaatttgctcacctatacaaatgttattttacacaattattttatgtggattggggttttaaaagattcatttcctagcagtttctgaatatttctgtaagatcttgataaagtttagagtcaaatggcagatattttggaaagccatttagtatgaggggaagagtacacattttaaatctttggtataatctaaacgatgtcatttcagacattcaaaactcataataataaatttcaggaaatcaagctcctaaacattaatagccaagataccaaataaattatcatattaaaatatttaagtttatttaaagagagaagtaaacataaacttatgtcaaagagaaattctcttaatctatttcctgacttcacagtcaaaacagtataagatagtgaagtaacttataatcttatttggtcattctgttctataaacagacaaatataatttaggctgctatatgacatgataaattaaaaactgagaaagtaaaattatgtcggggtctacacattaaatgactgttttggcagtttttcacctgaatttaaaaataaaatttgtctgttctatctgtatggacagaatatgacaaccatagaccaaaagatatcattgtatagatgtaaagagacaaaagtcatggttggcatgttctttaatttagggccttgtttatacttgtgagtttaataatttcttggcaatgagcactgctgcctttttaaatcatcaatgcctgtctttaaatgccaatcattagaagtttagaattacatttaaatttctcatatatgaatttttcatctgggaactacccactgtcgtcatttttatgtgcagaaaagatcctttttgaaaaccatatttattgggatcttatttaaatttaaattatcctttacaacttcttaaaatgaatatgctaatagataagactttatccattacatctaagaactttttaacctgtatatcaatctaaataggtttctagaaataatcctagctttcatacaccatgtagttctagactccgtccatatcagtgtaacattgtgtgataaaatgccaaatgtcttgtatctaagctacgctcccactcttccagccacccctacctcccaccttgacacccttaagaaagcaatgctgacttttattctgacaagtggaaatcaatagtggttaatcaagtggattttgtaaatgctaagaagtgtttgtgaaaaccttccctttctgagttaggattgttttttcctgttcatttcaggtgttttattgagcatctgatttgtgtcagcaccatgtaaatatgatgaggagtatttggaatagactttacattcaccagaaaattgatagtatttgttaaaccaatgcatccattcaaaatagaggcagagtaaacagcctaagaaatgatttcctttctacagtctgctaggagaaagaggtgagaggggagtggttgatgattttaatcaagagtaaagggaacatttattacatgaaatctgacttcagttgtgcaaaggtatgttaagacattaagacaattgctggaaggtttcaaatatgtgtacacacacatagagctacttttgtgtgtttatttatatgtatatttcacaaaggctaatgcccacagaggaaaatgattattttaacttctgggttatcatctgctggcagggtctgatcaggtctagagtatttaaggaaaagtctcctgtcttctatctccactagaagtactgcagcttgagagctgaaaggaacttgaaaaatgttatccagtcttcacttagcccatttttatcggcattaggaaatagggttcagcaatggttattgatttagcagtctggtcttatatgatctgctttctaattatctatctagtattcctatattatactggaacttcaataaattataacctatgtgaatatcataaattcttgtgaatttttgtctatttccagtagagaagcatactcagccaatgttttcacttaataactatgacaaccttaaaggatgtcacttaagttagaaaataagcaggcttaagaagtgattctaattaggacccccactcagtttgctagtcatgcctgcctgacagaacataagcttttgtaaagtatttagactgataacacatgcagtatgaaaacattatagactgcagttagaagactaattttttaaaagcactcaaaacatagaactaagatttagaatatatgtccatttataatgaaataatttgtgttcataatgtgaacatgtaagataagtaaataaagcattacttgttttataatatcaggaagagagaaggaaacattagtttataacaatgtgctatttaatatctgtattttgaacatttaaaatactctgatggtaaggttgccaaagtaattttgaattcataaaaattgtttataccacaataatgtgggatatgtttacaggctcttttattttgtggtagttactttatagttcagatgaatttgcatttcagtcacttatagtaaataaagtatattaaatatttgttggaataaaaatctcaatgtaataggacatagataaattatgcaacagcctgctttgatgaaagctggtgcattatgtgagctgccacagttaatactttgtattaacattgcttacttcccccatttgcttcacctatctgactacaattgctggaatcattctttttgtggtgcttcctccaagtgaaataactatgttattaaaacctactggattaattttatcaaatatcagacttactgatctcttggcagagatttattggtgtctcagtgtgatcacaatacaagttgtagcaaccattttataaaactcttagagaattatgtagataaaatggaaattacataatcctaaaacatttttgagggctaattgataataatttcagcaattttattaagaacccagtaaattaatccctaatttgtatgttttttgttcaacttaccgtgtctgcaaccattatatagacttcattgatactcagcaattactacagtgtgtcttacaatgttataaaaaacaaacagcaatctctgtttctgccagaagttagatatttttttatagtcctgatgaatttgttgtgagtagacaccacatagttatttctgtttgcatataaatttgctgctatttatttgtatgtttttctactgtagtatgctattgatttctgaagttataatcataatttttattttagtaatccaagctaaatgggcaaccagaagtaatatctgctagggtgcaatccatcagcattggttcagtgcatatacataagtaaaccagtttaaaaaaattttactaagcaaaaggtagtagcaatattgctagttaaagattaccattttaggggaaagttcaaaggtttaacttcctgaaaccttttaaacttttcagtgcaagaatgaaaatgtttgaaagccttgttaagctcataaaagtttcatttaaacactgtagagtttcctacctttgttgtgtaaaggatatagaaaatatttttctatggacagaaggttgaaactgttaacttctttaatttcattgtttaaaggagataaaatgttatttgtgtgtctttcatgctgtaaagaaaatgaatgtatctttcaaatgtcattagaattatggcttgattctaaggatactctatttgttttaaagtctacacgggattgaaaagaaagggaagagtattacacttcattgtacaaaatgtaattttagaagaaaaacattttcattataaacaagagcaatcattgaagcattttcagatataatgtacattctttttcattttgctttgcctctagaatagaaacttttcagaaaatttgcacatactgtttgtaagtataaaataattgaattctagacttttggagtgtggaagggtgtttgtgtgtgaaggtaataaatgtgttgctgcatgtgtttaccatagagaacgttgccaggctttgtcaaatgaggacattgttgtgagggtgtgacttttgtgaagccagaaaactgtgcctaagattcattacagtgagtatgtgcagaggcccctgacccagtaaatgctttttgcctttttattcccaatgtcttggacagttgagacaacttggcccaactctgaattgtagcagtgatgtcttatatgcttacgagtttatattaattcagctgaacaagaactacatcttaaaccacctttgtaggtatgattaatacgtgcaacagctgctttaaaaggtggtatttattattcatcactcatgaaacttgactcagtgaggacttcattatttttatttctctttccacgtctccaactttttaaaaatcactaatttaactctttgttaagtactcaagtacaaagtgatctcttctttcatgaactttgctataactgttgaaaggattggtgtcaggctctctcaaccctgggagtttccaaaatttagcaaatattacttgtgataagcttaaatgccacatcgctaagtacaattattaccaggaatccgtcaagggggagatagccccgctcacacccttagacccaaacaggtgctggttcatgctttctccacaaattggcagttgggtacttccccactgtcatcacagttgagctcattttaacatatattcaaagaagctttttagtttctactcctgaattgtagtgttcaagttatttgccttcctgggtaagaaaattttaacccaagtctgggattctctggcacctgtcttttcccatcttttaatgagttggcaagattaggtcaaatttcaatgctaaatttgattttttgaattttaaatagttgcactttatttcatgctgaccaccaacttaatttatacattttaaaataaaattatcctagaagtgttgtaaacgtgggaaaattttaattagtgttggaggtcattagattggacccaggtttaaatataatgatctcttcacagcttatttgatgtttaagagcaacttgtgtgatcttagctttgcaggttttctgtaatttatgtagcacaataaaggataaccagttgactgtgttactgga

SEQ ID NO: 171679 - DNA, 630 bp, Homo sapiens
  Payload ID: 13750
  Gene Symbol: PTPN4
  Gene Name: protein tyrosine phosphatase, non-receptor type 4 (megakaryocyte)
  ENST ID: ENST00000431283
  CDS Start-End: 1-594
agaaattcaatatctgatgacaggttagaaacacaaagtcttccatcacgatctccaccgggaactcctaatcatcgaaattctacattcacgcaggaaggaacccggttacgaccatcttcagttggtcatttggtagaccatatggttcatacttccccaagcgaagtgtttgtaaatcagagatctccgtcatcaacacaagctaatagcattgttctggaatcatcaccatcacaagagacccctggagatgggaagcctccagctttaccacccaaacagtcaaagaaaaacagttggaaccaaattcattattcacattcgcaacaagatctagaaagtcatattaatgaaacatttgatattccatcttctcctgaaaaacccactcctaatggtggtattccacatgataatcttgtcctaatcagaatgaaacctgatgaaaatgggaggtttggattcaatgtaaagggaggatatgatcagaagatgcctgtgattgtgtctcgagtagcaccaggaacacctgtgagttatctaaatgtttcaaataaatcctgttttcaagaatatgtacttattttataattcttactagtttaaataaaacaaggaatttcatca

SEQ ID NO: 171680 - DNA, 671 bp, Homo sapiens
  Payload ID: 13750
  Gene Symbol: PTPN4
  Gene Name: protein tyrosine phosphatase, non-receptor type 4 (megakaryocyte)
  ENST ID: ENST00000441089
  CDS Start-End: 1-658
cagcattataaatcagtacattgcttgtcaagggccattaccacacacttgtacagatttttggcagatgacttgggaacaaggctcctctatggttgtaatgttgaccacacaagttgaacgtggcagagttaaatgtcaccaatattggccagaacccacaggcagttcatcttatggatgctaccaagttacctgccactctgaagaaggaaacactgcctatatcttcaggaagatgaccctatttaaccaagagaaaaatgaaagtcgtccactcactcagatccagtacatagcctggcctgaccatggagtccctgatgattcgagtgactttctagattttgtttgtcatgtacgaaacaagagggctggcaaggaagaacccgttgttgtccattgcagtgctggaatcggaagaactggggttcttattactatggaaacagccatgtgtctcattgaatgcaatcagccagtttatccactagatattgtaagaacaatgagagatcagcgagccatgatgatccaaacacctttctgttttttatattttatttttcagagtcaatacagatttgtatgtgaagctattttgaaagtttatgaagaaggctttgttaaacccttaacaacatcaacaaataaataagaaagcaaaaaga

SEQ ID NO: 171681 - DNA, 4154 bp, Homo sapiens
  Payload ID: 13750
  Gene Symbol: PTPN4
  Gene Name: protein tyrosine phosphatase, non-receptor type 4 (megakaryocyte)
  ENST ID: ENST00000430976
  CDS Start-End: 1-407
ctgaacttggagactacgatcagtcagagaacttgtcaggctacctctcagattattctttcattcctaatcaacctcaagattttgaaaaagaaattgcaaaattacatcagcaacacataggcttatctcctgcagaagcagaatttaattacctaaacacagcacgtaccttagaactctatggagttgaattccactatgcaagggatcagagtaacaatgaaattatgattggagtgatgtcaggaggaattctgatttataagaacagggtacgaatgaatacctttccatggttgaagattgtaaaaatttcttttaagtgcaaacagttttttattcaacttagaaaagaattggtgagtacggatttaataattattgacataaatgaagccttttaagaaatacccattcatgacagaacttttctattattagtacaagtgaaagtgcaattaatactgtggataactgcccgctgaggtaatgaattcacttgttataacaaaatgtacttgtttttccagtgtgtatgtggttctaatttaaagttcttctagatattcctcttgctgtttctcgagcttagaaactgatttctcacacatgatgttcattgaaaacctcagggtccatttttgaagggcagcaaatgagcatttcatatatccctttttccctactaaatctatagtacttactttcgtatataagttcattttattttaggggagctgagtgttacaagttcatgaacttataacacattgcctccctttgttggagtggtaatggctttatatattataaataacaaattgagttgtcatggaaagtacagtgttggaaataatttcatcttgttaatgattttgtctgtttcattaaatcaaactaaccttatcctttgatgtacattatttcttagaaatctgagaagtcttggcaaattcatgcagatttcaagatggttgtgtgtgtatgtgtgtaaaatgtatttgaaaccataaaaatgtctttggggctgtcctcagtggctcaatcctgtaatcccagcactttgagaggctgaggtgggaggatcccttgaggccaggagttccagaccagccttggccacatagtgagacactgtctctacaaaaaaaaaatggaaaaaaaaaattggccaggtgtgatgatgtgtgcctctagtcccagctactcaggaggctgaggtgggaggctctctggagcccaggaattcaaggctgcaatgagctatcatcacaccattgcactccagcctggatgacatagggaggccctgtctcaaaaaaaaaaaaaaaaaaagcctttgggtacagtggtggcttctacctgttatcccagctacttggaaggctgaggtgggtggataggttgagcccaggagttcaaggctgcaatgagctgattgtgccactgtagtccagcatgggcaacagagcaggacaccactgcctcttgaaaaataaagaaagtctttgaatcagctctgttgtattggtctactacgtgattataaactatggtttatcgtttatgttcataaaatacagagggatttttttcaagagaatttttattgaaataaaacataataccaaaaatgtgcatattttaagtacacaacttgatgaagtgaacatatccatatcagcacctccaagatatgtagtatatgtaccgccttctaatatgtagaactttaccagcaccccagatgcttgaaatgttgctgctggagctgatgcccacttccagtcattaagcctcctggaagcatgaatctagagaaacattattgggatttaatatggtgaattacagagcatgtaaaaatttgtggaaagcatgtgtagaacatcacacattcttccgtttggacagaccacttccacctcaaaagaatttttttgcacattattttacattaggttcaaaattccggtactgtgggagaactgaagtccaatcagttcagtatggcaaagaaaaggcaaataaagacagggtatttgcaagatccccaagtaagcccttggcacggaaattaatggattgggaagtagtaagcagaaattcaatatctgatgacaggttagaaacacaaagtcttccatcacgatctccaccgggaactcctaatcatcgaaattctacattcacgcaggaaggaacccggttacgaccatcttcagttggtcatttggtagaccatatggttcatacttccccaagcgaagtgtttgtaaatcagagatctccgtcatcaacacaagctaatagcattgttctggaatcatcaccatcacaagagacccctggagatgggaagcctccagctttaccacccaaacagtcaaagaaaaacagttggaaccaaattcattattcacattcgcaacaagatctagaaagtcatattaatgaaacatttgatattccatcttctcctgaaaaacccactcctaatggtggtattccacatgataatcttgtcctaatcagaatgaaacctgatgaaaatgggaggtttggattcaatgtaaagggaggatatgatcagaagatgcctgtgattgtgtctcgagtagcaccaggaacacctgctgacctctgtgtccctagactgaatgaaggggaccaagttgtactgatcaatggtcgggacattgcagaacacactcatgatcaggttgtgctgtttattaaagctagttgtgagagacattctggggaactcatgcttctagttcgacctaatgctgtatatgatgtagtggaagaaaagctagaaaatgagccagatttccagtatattcctgagaaagccccactagatagtgtgcatcaggatgaccattccctgcgggagtcaatgatccagctagctgaggggcttatcactggaacagtcctgacacagtttgatcaactgtatcggaaaaaacctggaatgacaatgtcctgtgccaaattacctcagaatatttccaaaaatagatacagagatatttcgccttatgatgccacacgggtcattttaaaaggtaatgaagactacatcaatgcgaactatataaatatggaaattccttcttccagcattataaatcagtacattgcttgtcaagggccattaccacacacttgtacagatttttggcagatgacttgggaacaaggctcctctatggttgtaatgttgaccacacaagttgaacgtggcagagttaaatgtcaccaatattggccagaacccacaggcagttcatcttatggatgctaccaagttacctgccactctgaagaaggaaacactgcctatatcttcaggaagatgaccctatttaaccaagagaaaaatgaaagtcgtccactcactcagatccagtacatagcctggcctgaccatggagtccctgatgattcgagtgactttctagattttgtttgtcatgtacgaaacaagagggctggcaaggaagaacccgttgttgtccattgcagtgctggaatcggaagaactggggttcttattactatggaaacagccatgtgtctcattgaatgcaatcagccagtttatccactagatattgtaagaacaatgagagatcagcgagccatgatgatccaaacacctagtcaatacagatttgtatgtgaagctattttgaaagtttatgaagaaggctttgttaaacccttaacaacatcaacaaataaataagaaagcaaaaagatctgggatatgtgttggaaaactgctttcccttatgttcactgtgccataatgctgctcgcaggaaatggcattttacaaaaaaaaaatgaagaactcaaaaaaactttgaaaacttcagcactgttgcactttatgttttaaaaaatgtcactctttcaaaatctataactcatgtatttgaagactgtttcatgctttgctccgaacaaatagtaaataactgagtatgttcagggtaatttatgaaattttgtggtggtgccatgcaatccccttttggtagaattgccacaaacaaggctcaaaattctcatcatctctgttatacacctgtatcatgaaagcaaaaagaagtaaacatcaggagtcagctctg

SEQ ID NO: 171682 - DNA, 568 bp, Homo sapiens
  Payload ID: 13750
  Gene Symbol: PTPN4
  Gene Name: protein tyrosine phosphatase, non-receptor type 4 (megakaryocyte)
  ENST ID: ENST00000420482
  CDS Start-End: 344-568
ctccccagcggcgccggcccgcggctgcccagcagcatgaggtggtgctggcggctccgggtcgtggcgcgaccgctgcggcggcggctgctcggggggcgctgaggtagccccccggagcggcacggaggacgcgcttctcctctgcgcgccggggcctcgaggctttttttctccagccgagaggacgcggctgtgatatacgaagagtcttgctgtgtcgtctgggttggagtgcagtggcacaatctcagctcattgcaacttctgcctcctgggttcaagcgattctcctgcctcagcctcccgagtagctgggactacagactttgtgtggacagtaatgacctcacgtttccgattgcctgctggcagaacctacaatgtacgagcatcagagttggcccgagacagacagcatactgaagtggtttgcaacatccttcttctggataacactgtacaagctttcaaagtcaataaacatgatcaggggcaagtcttgttggatgtcgtcttcaagcatctagatttgactgagcaggactattttggtttacagttggct

SEQ ID NO: 171683 - DNA, 954 bp, Homo sapiens
  Payload ID: 13750
  Gene Symbol: PTPN4
  Gene Name: protein tyrosine phosphatase, non-receptor type 4 (megakaryocyte)
  ENST ID: ENST00000433888
  CDS Start-End: 1-366
aggtggctggatccaaacaaaccaataaggaagcagctaaagagaggatctccttacagtttgaactttagagtcaaattttttgtaagtgaccccaacaagttacaagaagaatatacaaggtaccagtattttttgcaaattaaacaagacattcttactggaagattaccctgtccttctaatactgctgcccttttagcttcatttgctgttcagtctgaacttggagactacgatcagtcagagaacttgtcaggctacctctcagattattctttcattcctaatcaacctcaagattttgaaaaagaaattgcaaaattacatcagcaacacatgatcagagtaacaatgaaattatgattggagtgatgtcaggaggaattctgatttataagaacagggtacgaatgaatacctttccatggttgaagattgtaaaaatttcttttaagtgcaaacagttttttattcaacttagaaaagaattgcatgaatctagagaaacattattgggatttaatatggtgaattacagagcatgtaaaaatttgtggaaagcatgtgtagaacatcacacattcttccgtttggacagaccacttccacctcaaaagaatttttttgcacattattttacattaggttcaaaattccggtactgatccccaagtaagcccttggcacggaaattaatggattgggaagtagtaagcagaaattcaatatctgatgacaggttagaaacacaaagtcttccatcacgatctccaccgggaactcctaatcatcgaaattctacattcacgcaggaaggaacccggttacgaccatcttcagttggtcatttggtagaccatatggttcatacttccccaagcgaagtgtttgtaaatcagagatctccgtcatcaacacaagctaatagcattgttctggaatcatcaccgt

SEQ ID NO: 171684 - DNA, 662 bp, Homo sapiens
  Payload ID: 13750
  Gene Symbol: PTPN4
  Gene Name: protein tyrosine phosphatase, non-receptor type 4 (megakaryocyte)
  ENST ID: ENST00000488279
  CDS Start-End: 179-662
ctggcggctccgggtcgtggcgcgaccgctgcggcggcggctgctcggggggcgctgaggtagccccccggagcggcacggaggacgcgcttctcctctgcgcgccggggcctcgaggctttttttctccagccgagaggacgcggctgtgatatacgaagactttgtgtggacagtaatgacctcacgtttccgattgcctgctggcagaacctacaatgtacgagcatcagagttggcccgagacagacagcatactgaagtggtttgcaacatccttcttctggataacactgtacaagctttcaaagtcaataaacatgatcaggggcaagtcttgttggatgtcgtcttcaagcatctagatttgactgagcaggactattttggtttacagttggctgatgattccacagataacccaaggtggctggatccaaacaaaccaataaggaagcagctaaagaaactacttttattaattctaggaggatctccttacagtttgaactttagagtcaaattttttgtaagtgaccccaacaagttacaagaagaatatacaaggtaccagtattttttgcaaattaaacaagacattcttactggaagattaccctgtccttctaatactgctgcccttttagcttcatttgctgttc

SEQ ID NO: 171685 - DNA, 3135 bp, Homo sapiens
  Payload ID: 13751
  Gene Symbol: PTPN5
  Gene Name: protein tyrosine phosphatase, non-receptor type 5 (striatum-enriched)
  Uniprot ID: P54829
  ENST ID: ENST00000358540
  CDS Start-End: 432-2129
gccggggctggggggtgccaaacccacccggcggctgcgccagcgactctgcagctgaagcgcatttggtgaggcggtcgggcgagggagcgcgcacggagcgcgggacggagcgccaggcggacggaccgaaggacggaggcaccgaaggacggacgcccccgcacacgcagacgcacagagctcggcgcggcccccgtcgcatacacactggcacagacacaagcagggacacacgcagacacacgcacactcgcgcgcgcatcctcccgccagcctgcccgcctgctcgccggcgcccggagcccgctctggccgctggatgatctgaagctgccctctctccttcatttatatcaccagcttgctttttgctgagaaagcttcctgccctggaagatggcacccttccccatccagacaccttgggaatgaattatgagggagccaggagtgagagagagaaccacgctgctgatgactccgagggaggggccctggacatgtgctgcagtgagaggctaccgggtctcccccagccgatagtgatggaggcactggacgaggctgaagggctccaggactcacagagagagatgccgccaccccctcctccctcgccgccctcagatccagctcagaagccaccacctcgaggcgctgggagccactccctcactgtcaggagcagcctgtgcctgttcgctgcctcacagttcctgcttgcctgtggggtgctctggttcagcggttatggccacatctggtcacagaacgccacaaacctcgtctcctctttgctgacgctcctgaaacagctggaacccacggcctggcttgactctgggacgtggggagtccccagtctgctgctggtctttctgtccgtgggcctggtcctcgttaccaccctggtgtggcacctcctgaggacacccccagagccacccaccccactgccccctgaggacaggcgccagtcagtgagccgccagccctccttcacctactcagagtggatggaggagaagatcgaggatgacttcctggacctcgacccggtgcccgagactcctgtgtttgattgtgtgatggacatcaagcctgaggctgaccccacctcactcaccgtcaagtccatgggtctgcaggagaggaggggttccaatgtctccctgaccctggacatgtgcactccgggctgcaacgaggagggctttggctatctcatgtccccacgtgaggagtccgcccgcgagtacctgctcagcgcctcccgtgtcctccaagcagaagagcttcatgaaaaggccctggaccctttcctgctgcaggcggaattctttgaaatccccatgaactttgtggatccgaaagagtacgacatccctgggctggtgcggaagaaccggtacaaaaccatacttcccaaccctcacagcagagtgtgtctgacctcaccagaccctgacgaccctctgagttcctacatcaatgccaactacatccggggctatggtggggaggagaaggtgtacatcgccactcagggacccatcgtcagcacggtcgccgacttctggcgcatggtgtggcaggagcacacgcccatcattgtcatgatcaccaacatcgaggagatgaacgagaaatgcaccgagtattggccggaggagcaggtggcgtacgacggtgttgagatcactgtgcagaaagtcattcacacggaggattaccggctgcgactcatctccctcaagagtgggactgaggagcgaggcctgaagcattactggttcacatcctggcccgaccagaagaccccagaccgggcccccccactcctgcacctggtgcgggaggtggaggaggcagcccagcaggaggggccccactgtgcccccatcatcgtccactgcagtgcagggattgggaggaccggctgcttcattgccaccagcatctgctgccagcagctgcggcaggagggtgtggtggacatcctgaagaccacgtgccagctccgtcaggacaggggcggcatgatccagacatgcgagcagtaccagtttgtgcaccacgtcatgagcctctacgaaaagcagctgtcccaccagtccccagaatgactgcgcttctcctacaaggttctctgggcactgcccagcctgagtctcggccctcacccagggccctgcctcgggtcctgggcctgctccccgcttcctccccttcagtcagctccctctgtcctctgtcagcctggcctgacccctaccctccagcattgctcttcctactgtacatattggggagtggggggcagggtcgggaagggacatgccaggccaggcctggggccccggggcctgacccacaccacgcagaccccgggctccagtttttaacgatggttccatcaatacctgatccagaatgtttccgtgctacactttgtgtcctgctgcaatgtgttctgtctgtccatccatctctgccctctgtaccggacactgtgtctcctcagccaggaaggggtaatgagctccagcccctaagcaaccggacttgcctgcctcggcctcacccgcacttctcccaaaaggcagatgacggggagttaggcatggggagctccagaaggtcaccagagagctttcagctgagggagagttctctaggttggagtgggcatcacagccagggtggcctctgggtgtcagatgctctcaggagggtgcccagcctgtgaggcactggcaaggtagggggcagatggggcatggagaacccagaggatctaggccctgttggggaggggaggggagctcaaggtttgggtggggactcagcccagatctacgtgagacatttttctgtgtcactgtgggaaagccttcccagaagtctcactgcgtgttgctctgcgtgtgttcccatgtccatgcgtgtgttgagagcccatcaggagggcatgcatgactctttggcaacatgtattatcttggagccacgtgtttttattgctgactttaaatatttatcccacggcagacagagacatttggtgtctttttataattcgctcgtggtcattgaatagagcaataaacggagcattttgagcaaaactaa

SEQ ID NO: 171686 - DNA, 2299 bp, Homo sapiens
  Payload ID: 13751
  Gene Symbol: PTPN5
  Gene Name: protein tyrosine phosphatase, non-receptor type 5 (striatum-enriched)
  ENST ID: ENST00000396166
  CDS Start-End: 780-1295
tgtggtctgctcaggctgctataacaaaataccatagaccaggtagcttgtaagcaacaggtttatttttcacagttctggagactgggaagtccaagatcaaggcaccgtgaccctggtgaggacccacttccagggtcatgtcctcacgtggcagaaggagtgaaagctccttttgtaagagcactgatcccattcgtgagggctccgttctcatgacttcatcacctcgcaaaggccctcccttcaaataccaccatgttgggatttggtttcaacatgtgaacttaaggggacacacacattcagtccaaagccacaggttttcagcaggagagcagcatgtccagatgtgtgttgtacacagactattttgactctgtggatctgagacagttggggatgaggcagaaatctcccacactcgagcaatgataaaggtcaaggtggcagtgaagcggggagtgtgaagaggtggtaaaacttgcagcactaattgcagcactaagatagaggcgagtcacgcaggcgcaggcgaggcacagcaagaggcgaagaagagtcccggggctgggttatgtgacaaagggatgactgggggaccatttgttaagataaggaaccctggagatagtaataaattggagaaggggctcttggcccctcttggatgatcctgaagttgttggggcaggaccaaaggcaagatccatgccaacgctgctgaccaacccccaaaaccaagctggctttgggtctgtgtctggtgccactgggcaatgtggcctagatggaagggtgaaggggtcccactctcagtgttcttcctgtgttcttcctccttccatctcatctctatctctgggctggtttgtgagctgaaagagttcacacatacctggggtgggcctctgtctcctcgacagagtgggactgaggagcgaggcctgaagcattactggttcacatcctggcccgaccagaagaccccagaccgggcccccccactcctgcacctggtgcgggaggtggaggaggcagcccagcaggaggggccccactgtgcccccatcatcgtccactgcagtgcagggattgggaggaccggctgcttcattgccaccagcatctgctgccagcagctgcggcaggagggtgtggtggacatcctgaagaccacgtgccagctccgtcaggacaggggcggcatgatccagacatgcgagcagtaccagtttgtgcaccacgtcatgagcctctacgaaaagcagctgtcccaccagtccccagaatgactgcgcttctcctacaaggttctctgggcactgcccagcctgagtctcggccctcacccagggccctgcctcgggtcctgggcctgctccccgcttcctccccttcagtcagctccctctgtcctctgtcagcctggcctgacccctaccctccagcattgctcttcctactgtacatattggggagtggggggcagggtcgggaagggacatgccaggccaggcctggggccccggggcctgacccacaccacgcagaccccgggctccagtttttaacgatggttccatcaatacctgatccagaatgtttccgtgctacactttgtgtcctgctgcaatgtgttctgtctgtccatccatctctgccctctgtaccggacactgtgtctcctcagccaggaaggggtaatgagctccagcccctaagcaaccggacttgcctgcctcggcctcacccgcacttctcccaaaaggcagatgacggggagttaggcatggggagctccagaaggtcaccagagagctttcagctgagggagagttctctaggttggagtgggcatcacagccagggtggcctctgggtgtcagatgctctcaggagggtgcccagcctgtgaggcactggcaaggtagggggcagatggggcatggagaacccagaggatctaggccctgttggggaggggaggggagctcaaggtttgggtggggactcagcccagatctacgtgagacatttttctgtgtcactgtgggaaagccttcccagaagtctcactgcgtgttgctctgcgtgtgttcccatgtccatgcgtgtgttgagagcccatcaggagggcatgcatgactctttggcaacatgtattatcttggagccacgtgtttttattgctgactttaaatatttatcccacggcagacagagacatttggtgtctttttataattcgctcgtggtcattgaatagagcaataaacggagcattttgagcaaaact

SEQ ID NO: 171687 - DNA, 2796 bp, Homo sapiens
  Payload ID: 13751
  Gene Symbol: PTPN5
  Gene Name: protein tyrosine phosphatase, non-receptor type 5 (striatum-enriched)
  Uniprot ID: P54829
  ENST ID: ENST00000396168
  CDS Start-End: 169-1794
catacacactggcacagacacaagcagggacacacgcagacacacgcacactcgcgcgcgcatcctcccgccagcctgcccgcctgctcgccggcgcccggagcccgctctggccggagtgagagagagaaccacgctgctgatgactccgagggaggggccctggacatgtgctgcagtgagaggctaccgggtctcccccagccgatagtgatggaggcactggacgaggctgaagggctccaggactcacagagagagatgccgccaccccctcctccctcgccgccctcagatccagctcagaagccaccacctcgaggcgctgggagccactccctcactgtcaggagcagcctgtgcctgttcgctgcctcacagttcctgcttgcctgtggggtgctctggttcagcggttatggccacatctggtcacagaacgccacaaacctcgtctcctctttgctgacgctcctgaaacagctggaacccacggcctggcttgactctgggacgtggggagtccccagtctgctgctggtctttctgtccgtgggcctggtcctcgttaccaccctggtgtggcacctcctgaggacacccccagagccacccaccccactgccccctgaggacaggcgccagtcagtgagccgccagccctccttcacctactcagagtggatggaggagaagatcgaggatgacttcctggacctcgacccggtgcccgagactcctgtgtttgattgtgtgatggacatcaagcctgaggctgaccccacctcactcaccgtcaagtccatgggtctgcaggagaggaggggttccaatgtctccctgaccctggacatgtgcactccgggctgcaacgaggagggctttggctatctcatgtccccacgtgaggagtccgcccgcgagtacctgctcagcgcctcccgtgtcctccaagcagaagagcttcatgaaaaggccctggaccctttcctgctgcaggcggaattctttgaaatccccatgaactttgtggatccgaaagagtacgacatccctgggctggtgcggaagaaccggtacaaaaccatacttcccaaccctcacagcagagtgtgtctgacctcaccagaccctgacgaccctctgagttcctacatcaatgccaactacatccggggctatggtggggaggagaaggtgtacatcgccactcagggacccatcgtcagcacggtcgccgacttctggcgcatggtgtggcaggagcacacgcccatcattgtcatgatcaccaacatcgaggagatgaacgagaaatgcaccgagtattggccggaggagcaggtggcgtacgacggtgttgagatcactgtgcagaaagtcattcacacggaggattaccggctgcgactcatctccctcaagagtgggactgaggagcgaggcctgaagcattactggttcacatcctggcccgaccagaagaccccagaccgggcccccccactcctgcacctggtgcgggaggtggaggaggcagcccagcaggaggggccccactgtgcccccatcatcgtccactgcagtgcagggattgggaggaccggctgcttcattgccaccagcatctgctgccagcagctgcggcaggagggtgtggtggacatcctgaagaccacgtgccagctccgtcaggacaggggcggcatgatccagacatgcgagcagtaccagtttgtgcaccacgtcatgagcctctacgaaaagcagctgtcccaccagtccccagaatgactgcgcttctcctacaaggttctctgggcactgcccagcctgagtctcggccctcacccagggccctgcctcgggtcctgggcctgctccccgcttcctccccttcagtcagctccctctgtcctctgtcagcctggcctgacccctaccctccagcattgctcttcctactgtacatattggggagtggggggcagggtcgggaagggacatgccaggccaggcctggggccccggggcctgacccacaccacgcagaccccgggctccagtttttaacgatggttccatcaatacctgatccagaatgtttccgtgctacactttgtgtcctgctgcaatgtgttctgtctgtccatccatctctgccctctgtaccggacactgtgtctcctcagccaggaaggggtaatgagctccagcccctaagcaaccggacttgcctgcctcggcctcacccgcacttctcccaaaaggcagatgacggggagttaggcatggggagctccagaaggtcaccagagagctttcagctgagggagagttctctaggttggagtgggcatcacagccagggtggcctctgggtgtcagatgctctcaggagggtgcccagcctgtgaggcactggcaaggtagggggcagatggggcatggagaacccagaggatctaggccctgttggggaggggaggggagctcaaggtttgggtggggactcagcccagatctacgtgagacatttttctgtgtcactgtgggaaagccttcccagaagtctcactgcgtgttgctctgcgtgtgttcccatgtccatgcgtgtgttgagagcccatcaggagggcatgcatgactctttggcaacatgtattatcttggagccacgtgtttttattgctgactttaaatatttatcccacggcagacagagacatttggtgtctttttataattcgctcgtggtcattgaatagagcaataaacggagcattttgagcaaaa

SEQ ID NO: 171688 - DNA, 3871 bp, Homo sapiens
  Payload ID: 13751
  Gene Symbol: PTPN5
  Gene Name: protein tyrosine phosphatase, non-receptor type 5 (striatum-enriched)
  Uniprot ID: P54829
  ENST ID: ENST00000396170
  CDS Start-End: 1266-2867
agctacgtggtggctcgcctctgattccccgtgtaaaaaatggagtttaggatccctgccctgtgtgcagcccacagcctcaagcccccatggggatggaatgccggaaacctctggccagcgcactagcagcctggagaatacggaagattgtggcaggattgtggggcacatgggcagctccctgctcgtccgggcccctggtgcccacgagaaaaccaaaacaggtgcgtgccccgcgccgcacgtcaggagggcaagactcagtggagggaggggctgtccactcgctctagctccccagaggctgaacagggagaactgggaaaaaggacgcctcctcagcgtcctagaacgagtcctcggcacctggtattgcatgcgccctagtatggggccgctccacttgcgcaggtgttggcaacatgcggggagcgccacggcatgcccccaatgagccgactccctcccccaactctgccccctttgtctcgctggcccctactccttctgtctgcctgtctgtcccgtcccaggttcagcgcgcacggccctgccggggtccctctggcagttgccgtagccgcgcggcccgacccggggctcccaagaggagaaaaaatcatgaatgaaatggatgcgctgctcccactcctccgccctccttgtccaagcaaccttggcatgggggcgacgactgcggagactccgcgcagagttgctcgggagagggaggcacctgagatgaggtcaggggttaagggtctgtgatccggcccccttcgtgccccgggagcaggccgctctcccggtcccccgccccgccagccctgcgcaattcccggcgagcggcggaagcccgcccgggggcggggcggagccggggctggggggtgccaaacccacccggcggctgcgccagcgactctgcagctgaagcgcatttggtgaggcggtcgggcgagggagcgcgcacggagcgcgggacggagcgccaggcggacggaccgaaggacggaggcaccgaaggacggacgcccccgcacacgcagacgcacagagctcggcgcggcccccgtcgcatacacactggcacagacacaagcagggacacacgcagacacacgcacactcgcgcgcgcatcctcccgccagcctgcccgcctgctcgccggcgcccggagcccgctctggccgcttgctttttgctgagaaagcttcctgccctggaagatggcacccttccccatccagacaccttgggaatgaattatgagggagccaggagtgagagagagaaccacgctgctgatgactccgagggaggggccctggacatgtgctgcagtgagaggctaccgggtctcccccagccgatagtgatggaggcactggacgaggctgaagggctccaggactcacagagagagatgccgccaccccctcctccctcgccgccctcagatccagctcagaagccaccacctcgaggcgctgggagccactccctcactgtcaggagcagcctgtgcctgttcgctgcctcacagttcctgctggaacccacggcctggcttgactctgggacgtggggagtccccagtctgctgctggtctttctgtccgtgggcctggtcctcgttaccaccctggtgtggcacctcctgaggacacccccagagccacccaccccactgccccctgaggacaggcgccagtcagtgagccgccagccctccttcacctactcagagtggatggaggagaagatcgaggatgacttcctggacctcgacccggtgcccgagactcctgtgtttgattgtgtgatggacatcaagcctgaggctgaccccacctcactcaccgtcaagtccatgggtctgcaggagaggaggggttccaatgtctccctgaccctggacatgtgcactccgggctgcaacgaggagggctttggctatctcatgtccccacgtgaggagtccgcccgcgagtacctgctcagcgcctcccgtgtcctccaagcagaagagcttcatgaaaaggccctggaccctttcctgctgcaggcggaattctttgaaatccccatgaactttgtggatccgaaagagtacgacatccctgggctggtgcggaagaaccggtacaaaaccatacttcccaaccctcacagcagagtgtgtctgacctcaccagaccctgacgaccctctgagttcctacatcaatgccaactacatccggggctatggtggggaggagaaggtgtacatcgccactcagggacccatcgtcagcacggtcgccgacttctggcgcatggtgtggcaggagcacacgcccatcattgtcatgatcaccaacatcgaggagatgaacgagaaatgcaccgagtattggccggaggagcaggtggcgtacgacggtgttgagatcactgtgcagaaagtcattcacacggaggattaccggctgcgactcatctccctcaagagtgggactgaggagcgaggcctgaagcattactggttcacatcctggcccgaccagaagaccccagaccgggcccccccactcctgcacctggtgcgggaggtggaggaggcagcccagcaggaggggccccactgtgcccccatcatcgtccactgcagtgcagggattgggaggaccggctgcttcattgccaccagcatctgctgccagcagctgcggcaggagggtgtggtggacatcctgaagaccacgtgccagctccgtcaggacaggggcggcatgatccagacatgcgagcagtaccagtttgtgcaccacgtcatgagcctctacgaaaagcagctgtcccaccagtccccagaatgactgcgcttctcctacaaggttctctgggcactgcccagcctgagtctcggccctcacccagggccctgcctcgggtcctgggcctgctccccgcttcctccccttcagtcagctccctctgtcctctgtcagcctggcctgacccctaccctccagcattgctcttcctactgtacatattggggagtggggggcagggtcgggaagggacatgccaggccaggcctggggccccggggcctgacccacaccacgcagaccccgggctccagtttttaacgatggttccatcaatacctgatccagaatgtttccgtgctacactttgtgtcctgctgcaatgtgttctgtctgtccatccatctctgccctctgtaccggacactgtgtctcctcagccaggaaggggtaatgagctccagcccctaagcaaccggacttgcctgcctcggcctcacccgcacttctcccaaaaggcagatgacggggagttaggcatggggagctccagaaggtcaccagagagctttcagctgagggagagttctctaggttggagtgggcatcacagccagggtggcctctgggtgtcagatgctctcaggagggtgcccagcctgtgaggcactggcaaggtagggggcagatggggcatggagaacccagaggatctaggccctgttggggaggggaggggagctcaaggtttgggtggggactcagcccagatctacgtgagacatttttctgtgtcactgtgggaaagccttcccagaagtctcactgcgtgttgctctgcgtgtgttcccatgtccatgcgtgtgttgagagcccatcaggagggcatgcatgactctttggcaacatgtattatcttggagccacgtgtttttattgctgactttaaatatttatcccacggcagacagagacatttggtgtctttttataattcgctcgtggtcattgaatagagcaataaacggagcattttgagcaaaact

SEQ ID NO: 171689 - DNA, 2826 bp, Homo sapiens
  Payload ID: 13751
  Gene Symbol: PTPN5
  Gene Name: protein tyrosine phosphatase, non-receptor type 5 (striatum-enriched)
  ENST ID: ENST00000477854
  CDS Start-End: 711-1820
ggaattctgagctaccgcaccagcatctgagacctcacaccctgcctccctaacctaagaatccagaacacagggcctccccgacccctgagctcccagccgtacagggttctcctgagaactcctgtctgtggaggcctttctaggagactactcttttgatgtacatatttgtgaggtcctctctggaaagggctttctcttggttcccttcagtcagcttttctccaaggagagtcctgaggcctccccgggcacgcagcaccggggccctgctctcagctgcccggtctggaccttagaggttcaggagcctccatgcagggccaggttgaggctgcaggtgagctctgctgggggaacacgggggaagggggccggctccatactcagcctgctcccctgtgccccagcttgcctgtggggtgctctggttcagcggttatggccacatctggtcacagaacgccacaaacctcgtctcctctttgctgacgctcctgaaacagctggaacccacggcctggcttgactctgggacgtggggagtccccagtctgctgctggtctttctgtccgtgggcctggtcctcgttaccaccctggtgtggcacctcctgaggacacccccagagccacccaccccactgccccctgaggacaggcgccagtcagtgagccgccagccctccttcacctactcagagtggatggaggagaagatcgaggatgacttcctggacctcgacccggtgcccgagactcctgtgtttgattgtgtgatggacatcaagcctgaggctgaccccacctcactcaccgtcaagtccatgggtctgcaggagaggaggggttccaatgtctccctgaccctggacatgtgcactccgggctgcaacgaggagggctttggctatctcatgtccccacgtgaggagtccgcccgcgagtacctgctcagcgcctcccgtgtcctccaagcagaagagcttcatgaaaaggccctggaccctttcctgctgcaggcggaattctttgaaatccccatgaactttgtggatccgaaagagtacgacatccctgggctggtgcggaagaaccggtacaaaaccatacttcccaaccctcacagcagagtgtgtctgacctcaccagaccctgacgaccctctgagttcctacatcaatgccaactacatccggggctatggtggggaggagaaggtgtacatcgccactcagggacccatcgtcagcacggtcgccgacttctggcgcatggtgtggcaggagcacacgcccatcattgtcatgatcaccaacatcgaggagatgaacgagaaatgcaccgagtattggccggaggagcaggtggcgtacgacggtgttgagatcactgtgcagaaagtcattcacacggaggattaccggctgcgactcatctccctcaagagtgggactgaggagcgaggcctgaagcattactggttcacatcctggcccgaccagaagaccccagaccgggcccccccactcctgcacctggtgcgggaggtggaggaggcagcccagcaggaggggccccactgtgcccccatcatcgtccactgcagtgcagggattgggaggaccggctgcttcattgccaccagcatctgctgccagcagctgcggcaggagggtgtggtggacatcctgaagaccacgtgccagctccgtcaggacaggggcggcatgatccagacatgcgagcagtaccagtttgtgcaccacgtcatgagcctctacgaaaagcagctgtcccaccagtccccagaatgactgcgcttctcctacaaggttctctgggcactgcccagcctgagtctcggccctcacccagggccctgcctcgggtcctgggcctgctccccgcttcctccccttcagtcagctccctctgtcctctgtcagcctggcctgacccctaccctccagcattgctcttcctactgtacatattggggagtggggggcagggtcgggaagggacatgccaggccaggcctggggccccggggcctgacccacaccacgcagaccccgggctccagtttttaacgatggttccatcaatacctgatccagaatgtttccgtgctacactttgtgtcctgctgcaatgtgttctgtctgtccatccatctctgccctctgtaccggacactgtgtctcctcagccaggaaggggtaatgagctccagcccctaagcaaccggacttgcctgcctcggcctcacccgcacttctcccaaaaggcagatgacggggagttaggcatggggagctccagaaggtcaccagagagctttcagctgagggagagttctctaggttggagtgggcatcacagccagggtggcctctgggtgtcagatgctctcaggagggtgcccagcctgtgaggcactggcaaggtagggggcagatggggcatggagaacccagaggatctaggccctgttggggaggggaggggagctcaaggtttgggtggggactcagcccagatctacgtgagacatttttctgtgtcactgtgggaaagccttcccagaagtctcactgcgtgttgctctgcgtgtgttcccatgtccatgcgtgtgttgagagcccatcaggagggcatgcatgactctttggcaacatgtattatcttggagccacgtgtttttattgctgactttaaatatttatcccacggcagacagagacatttggtgtctttttataattcgctcgtggtcattgaatagagcaataaacggagcattttgagcaaaactaa

SEQ ID NO: 171690 - DNA, 2245 bp, Homo sapiens
  Payload ID: 13752
  Gene Symbol: PTPN6
  Gene Name: protein tyrosine phosphatase, non-receptor type 6
  Uniprot ID: P29350
  ENST ID: ENST00000318974
  CDS Start-End: 245-2032
gtgctctaaaacgagaagtacaagtgagttcccccaaggggtcggccgcgcctcttcctgtccccgccctgccggctgccccaggccagtggagtggcagccccagaactgggaccaccgggggtggtgaggcggcccggcactgggagctgcatctgaggcttagtccctgagctctctgcctgcccagactagctgcacctcctcattccctgcgcccccttcctctccggaagcccccaggatggtgaggtggtttcaccgagacctcagtgggctggatgcagagaccctgctcaagggccgaggtgtccacggtagcttcctggctcggcccagtcgcaagaaccagggtgacttctcgctctccgtcagggtgggggatcaggtgacccatattcggatccagaactcaggggatttctatgacctgtatggaggggagaagtttgcgactctgacagagctggtggagtactacactcagcagcagggtgtcctgcaggaccgcgacggcaccatcatccacctcaagtacccgctgaactgctccgatcccactagtgagaggtggtaccatggccacatgtctggcgggcaggcagagacgctgctgcaggccaagggcgagccctggacgtttcttgtgcgtgagagcctcagccagcctggagacttcgtgctttctgtgctcagtgaccagcccaaggctggcccaggctccccgctcagggtcacccacatcaaggtcatgtgcgagggtggacgctacacagtgggtggtttggagaccttcgacagcctcacggacctggtggagcatttcaagaagacggggattgaggaggcctcaggcgcctttgtctacctgcggcagccgtactatgccacgagggtgaatgcggctgacattgagaaccgagtgttggaactgaacaagaagcaggagtccgaggatacagccaaggctggcttctgggaggagtttgagagtttgcagaagcaggaggtgaagaacttgcaccagcgtctggaagggcagcggccagagaacaagggcaagaaccgctacaagaacattctcccctttgaccacagccgagtgatcctgcagggacgggacagtaacatccccgggtccgactacatcaatgccaactacatcaagaaccagctgctaggccctgatgagaacgctaagacctacatcgccagccagggttgtctggaggccacggtcaatgacttctggcagatggcgtggcaggagaacagccgtgtcatcgtcatgaccacccgagaggtggagaaaggccggaacaaatgcgtcccatactggcccgaggtgggcatgcagcgtgcttatgggccctactctgtgaccaactgcggggagcatgacacaaccgaatacaaactccgtaccttacaggtctccccgctggacaatggagacctgattcgggagatctggcattaccagtacctgagctggcccgaccatggggtccccagtgagcctgggggtgtcctcagcttcctggaccagatcaaccagcggcaggaaagtctgcctcacgcagggcccatcatcgtgcactgcagcgccggcatcggccgcacaggcaccatcattgtcatcgacatgctcatggagaacatctccaccaagggcctggactgtgacattgacatccagaagaccatccagatggtgcgggcgcagcgctcgggcatggtgcagacggaggcgcagtacaagttcatctacgtggccatcgcccagttcattgaaaccactaagaagaagctggaggtcctgcagtcgcagaagggccaggagtcggagtacgggaacatcacctatcccccagccatgaagaatgcccatgccaaggcctcccgcacctcgtccaaacacaaggaggatgtgtatgagaacctgcacactaagaacaagagggaggagaaagtgaagaagcagcggtcagcagacaaggagaagagcaagggttccctcaagaggaagtgagcggtgctgtcctcaggtggccatgcctcagccctgaccctgtggaagcatttcgcgatggacagactcacaacctgaacctaggagtgccccattcttttgtaatttaaatggctgcatcccccccacctctccctgaccctgtatatagcccagccaggccccaggcagggccaacccttctcctcttgtaaataaagccctgggatcact

SEQ ID NO: 171691 - DNA, 2159 bp, Homo sapiens
  Payload ID: 13752
  Gene Symbol: PTPN6
  Gene Name: protein tyrosine phosphatase, non-receptor type 6
  Uniprot ID: P29350
  ENST ID: ENST00000399448
  CDS Start-End: 150-1943
attggcctggcaggcaggatcgaggaggaagtggctgattactgagcggttcttcctcacctggcttgggccactgtgcacagctgtgccgctggctcagccccgccccctgcggccctctgccgtggcttccccctccctacagagagatgctgtcccgtgggtggtttcaccgagacctcagtgggctggatgcagagaccctgctcaagggccgaggtgtccacggtagcttcctggctcggcccagtcgcaagaaccagggtgacttctcgctctccgtcagggtgggggatcaggtgacccatattcggatccagaactcaggggatttctatgacctgtatggaggggagaagtttgcgactctgacagagctggtggagtactacactcagcagcagggtgtcctgcaggaccgcgacggcaccatcatccacctcaagtacccgctgaactgctccgatcccactagtgagaggtggtaccatggccacatgtctggcgggcaggcagagacgctgctgcaggccaagggcgagccctggacgtttcttgtgcgtgagagcctcagccagcctggagacttcgtgctttctgtgctcagtgaccagcccaaggctggcccaggctccccgctcagggtcacccacatcaaggtcatgtgcgagggtggacgctacacagtgggtggtttggagaccttcgacagcctcacggacctggtggagcatttcaagaagacggggattgaggaggcctcaggcgcctttgtctacctgcggcagccgtactatgccacgagggtgaatgcggctgacattgagaaccgagtgttggaactgaacaagaagcaggagtccgaggatacagccaaggctggcttctgggaggagtttgagagtttgcagaagcaggaggtgaagaacttgcaccagcgtctggaagggcagcggccagagaacaagggcaagaaccgctacaagaacattctcccctttgaccacagccgagtgatcctgcagggacgggacagtaacatccccgggtccgactacatcaatgccaactacatcaagaaccagctgctaggccctgatgagaacgctaagacctacatcgccagccagggttgtctggaggccacggtcaatgacttctggcagatggcgtggcaggagaacagccgtgtcatcgtcatgaccacccgagaggtggagaaaggccggaacaaatgcgtcccatactggcccgaggtgggcatgcagcgtgcttatgggccctactctgtgaccaactgcggggagcatgacacaaccgaatacaaactccgtaccttacaggtctccccgctggacaatggagacctgattcgggagatctggcattaccagtacctgagctggcccgaccatggggtccccagtgagcctgggggtgtcctcagcttcctggaccagatcaaccagcggcaggaaagtctgcctcacgcagggcccatcatcgtgcactgcagcgccggcatcggccgcacaggcaccatcattgtcatcgacatgctcatggagaacatctccaccaagggcctggactgtgacattgacatccagaagaccatccagatggtgcgggcgcagcgctcgggcatggtgcagacggaggcgcagtacaagttcatctacgtggccatcgcccagttcattgaaaccactaagaagaagctggaggtcctgcagtcgcagaagggccaggagtcggagtacgggaacatcacctatcccccagccatgaagaatgcccatgccaaggcctcccgcacctcgtccaaacacaaggaggatgtgtatgagaacctgcacactaagaacaagagggaggagaaagtgaagaagcagcggtcagcagacaaggagaagagcaagggttccctcaagaggaagtgagcggtgctgtcctcaggtggccatgcctcagccctgaccctgtggaagcatttcgcgatggacagactcacaacctgaacctaggagtgccccattcttttgtaatttaaatggctgcatcccccccacctctccctgaccctgtatatagcccagccaggccccaggcagggccaacccttctcctcttgtaaataaagccctgggatcactgtg

SEQ ID NO: 171692 - DNA, 2389 bp, Homo sapiens
  Payload ID: 13752
  Gene Symbol: PTPN6
  Gene Name: protein tyrosine phosphatase, non-receptor type 6
  Uniprot ID: P29350
  ENST ID: ENST00000456013
  CDS Start-End: 243-2117
gctctaaaacgagaagtacaagtgagttcccccaaggggtcggccgcgcctcttcctgtccccgccctgccggctgccccaggccagtggagtggcagccccagaactgggaccaccgggggtggtgaggcggcccggcactgggagctgcatctgaggcttagtccctgagctctctgcctgcccagactagctgcacctcctcattccctgcgcccccttcctctccggaagcccccaggatggtgaggtggtttcaccgagacctcagtgggctggatgcagagaccctgctcaagggccgaggtgtccacggtagcttcctggctcggcccagtcgcaagaaccagggtgacttctcgctctccgtcagggtgggggatcaggtgacccatattcggatccagaactcaggggatttctatgacctgtatggaggggagaagtttgcgactctgacagagctggtggagtactacactcagcagcagggtgtcctgcaggaccgcgacggcaccatcatccacctcaagtacccgctgaactgctccgatcccactagtgagaggtggtaccatggccacatgtctggcgggcaggcagagacgctgctgcaggccaagggcgagccctggacgtttcttgtgcgtgagagcctcagccagcctggagacttcgtgctttctgtgctcagtgaccagcccaaggctggcccaggctccccgctcagggtcacccacatcaaggtcatgtgcgagggtggacgctacacagtgggtggtttggagaccttcgacagcctcacggacctggtggagcatttcaagaagacggggattgaggaggcctcaggcgcctttgtctacctgcggcagccgtactatgccacgagggtgaatgcggctgacattgagaaccgagtgttggaactgaacaagaagcaggagtccgaggatacagccaaggctggcttctgggaggagtttgagagtttgcagaagcaggaggtgaagaacttgcaccagcgtctggaagggcagcggccagagaacaagggcaagaaccgctacaagaacattctcccctttgaccacagccgagtgatcctgcagggacgggacagtaacatccccgggtccgactacatcaatgccaactacatcaagaaccagctgctaggccctgatgagaacgctaagacctacatcgccagccagggttgtctggaggccacggtcaatgacttctggcagatggcgtggcaggagaacagccgtgtcatcgtcatgaccacccgagaggtggagaaaggccggaacaaatgcgtcccatactggcccgaggtgggcatgcagcgtgcttatgggccctactctgtgaccaactgcggggagcatgacacaaccgaatacaaactccgtaccttacaggtctccccgctggacaatggagacctgattcgggagatctggcattaccagtacctgagctggcccgaccatggggtccccagtgagcctgggggtgtcctcagcttcctggaccagatcaaccagcggcaggaaagtctgcctcacgcagggcccatcatcgtgcactgcagcgccggcatcggccgcacaggcaccatcattgtcatcgacatgctcatggagaacatctccaccaagggcctggactgtgacattgacatccagaagaccatccagatggtgcgggcgcagcgctcgggcatggtgcagacggaggcgcagtacaagttcatctacgtggccatcgcccagttcattgaaaccactaagaagaagctggaggtcctgcagtcgcagaagggccaggagtcggagtacgggaacatcacctatcccccagccatgaagaatgcccatgccaaggcctcccgcacctcgtccaagagcttggagtctagtgcagggaccgtggctgcgtcacctgtgagacggggtggccagaggggactgccagtgccgggtccccctgtgctgtctcctgacctgcaccaactgcctgtacttgcccccctgcacccggctgcagacacaaggaggatgtgtatgagaacctgcacactaagaacaagagggaggagaaagtgaagaagcagcggtcagcagacaaggagaagagcaagggttccctcaagaggaagtgagcggtgctgtcctcaggtggccatgcctcagccctgaccctgtggaagcatttcgcgatggacagactcacaacctgaacctaggagtgccccattcttttgtaatttaaatggctgcatcccccccacctctccctgaccctgtatatagcccagccaggccccaggcagggccaacccttctcctcttgtaaataaagccctgggatcactgtg

SEQ ID NO: 171693 - DNA, 579 bp, Homo sapiens
  Payload ID: 13752
  Gene Symbol: PTPN6
  Gene Name: protein tyrosine phosphatase, non-receptor type 6
  ENST ID: ENST00000538715
  CDS Start-End: 85-579
ccttgctgtgctctaaaacgagaagtacaaactagctgcacctcctcattccctgcgcccccttcctctccggaagcccccaggatggtgaggtggtttcaccgagacctcagtgggctggatgcagagaccctgctcaagggccgaggtgtccacggtagcttcctggctcggcccagtcgcaagaaccagggtgacttctcgctctccgtcagggtgggggatcaggtgacccatattcggatccagaactcaggggatttctatgacctgtatggaggggagaagtttgcgactctgacagagctggtggagtactacactcagcagcagggtgtcctgcaggaccgcgacggcaccatcatccacctcaagtacccgctgaactgctccgatcccactagtgagaggtggtaccatggccacatgtctggcgggcaggcagagacgctgctgcaggccaagggcgagccctggacgtttcttgtgcgtgagagcctcagccagcctggagacttcgtgctttctgtgctcagtgaccagcccaaggctggcccaggctccccgctcagggtcacc

SEQ ID NO: 171694 - DNA, 570 bp, Homo sapiens
  Payload ID: 13752
  Gene Symbol: PTPN6
  Gene Name: protein tyrosine phosphatase, non-receptor type 6
  ENST ID: ENST00000542462
  CDS Start-End: 139-570
aactgggaccaccgggggtggtgaggcggcccggcactgggagctgcatctgaggcttagtccctgagctctctgcctgcccagactagctgcacctcctcattccctgcgcccccttcctctccggaagcccccaggatggtgagggtgggggatcaggtgacccatattcggatccagaactcaggggatttctatgacctgtatggaggggagaagtttgcgactctgacagagctggtggagtactacactcagcagcagggtgtcctgcaggaccgcgacggcaccatcatccacctcaagtacccgctgaactgctccgatcccactagtgagaggtggtaccatggccacatgtctggcgggcaggcagagacgctgctgcaggccaagggcgagccctggacgtttcttgtgcgtgagagcctcagccagcctggagacttcgtgctttctgtgctcagtgaccagcccaaggctggcccaggctccccgctcagggtcacccacatcaaggtcatgtgcgagggtggacgctacacagtgggtggtttggagaccttcgac

SEQ ID NO: 171695 - DNA, 543 bp, Homo sapiens
  Payload ID: 13752
  Gene Symbol: PTPN6
  Gene Name: protein tyrosine phosphatase, non-receptor type 6
  ENST ID: ENST00000535462
  CDS Start-End: 141-323
agaactgggaccaccgggggtggtgaggcggcccggcactgggagctgcatctgaggcttagtccctgagctctctgcctgcccagactagctgcacctcctcattccctgcgcccccttcctctccggaagcccccaggatggtgaggtggtttcaccgagacctcagtgggctggatgcagagaccctgctcaagggccgaggtgtccacggtagcttcctggctcggcccagtcgcaagaaccagggtgacttctcgctctccgtcagaactcaggggatttctatgacctgtatggaggggagaagtttgcgactctgacagagctggtggagtactacactcagcagcagggtgtcctgcaggaccgcgacggcaccatcatccacctcaagtacccgctgaactgctccgatcccactagtgagaggtggtaccatggccacatgtctggcgggcaggcagagacgctgctgcaggccaagggcgagccctggacgtttcttgtgcgtgagagcctcagccagcctggagacttcgt

SEQ ID NO: 171696 - DNA, 650 bp, Homo sapiens
  Payload ID: 13752
  Gene Symbol: PTPN6
  Gene Name: protein tyrosine phosphatase, non-receptor type 6
  ENST ID: ENST00000543115
  CDS Start-End: 259-650
cgctttggggctgcagggaagctggccgctgtgggcggtctcgggccagccccgccccacctgtccttttcctggagactattagtccagggtttgtccctgcagtgccattggcctggcaggcaggatcgaggaggaagtggctgattactgagcggttcttcctcacctggcttgggccactgtgcacagctgtgccgctggctcagccccgccccctgcggccctctgccgtggcttccccctccctacagagagatgctgtcccgtggctgcacctcctcattccctgcgcccccttcctctccggaagcccccaggatggtgaggtggtttcaccgagacctcagtgggctggatgcagagaccctgctcaagggccgaggtgtccacggtagcttcctggctcggcccagtcgcaagaaccagggtgacttctcgctctccgtcagggtgggggatcaggtgacccatattcggatccagaactcaggggatttctatgacctgtatggaggggagaagtttgcgactctgacagagctggtggagtactacactcagcagcagggtgtcctgcaggaccgcgacggcaccatcatccacctcaagtacccgctgaactgctccgatcccactagtgagaggtg

SEQ ID NO: 171697 - DNA, 656 bp, Homo sapiens
  Payload ID: 13752
  Gene Symbol: PTPN6
  Gene Name: protein tyrosine phosphatase, non-receptor type 6
  ENST ID: ENST00000542848
  CDS Start-End: 153-329
gccattggcctggcaggcaggatcgaggaggaagtggctgattactgagcggttcttcctcacctggcttgggccactgtgcacagctgtgccgctggctcagccccgccccctgcggccctctgccgtggcttccccctccctacagagagatgctgtcccgtgggtggtttcaccgagacctcagtgggctggatgcagagaccctgctcaagggccgaggtgtccacggtagcttcctggctcggcccagtcgcaagaaccagggtgacttctcgctctccgtcaggaccgcgacggcaccatcatccacctcaagtacccgctgaactgctccgatcccactagtgagaggtggtaccatggccacatgtctggcgggcaggcagagacgctgctgcaggccaagggcgagccctggacgtttcttgtgcgtgagagcctcagccagcctggagacttcgtgctttctgtgctcagtgaccagcccaaggctggcccaggctccccgctcagggtcacccacatcaaggtcatgtgcgagggtggacgctacacagtgggtggtttggagaccttcgacagcctcacggacctggtggagcatttcaagaagacggggattgaggaggcctcaggcgcctttgtctacctgc

SEQ ID NO: 171698 - DNA, 592 bp, Homo sapiens
  Payload ID: 13752
  Gene Symbol: PTPN6
  Gene Name: protein tyrosine phosphatase, non-receptor type 6
  ENST ID: ENST00000541698
  CDS Start-End: 141-592
agaactgggaccaccgggggtggtgaggcggcccggcactgggagctgcatctgaggcttagtccctgagctctctgcctgcccagactagctgcacctcctcattccctgcgcccccttcctctccggaagcccccaggatggtgaggtggtttcaccgagacctcagtgggctggatgcagagaccctgctcaagggccgaggtgtccacggtagcttcctggctcggcccagtcgcaagaaccagggtgacttctcgctctccgtcagggtgggggatcaggtgacccatattcggatccagaactcaggggatttctatgacctgtatggaggggagaagtttgcgactctgacagagctggtggagtactacactcagcagcagggtgtcctgcaggaccgcgacggcaccatcatccacctcaagtacccgctgaactgctccgatcccactagtgagaggtggtaccatggccacatgtctggcgggcaggcagagacgctgctgcaggctccccgctcagggtcacccacatcaaggtcatgtgcgagggtggacgctacacagtgggtggtttggagaccttc

SEQ ID NO: 171699 - DNA, 602 bp, Homo sapiens
  Payload ID: 13752
  Gene Symbol: PTPN6
  Gene Name: protein tyrosine phosphatase, non-receptor type 6
  ENST ID: ENST00000536013
  CDS Start-End: 77-247
cctgagctctctgcctgcccagactagctgcacctcctcattccctgcgcccccttcctctccggaagcccccaggatggtgaggtggtttcaccgagacctcagtgggctggatgcagagaccctgctcaagggccgaggtgtccacggtagcttcctggctcggcccagtcgcaagaaccagggtgacttctcgctctccgtcaggaccgcgacggcaccatcatccacctcaagtacccgctgaactgctccgatcccactagtgagaggtggtaccatggccacatgtctggcgggcaggcagagacgctgctgcaggccaagggcgagccctggacgtttcttgtgcgtgagagcctcagccagcctggagacttcgtgctttctgtgctcagtgaccagcccaaggctggcccaggctccccgctcagggtcacccacatcaaggtcatgtgcgagggtggacgctacacagtgggtggtttggagaccttcgacagcctcacggacctggtggagcatttcaagaagacggggattgaggaggcctcaggcgcctttgtctacctgcggcagccgtactatgccacgagggtgaa

SEQ ID NO: 171700 - DNA, 959 bp, Homo sapiens
  Payload ID: 13752
  Gene Symbol: PTPN6
  Gene Name: protein tyrosine phosphatase, non-receptor type 6
  ENST ID: ENST00000545153
  CDS Start-End: 142-360
cagaactgggaccaccgggggtggtgaggcggcccggcactgggagctgcatctgaggcttagtccctgagctctctgcctgcccagactagctgcacctcctcattccctgcgcccccttcctctccggaagcccccaggatggtgaggtggtttcaccgagacctcagtgggctggatgcagagaccctgctcaagggccgaggtgtccacggtagcttcctggctcggcccagtcgcaagaaccagggtgacttctcgctctccgtcaggacctcagccgatccctgccctcctgcctctactcctgcaccgactggcctcaccgcctggtgccctgcagggtgggggatcaggtgacccatattcggatccagaactcaggggatttctatgacctgtatggaggggagaagtttgcgactctgacagagctggtggagtactacactcagcagcagggtgtcctgcaggaccgcgacggcaccatcatccacctcaagtacccgctgaactgctccgatcccactagtgagaggtggtaccatggccacatgtctggcgggcaggcagagacgctgctgcaggccaagggcgagccctggacgtttcttgtgcgtgagagcctcagccagcctggagacttcgtgctttctgtgctcagtgaccagcccaaggctggcccaggctccccgctcagggtcacccacatcaaggtcatgtgcgagggtggacgctacacagtgggtggtttggagaccttcgacagcctcacggacctggtggagcatttcaagaagacggggattgaggaggcctcaggcgcctttgtctacctgcggcagccgtactatgccacgagggtgaatgcggctgacattgagaaccgagtgttggaactgaacaagaagcaggagtccgaggatacagccaaggctggcttctgggaggagtttgag

SEQ ID NO: 171701 - DNA, 3765 bp, Homo sapiens
  Payload ID: 13753
  Gene Symbol: PTPN7
  Gene Name: protein tyrosine phosphatase, non-receptor type 7
  Uniprot ID: P35236
  ENST ID: ENST00000309017
  CDS Start-End: 775-2172
aaaaggaggcgtgcagcgagcatgaaccggctgggctgctggcccgcaaggagcctgccaaggtcaggcaggggcagtgggcagaggagtcttggacttgggggccacccttcaggtcccaggcatccaggcaccccagcagcgaagaggacatgggagtcccctggtgtgagggccagagactgtccactgtctgtaagtcttctaagtagatgtcagggttctgggaggaggcctgcagggggctgagggcccaggggaagcccctcggactccctcccacaagtggactctgctatctgcttcctgctgggctggcctacactcaggccgtgggctgtggagagctgggccgtggcacaggcgtggagacgacctttttggcctggccccggccctttccttcacattgtgaggcatggattcttgcttcttctttttccccaccccgagtctgtgccacatctgctctgggaagatgtggtctgtgcttggccatgaattcccaaggcttgaagcagcaagggctttgagggagagggccttgagggagagggccttgagggagagggctgtggggcagaagcagagaaggagaaataagcctccggccaaggtcaggttgagcaggagagccttgggttctttgtgggacagcacagagctgggggtcaggcgagctgtgcccagcaagtaggcagcggctggatgtgacaaagacccagaggagaaacacagaagaggggagagggtctggaagctggggaaagcaggatggtcgggaaggcctggcccctcacccattcccagggaacggggccttgggccccagaagggcacaggcgggaggcagccgacccctggtggcagcggcagcaggcacaggagggcagaatgcagctggggtgtgcgtgggtggcagcaaggaggggcggagggaggaagctggcttcctggagccttctcagccctcaaagacagaccgacagacagacagacagctggcaagaggcagcctgggggccacagctgcttcagcagacctcatggctgagtgagcctcccctgggcccagcaccccacctcagcatggtccaagcccatggggggcgctccagagcacagccgttgaccttgtctttgggggcagccatgacccagcctccgcctgaaaaaacgccagccaagaagcatgtgcgactgcaggagaggcggggctccaatgtggctctgatgctggacgttcggtccctgggggccgtagaacccatctgctctgtgaacacaccccgggaggtcaccctacactttctgcgcactgctggacacccccttacccgctgggcccttcagcgccagccacccagccccaagcaactggaagaagaattcttgaagatcccttcaaactttgtcagccccgaagacctggacatccctggccacgcctccaaggaccgatacaagaccatcttgccaaatccccagagccgtgtctgtctaggccgggcacagagccaggaggacggagattacatcaatgccaactacatccgaggctatgacgggaaggagaaggtctacattgccacccagggccccatgcccaacactgtgtcggacttctgggagatggtgtggcaagaggaagtgtccctcattgtcatgctcactcagctccgagagggcaaggagaaatgtgtccactactggcccacagaagaggaaacctatggacccttccagatccgcatccaggacatgaaagagtgcccagaatacactgtgcggcagctcaccatccagtaccaggaagagcgccggtcagtaaagcacatcctcttttcggcctggccagaccatcagacaccagaatcagctgggcccctgctgcgcctagtggcagaggtggaggagagcccggagacagccgcccaccccgggcctatcgtagtccactgcagtgcagggattggccggacgggctgcttcatcgccacgcgaattggctgtcaacagctgaaagcccgaggagaagtggacattctgggtattgtgtgccaactgcggctagacagaggggggatgatccagacggcagagcagtaccagttcctgcaccacactttggccctgtatgcaggccagctgcctgaggaacccagcccctgacccctgccaccctccggtggcccaggtgcctacctccctcaagcctgggaaggtgggtctggggaaagtgggccgagtgatctgggggtaccccttgggttggtgtggggaaggagtgcctccttagtggtgcttgcagtcacaggaagcagcagcagtaaggacaaggggccggattccaggtcttcaacactggccactcctctgcttcctctgttggccccagatggacagtaaggggaacctccaatgtctctctgaacttaaagacaggagctggcatttatgacagacaaagaaagaagcccaggtgtcctggtgttctctgagacactctttgtgagcttcagtttcctgttctataacatgaacataagtgcttagctgccatgagggaaaagtaatgagagaagtttctagaagccactccagccactccttcctggggctgacaaaagggtgattccaagatcatccttcacccgaggtcctgcccaagcacaggccagatgcaagaatggggaaaagtctggtcctgatctccaagtctcaacatcctatcagtgactctgctccctgaccacacatcggaagggctggatgaccccaatcaaaagaaagaacaaggactctggttacccttgcctccacccatgtgtcataagagtaggctacagaggtgaccaggcctggcagttgaaatctctggaagagggaacatgtggggactactcagaggcaaagaggagctgctcctgcctccatggttgctggccactcccaccaactactcttagggaggctaagcagtctctgttttgcttccatggctcaaataataccctgggtatgcaggacccactataccttgcatttgctgagtacacctagagagcttggctgtttccaaaaacaatcagggtcataaccatccatgcagacatggaggctcggctgaaccaggactcctcactgtctacctgagagaatgagcacccctcatccatctcagcatcaacacaatttccaggggacctcaggtctacctcaggactgaacgccacacctcaggattcctcctccttgaatctgagactggctgcccattctgagatggggatgaaggtaagatgccgcatcaccaggcacgccgcccctgacagctgccttgataccagctctctgtggaaacccccgaggagttggatctggagaacagctgggcctcctcactcaggacttctctcctgaagaacacgcagtgctaaaactgaggatgatttccctaatgcttctgcttggccttatggaggagctgctccttccttacagccttggggatggacttgcccacacctccacctcccctgagccctgtgagaggcacgactgtctatgccaatgaggctcggtggggggctctcaagtgcctgatcctgccctgggctcagagccagcccagagggaagcaactgcacagccccacaggccctccctggcactgtccccccaaccccatctcagagctcagagggtacaagctccagaacagtaaccaagtgggaaaataaagacttcttggatgactgactc

SEQ ID NO: 171702 - DNA, 3265 bp, Homo sapiens
  Payload ID: 13753
  Gene Symbol: PTPN7
  Gene Name: protein tyrosine phosphatase, non-receptor type 7
  Uniprot ID: P35236
  ENST ID: ENST00000367279
  CDS Start-End: 473-1672
ccagaaacagacctgggagtggaacagcagcagttaggagaggaccctgctggggtccaggagcccgcctgcctggctgcccaaccagctccaacactgctggaggcctccattctctgttcaggggaaggcccactggttagctcagagatggcttctgcgtgctttctcccttccgtcctagagaacacatattttctgtttcctcccttgccttctcccacttggacctgctcagagccctgtgtactctggtgtgtggcctctctcccctctctcttttcctccttctggattctttcctatcttcatccacaatctctaccctttatcttgccgttactctaccccgagactgccttctgccctgggtcccaccaaatagatcctgtccttcccttagtgaaaatgaggccacctcttggggaacagaagacgccccagtgaaaacagagtgcaaacctggcctggcatgggagcctccttctggccaatcaggcaggccagagaacagcagcggagggccctgtctttcaggcagacctcatggctgagtgagcctcccctgggcccagcaccccacctcagcatggtccaagcccatggggggcgctccagagcacagccgttgaccttgtctttgggggcagccatgacccagcctccgcctgaaaaaacgccagccaagaagcatgtgcgactgcaggagaggcggggctccaatgtggctctgatgctggacgttcggtccctgggggccgtagaacccatctgctctgtgaacacaccccgggaggtcaccctacactttctgcgcactgctggacacccccttacccgctgggcccttcagcgccagccacccagccccaagcaactggaagaagaattcttgaagatcccttcaaactttgtcagccccgaagacctggacatccctggccacgcctccaaggaccgatacaagaccatcttgccaaatccccagagccgtgtctgtctaggccgggcacagagccaggaggacggagattacatcaatgccaactacatccgaggctatgacgggaaggagaaggtctacattgccacccagggccccatgcccaacactgtgtcggacttctgggagatggtgtggcaagaggaagtgtccctcattgtcatgctcactcagctccgagagggcaaggagaaatgtgtccactactggcccacagaagaggaaacctatggacccttccagatccgcatccaggacatgaaagagtgcccagaatacactgtgcggcagctcaccatccagtaccaggaagagcgccggtcagtaaagcacatcctcttttcggcctggccagaccatcagacaccagaatcagctgggcccctgctgcgcctagtggcagaggtggaggagagcccggagacagccgcccaccccgggcctatcgtagtccactgcagtgcagggattggccggacgggctgcttcatcgccacgcgaattggctgtcaacagctgaaagcccgaggagaagtggacattctgggtattgtgtgccaactgcggctagacagaggggggatgatccagacggcagagcagtaccagttcctgcaccacactttggccctgtatgcaggccagctgcctgaggaacccagcccctgacccctgccaccctccggtggcccaggtgcctacctccctcaagcctgggaaggtgggtctggggaaagtgggccgagtgatctgggggtaccccttgggttggtgtggggaaggagtgcctccttagtggtgcttgcagtcacaggaagcagcagcagtaaggacaaggggccggattccaggtcttcaacactggccactcctctgcttcctctgttggccccagatggacagtaaggggaacctccaatgtctctctgaacttaaagacaggagctggcatttatgacagacaaagaaagaagcccaggtgtcctggtgttctctgagacactctttgtgagcttcagtttcctgttctataacatgaacataagtgcttagctgccatgagggaaaagtaatgagagaagtttctagaagccactccagccactccttcctggggctgacaaaagggtgattccaagatcatccttcacccgaggtcctgcccaagcacaggccagatgcaagaatggggaaaagtctggtcctgatctccaagtctcaacatcctatcagtgactctgctccctgaccacacatcggaagggctggatgaccccaatcaaaagaaagaacaaggactctggttacccttgcctccacccatgtgtcataagagtaggctacagaggtgaccaggcctggcagttgaaatctctggaagagggaacatgtggggactactcagaggcaaagaggagctgctcctgcctccatggttgctggccactcccaccaactactcttagggaggctaagcagtctctgttttgcttccatggctcaaataataccctgggtatgcaggacccactataccttgcatttgctgagtacacctagagagcttggctgtttccaaaaacaatcagggtcataaccatccatgcagacatggaggctcggctgaaccaggactcctcactgtctacctgagagaatgagcacccctcatccatctcagcatcaacacaatttccaggggacctcaggtctacctcaggactgaacgccacacctcaggattcctcctccttgaatctgagactggctgcccattctgagatggggatgaaggtaagatgccgcatcaccaggcacgccgcccctgacagctgccttgataccagctctctgtggaaacccccgaggagttggatctggagaacagctgggcctcctcactcaggacttctctcctgaagaacacgcagtgctaaaactgaggatgatttccctaatgcttctgcttggccttatggaggagctgctccttccttacagccttggggatggacttgcccacacctccacctcccctgagccctgtgagaggcacgactgtctatgccaatgaggctcggtggggggctctcaagtgcctgatcctgccctgggctcagagccagcccagagggaagcaactgcacagccccacaggccctccctggcactgtccccccaaccccatctcagagctcagagggtacaagctccagaacagtaaccaagtgggaaaataaagacttcttggatgactgactc

SEQ ID NO: 171703 - DNA, 575 bp, Homo sapiens
  Payload ID: 13753
  Gene Symbol: PTPN7
  Gene Name: protein tyrosine phosphatase, non-receptor type 7
  ENST ID: ENST00000435759
  CDS Start-End: 117-575
aaagacagaccgacagacagacagacagctggcaagaggcagcctgggggccacagctgcttcagcagacctcatggctgagtgagcctcccctgggcccagcaccccacctcagcatggtccaagcccatggggggcgctccagagcacagccgttgaccttgtctttgggggcagccatgacccagcctccgcctgaaaaaacgccagccaagaagcatgtgcgactgcaggagagtggtgggctatgcctgcaggcggggctccaatgtggctctgatgctggacgttcggtccctgggggccgtagaacccatctgctctgtgaacacaccccgggaggtcaccctacactttctgcgcactgctggacacccccttacccgctgggcccttcagcgccagccacccagccccaagcaactggaagaagaattcttgaagatcccttcaaactttgtcagccccgaagacctggacatccctggccacgcctccaaggaccgatacaagaccatcttgccaaatccccagagccgtgtctgtctaggccgggcacagagccaggaggacgg

SEQ ID NO: 171704 - DNA, 551 bp, Homo sapiens
  Payload ID: 13753
  Gene Symbol: PTPN7
  Gene Name: protein tyrosine phosphatase, non-receptor type 7
  ENST ID: ENST00000486116
  CDS Start-End: 132-551
aaagacagaccgacagacagacagacagctggcaagaggcagcctgggggccacagctgcttcaggccctgtctttcaggcagacctcatggctgagtgagcctcccctgggcccagcaccccacctcagcatggtccaagcccatggggggcgctccagagcacagccgttgaccttgtctttgggggcagccatgacccagcctccgcctgaaaaaacgccagccaagaagcatgtgcgactgcaggagaggcggggctccaatgtggctctgatgctggacgttcggtccctgggggccgtagaacccatctgctctgtgaacacaccccgggaggtcaccctacactttctgcgcactgctggacacccccttacccgctgggcccttcagcgccagccacccagccccaagcaactggaagaagaattcttgaagatcccttcaaactttgtcagccccgaagacctggacatccctggccacgcctccaaggaccgatacaagaccatcttgccaaatccccagagccgtgtctgtctaggccgg

SEQ ID NO: 171705 - DNA, 560 bp, Homo sapiens
  Payload ID: 13753
  Gene Symbol: PTPN7
  Gene Name: protein tyrosine phosphatase, non-receptor type 7
  ENST ID: ENST00000492451
  CDS Start-End: 255-560
acaaggtaaaaggaggcgtgcagcgagcatgaaccggctgggctgctggcccgcaaggagcctgccaaggtcaggcaggggcagtgggcagaggagtcttggacttgggggccacccttcaggtcccaggcatccaggcaccccagcagcgaagaggacatgggagtcccctggtgtgagggccagagactgtccactgtctgcagacctcatggctgagtgagcctcccctgggcccagcaccccacctcagcatggtccaagcccatggggggcgctccagagcacagccgttgaccttgtctttgggggcagccatgacccagcctccgcctgaaaaaacgccagccaagaagcatgtgcgactgcaggagaggcggggctccaatgtggctctgatgctggacgttcggtccctgggggccgtagaacccatctgctctgtgaacacaccccgggaggtcaccctacactttctgcgcactgctggacacccccttacccgctgggcccttcagcgccagccacccagccccaagcaactggaagaagaattcttg

SEQ ID NO: 171706 - DNA, 673 bp, Homo sapiens
  Payload ID: 13753
  Gene Symbol: PTPN7
  Gene Name: protein tyrosine phosphatase, non-receptor type 7
  ENST ID: ENST00000477625
  CDS Start-End: 308-673
ggaggaagctggcttcctggagccttctcagccctcaaagacagaccgacagacagacagacagctggcaagaggcagcctgggggccacagctgcttcaaagatcccttcaaactttgtcagccccgaagacctggacatccctggccacgcctccaaggaccgatacaagaccatcttgccaaatccccagagccgtgtctgtctaggccgggcacagagccaggaggacggagattacatcaatgccaactacatccgaggctatgacgggaaggagaaggtctacattgccacccagggccccatgcccaacactgtgtcggacttctgggagatggtgtggcaagaggaagtgtccctcattgtcatgctcactcagctccgagagggcaaggagaaatgtgtccactactggcccacagaagaggaaacctatggacccttccagatccgcatccaggacatgaaagagtgcccagaatacactgtgcggcagctcaccatccagtaccaggaagagcgccggtcagtaaagcacatcctcttttcggcctggccagaccatcagacaccagaatcagctgggcccctgctgcgcctagtggcagaggtggaggagagcccggagacagccgcccaccccgggcctatcgtagtccactgcaggtgc

SEQ ID NO: 171707 - DNA, 1432 bp, Homo sapiens
  Payload ID: 13753
  Gene Symbol: PTPN7
  Gene Name: protein tyrosine phosphatase, non-receptor type 7
  ENST ID: ENST00000477554
  CDS Start-End: 1-1326
aaaaggaggcgtgcagcgagcatgaaccggctgggctgctggcccgcaaggagcctgccaaggtcaggcaggggcagtgggcagaggagtcttggacttgggggccacccttcaggtcccaggcatccaggcaccccagcagcgaagaggacatgggagtcccctggtgtgagggccagagactgtccactgtctacctcatggctgagtgagcctcccctgggcccagcaccccacctcagcatggtccaagcccatggggggcgctccagagcacagccgttgaccttgtctttgggggcagccatgacccagcctccgcctgaaaaaacgccagccaagaagcatgtgcgactgcaggagaggcggggctccaatgtggctctgatgctggacgttcggtccctgggggccgtagaacccatctgctctgtgaacacaccccgggaggtcaccctacactttctgcgcactgctggacacccccttacccgctgggcccttcagcgccagccacccagccccaagcaactggaagaagaattcttgaagatcccttcaaactttgtcagccccgaagacctggacatccctggccacgcctccaaggaccgatacaagaccatcttgccaaatccccagagccgtgtctgtctaggccgggcacagagccaggaggacggagattacatcaatgccaactacatccgaggctatgacgggaaggagaaggtctacattgccacccagggccccatgcccaacactgtgtcggacttctgggagatggtgtggcaagaggaagtgtccctcattgtcatgctcactcagctccgagagggcaaggagaaatgtgtccactactggcccacagaagaggaaacctatggacccttccagatccgcatccaggacatgaaagagtgcccagaatacactgtgcggcagctcaccatccagtaccaggaagagcgccggtcagtaaagcacatcctcttttcggcctggccagaccatcagacaccagaatcagctgggcccctgctgcgcctagtggcagaggtggaggagagcccggagacagccgcccaccccgggcctatcgtagtccactgcagtgcagggattggccggacgggctgcttcatcgccacgcgaattggctgtcaacagctgaaagcccgaggagaagtggacattctgggtattgtgtgccaactgcggctagacagaggggggatgatccagacggcagagcagtaccagttcctgcaccacactttggccctgtatgcaggccagctgcctgaggaacccagcccctgacccctgccaccctccggtggcccaggtgcctacctccctcaagcctgggaaggtgggtctggggaaagtgggccgagtgatctgggggtaccccttgggttggtgt

SEQ ID NO: 171708 - DNA, 577 bp, Homo sapiens
  Payload ID: 13753
  Gene Symbol: PTPN7
  Gene Name: protein tyrosine phosphatase, non-receptor type 7
  ENST ID: ENST00000467283
  CDS Start-End: 117-577
aaagacagaccgacagacagacagacagctggcaagaggcagcctgggggccacagctgcttcagcagacctcatggctgagtgagcctcccctgggcccagcaccccacctcagcatggtccaagcccatggggggcgctccagagcacagccgttgaccttgtctttgggggcagccatgacccagcctccgcctgaaaaaacgccagccaagaagcatgtgcgactgcaggagaggcggggctccaatgtggctctgatgctggacgttcggtccctgggggccgtagaacccatctgctctgtgaacacaccccgggaggtcaccctacactttctgcgcactgctggacacccccttacccgctgggcccttcagcgccagccacccagccccaagcaactggaagaagaattcttgatcccttcaaactttgtcagccccgaagacctggacatccctggccacgcctccaaggaccgatacaagaccatcttgccaaatccccagagccgtgtctgtctaggccgggcacagagccaggaggacggagattacatcaatgccaactacat

SEQ ID NO: 171709 - DNA, 1147 bp, Homo sapiens
  Payload ID: 13753
  Gene Symbol: PTPN7
  Gene Name: protein tyrosine phosphatase, non-receptor type 7
  ENST ID: ENST00000462815
  CDS Start-End: 117-467
aaagacagaccgacagacagacagacagctggcaagaggcagcctgggggccacagctgcttcagcagacctcatggctgagtgagcctcccctgggcccagcaccccacctcagcatggtccaagcccatggggggcgctccagagcacagccgttgaccttgtctttgggggcagccatgacccagcctccgcctgaaaaaacgccagccaagaagcatgtgcgactgcaggagaggcggggctccaatgtggctctgatgctggacgttcggtccctgggggccgtagaacccatctgctctgtgaacacaccccgggaggtcaccctacactttctgcgcactgctggacacccccttacccgctgggcccttcagcgccagccacccagccccaagcaactggaagaagaattcttgaagaggaaacctatggacccttccagatccgcatccaggacatgaaagagtgcccagaatacactgtgcggcagctcaccatccagtaccaggaagagcgccggtcagtaaagcacatcctcttttcggcctggccagaccatcagacaccagaatcagctgggcccctgctgcgcctagtggcagaggtggaggagagcccggagacagccgcccaccccgggcctatcgtagtccactgcagtgcagggattggccggacgggctgcttcatcgccacgcgaattggctgtcaacagctgaaagcccgaggagaagtggacattctgggtattgtgtgccaactgcggctagacagaggggggatgatccagacggcagagcagtaccagttcctgcaccacactttggccctgtatgcaggccagctgcctgaggaacccagcccctgacccctgccaccctccggtggcccaggaagcagcagcagtaaggacaaggggccggattccaggtcttcaacactggccactcctctgcttcctctgttggccccagatggacagtaaggggaacctccaatgtctctctgaacttaaagacaggagctggcatttatgacagacaaagaaagaagcccaggtgtcctggtgttctctgagacactctttgtgagcttcagtttcctgttctataacatgaacataagtgcttagctgccatga

SEQ ID NO: 171710 - DNA, 1463 bp, Homo sapiens
  Payload ID: 13753
  Gene Symbol: PTPN7
  Gene Name: protein tyrosine phosphatase, non-receptor type 7
  ENST ID: ENST00000496197
  CDS Start-End: 117-539
aaagacagaccgacagacagacagacagctggcaagaggcagcctgggggccacagctgcttcagcagacctcatggctgagtgagcctcccctgggcccagcaccccacctcagcatggtccaagcccatggggggcgctccagagcacagccgttgaccttgtctttgggggcagccatgacccagcctccgcctgaaaaaacgccagccaagaagcatgtgcgactgcaggagagaacccatctgctctgtgaacacaccccgggaggtcaccctacactttctgcgcactgctggacacccccttacccgctgggcccttcagcgccagccacccagccccaagcaactggaagaagaattcttgaagatcccttcaaactttgtcagccccgaagacctggacatccctggccacgcctccaaggaccgatacaagaccatcttgccaaatccccagagccgtgtctgtctaggccgggcacagagccaggaggacggagattacatcaatgccaactacatccgaggctatgacgggaaggagaaggtctacattgccacccagggccccatgcccaacactgtgtcggacttctgggagatggtgtggcaagaggaagtgtccctcattgtcatgctcactcagctccgagagggcaaggagaaatgtgtccactactggcccacagaagaggaaacctatggacccttccagatccgcatccaggacatgaaagagtgcccagaatacactgtgcggcagctcaccatccagtaccaggaagagcgccggtcagtaaagcacatcctcttttcggcctggccagaccatcagacaccagaatcagctgggcccctgctgcgcctagtggcagaggtggaggagagcccggagacagccgcccaccccgggcctatcgtagtccactgcagtgcagggattggccggacgggctgcttcatcgccacgcgaattggctgtcaacagctgaaagcccgaggagaagtggacattctgggtattgtgtgccaactgcggctagacagaggggggatgatccagacggcagagcagtaccagttcctgcaccacactttggccctgtatgcaggccagctgcctgaggaacccagcccctgacccctgccaccctccggtggcccaggtgcctacctccctcaagcctgggaaggtgggtctggggaaagtgggccgagtgatctgggggtaccccttgggttggtgtggggaaggagtgcctccttagtggtgcttgcagtcacaggaagcagcagcagtaaggacaaggggccggattccaggtcttcaacactggccactcctctgcttcctctgttggccccagatggacagtaaggggaacctccaatgtctctctgaacttaaagacaggagctggcatttatgacagacaaagaaagaagcccaggtgtcct

SEQ ID NO: 171711 - DNA, 1189 bp, Homo sapiens
  Payload ID: 13753
  Gene Symbol: PTPN7
  Gene Name: protein tyrosine phosphatase, non-receptor type 7
  ENST ID: ENST00000480836
  CDS Start-End: 124-354
agccctcaaagacagaccgacagacagacagacagctggcaagaggcagcctgggggccacagctgcttcagcagacctcatggctgagtgagcctcccctgggcccagcaccccacctcagcatggtccaagcccatggggggcgctccagagcacagccgttgaccttgtctttgggggcagccatgacccagcctccgcctgaaaaaacgccagccaagaagcatgtgcgactgcaggagagaagatcccttcaaactttgtcagccccgaagacctggacatccctggccacgcctccaaggaccgatacaagaccatcttgccaaatccccagagccgtgtctgtctaggccgggcacagagccaggaggacggagattacatcaatgccaactacatccgaggctatgacgggaaggagaaggtctacattgccacccagggccccatgcccaacactgtgtcggacttctgggagatggtgtggcaagaggaagtgtccctcattgtcatgctcactcagctccgagagggcaaggagaaatgtgtccactactggcccacagaagaggaaacctatggacccttccagatccgcatccaggacatgaaagagtgcccagaatacactgtgcggcagctcaccatccagtaccaggaagagcgccggtcagtaaagcacatcctcttttcggcctggccagaccatcagacaccagaatcagctgggcccctgctgcgcctagtggcagaggtggaggagagcccggagacagccgcccaccccgggcctatcgtagtccactgcagtgcagggattggccggacgggctgcttcatcgccacgcgaattggctgtcaacagctgaaagcccgaggagaagtggacattctgggtattgtgtgccaactgcggctagacagaggggggatgatccagacggcagagcagtaccagttcctgcaccacactttggccctgtatgcaggccagctgcctgaggaacccagcccctgacccctgccaccctccggtggcccaggtgcctacctccctcaagcctgggaaggtgggtctggggaaagtgggccgagtgatctgggggtaccccttgggttggtgtggggaaggagtgcctccttagtggtgcttgcagtcacaggaagcagcagcagtaaggacaa

SEQ ID NO: 171712 - DNA, 550 bp, Homo sapiens
  Payload ID: 13753
  Gene Symbol: PTPN7
  Gene Name: protein tyrosine phosphatase, non-receptor type 7
  ENST ID: ENST00000476061
  CDS Start-End: 61-550
agaccgacagacagacagacagctggcaagaggcagcctgggggccacagctgcttcaccatgacccagcctccgcctgaaaaaacgccagccaagaagcatgtgcgactgcaggagaggcggggctccaatgtggctctgatgctggacgttcggtccctgggggccgtagaacccatctgctctgtgaacacaccccgggaggtcaccctacactttctgcgcactgctggacacccccttacccgctgggcccttcagcgccagccacccagccccaagcaactggaagaagaattcttgaagatcccttcaaactttgtcagccccgaagacctggacatccctggccacgcctccaaggaccgatacaagaccatcttgccaaatccccagagccgtgtctgtctaggccgggcacagagccaggaggacggagattacatcaatgccaactacatccgaggctatgacgggaaggagaaggtctacattgccacccagggccccatgcccaacactgtgtcggacttctgggagatggtgtggc

SEQ ID NO: 171713 - DNA, 542 bp, Homo sapiens
  Payload ID: 13753
  Gene Symbol: PTPN7
  Gene Name: protein tyrosine phosphatase, non-receptor type 7
  ENST ID: ENST00000464870
  CDS Start-End: 79-542
aaagacagaccgacagacagacagacagctggcaagaggcagcctgggggccacagctgcttcacaccccacctcagcatggtccaagcccatggggggcgctccagagcacagccgttgaccttgtctttgggggcagccatgacccagcctccgcctgaaaaaacgccagccaagaagcatgtgcgactgcaggagaggcggggctccaatgtggctctgatgctggacgttcggtccctgggggccgtagaacccatctgctctgtgaacacaccccgggaggtcaccctacactttctgcgcactgctggacacccccttacccgctgggcccttcagcgccagccacccagccccaagcaactggaagaagaattcttgaagatcccttcaaactttgtcagccccgaagacctggacatccctggccacgcctccaaggaccgatacaagaccatcttgccaaatccccagagccgtgtctgtctaggccgggcacagagccaggaggacggagattacatcaatgccaactacat

SEQ ID NO: 171714 - DNA, 2689 bp, Homo sapiens
  Payload ID: 13753
  Gene Symbol: PTPN7
  Gene Name: protein tyrosine phosphatase, non-receptor type 7
  Uniprot ID: P35236
  ENST ID: ENST00000495688
  CDS Start-End: 103-1185
agacagacagacagctggcaagaggcagcctgggggccacagctgcttcagcagacctcatggctgagtgagcctcccctgggcccagcaccccacctcagcatggtccaagcccatggggggcgctccagagcacagccgttgaccttgtctttgggggcagccatgacccagcctccgcctgaaaaaacgccagccaagaagcatgtgcgactgcaggagaggcggggctccaatgtggctctgatgctggacgttcggtccctgggggccgtagaacccatctgctctgtgaacacaccccgggaggtcaccctacactttctgcgcactgctggacacccccttacccgctgggcccttcagcgccagccacccagccccaagcaactggaagaagaattcttgaagatcccttcaaactttgtcagccccgaagacctggacatccctggccacgcctccaaggaccgatacaagaccatcttgccaaatccccagagccgtgtctgtctaggccgggcacagagccaggaggacggagattacatcaatgccaactacatccgaggctatgacgggaaggagaaggtctacattgccacccagggccccatgcccaacactgtgtcggacttctgggagatggtgtggcaagaggaagtgtccctcattgtcatgctcactcagctccgagagggcaaggagaaatgtgtccactactggcccacagaagaggaaacctatggacccttccagatccgcatccaggacatgaaagagtgcccagaatacactgtgcggcagctcaccatccagtaccaggaagagcgccggtcagtaaagcacatcctcttttcggcctggccagaccatcagacaccagaatcagctgggcccctgctgcgcctagtggcagaggtggaggagagcccggagacagccgcccaccccgggcctatcgtagtccactgcagtgcagggattggccggacgggctgcttcatcgccacgcgaattggctgtcaacagctgaaagcccgaggagaagtggacattctgggtattgtgtgccaactgcggctagacagaggggggatgatccagacggcagagcagtaccagttcctgcaccacactttggccctgtatgcaggccagctgcctgaggaacccagcccctgacccctgccaccctccggtggcccaggtgcctacctccctcaagcctgggaagtcacaggaagcagcagcagtaaggacaaggggccggattccaggtcttcaacactggccactcctctgcttcctctgttggccccagatggacagtaaggggaacctccaatgtctctctgaacttaaagacaggagctggcatttatgacagacaaagaaagaagcccaggtgtcctggtgttctctgagacactctttgtgagcttcagtttcctgttctataacatgaacataagtgcttagctgccatgagggaaaagtaatgagagaagtttctagaagccactccagccactccttcctggggctgacaaaagggtgattccaagatcatccttcacccgaggtcctgcccaagcacaggccagatgcaagaatggggaaaagtctggtcctgatctccaagtctcaacatcctatcagtgactctgctccctgaccacacatcggaagggctggatgaccccaatcaaaagaaagaacaaggactctggttacccttgcctccacccatgtgtcataagagtaggctacagaggtgaccaggcctggcagttgaaatctctggaagagggaacatgtggggactactcagaggcaaagaggagctgctcctgcctccatggttgctggccactcccaccaactactcttagggaggctaagcagtctctgttttgcttccatggctcaaataataccctgggtatgcaggacccactataccttgcatttgctgagtacacctagagagcttggctgtttccaaaaacaatcagggtcataaccatccatgcagacatggaggctcggctgaaccaggactcctcactgtctacctgagagaatgagcacccctcatccatctcagcatcaacacaatttccaggggacctcaggtctacctcaggactgaacgccacacctcaggattcctcctccttgaatctgagactggctgcccattctgagatggggatgaaggtaagatgccgcatcaccaggcacgccgcccctgacagctgccttgataccagctctctgtggaaacccccgaggagttggatctggagaacagctgggcctcctcactcaggacttctctcctgaagaacacgcagtgctaaaactgaggatgatttccctaatgcttctgcttggccttatggaggagctgctccttccttacagccttggggatggacttgcccacacctccacctcccctgagccctgtgagaggcacgactgtctatgccaatgaggctcggtggggggctctcaagtgcctgatcctgccctgggctcagagccagcccagagggaagcaactgcacagccccacaggccctccctggcactgtccccccaaccccatctcagagctcagagggtacaagctccagaacagtaaccaagtgggaaaataaagacttcttggatgactgac

SEQ ID NO: 171715 - DNA, 437 bp, Homo sapiens
  Payload ID: 13753
  Gene Symbol: PTPN7
  Gene Name: protein tyrosine phosphatase, non-receptor type 7
  ENST ID: ENST00000629151
  CDS Start-End: 87-437
ggcaagaggcagcctgggggccacagctgcttcagcagacctcatggctgagtgagcctcccctgggcccagcaccccacctcagcatggtccaagcccatggggggcgctccagagcacagccgttgaccttgtctttgggggcagccatgacccagcctccgcctgaaaaaacgccagccaagaagcatgtgcgactgcaggagaggcggggctccaatgtggctctgatgctggacgttcggtccctgggggccgtagaacccatctgctctgtgaacacaccccgggaggtcaccctacactttctgcgcactgctggacacccccttacccgctgggcccttcagcgccagccacccagccccaagcaactggaagaagaattcttgaagaggaaacctatggacccttccagatccgcatccaggacatga

SEQ ID NO: 171716 - DNA, 3862 bp, Homo sapiens
  Payload ID: 13754
  Gene Symbol: PTPN9
  Gene Name: protein tyrosine phosphatase, non-receptor type 9
  ENST ID: ENST00000306726
  CDS Start-End: 469-2220
agcctggctgaggcagccgcgcaggtcgcagggccagcgtccgcgaggacggcccggctgggcggccccgagctctgtggcgctgtggaggagcgggagcgcggccgaggaagcggggcgccgagggggtcggcggccttcgggaaatttccgccgacccttcgctcccggctctaaaagttcctgatttcctatttccttttaaatcccgagtggctgttagctcttcgcctgcactttttcttccccaggagataagggggagtgtgaggaacggagcgaataatataaaaaaggatttcctcccggaagagagcggcagttcggagagatttttcttaaggaagcagaagcggcgtttgcggccgctgcaggcgccgggccctgccggccacactatgcgcgagccggccccgggctgctgaggcgcggggacgcggaagcggaggccgagcgcgccggcccgacatggcgccggagctgaccccggaggaggagcaggctaccaagcagtttctcgaagagattaacaagtggacagttcagtacaatgtttccccgctgtcttggaatgtggctgtcaagttcctcatggcaaggaagtttgatgtgctccgtgccatagaattgttccactcctacagagaaactcgaaggaaggaaggcattgtaaagctgaaacctcatgaggaacctcttcgttctgagatcctcagtggaaaattcaccatcttaaatgttcgggacccaacaggagcctccattgccctctttactgccaggttgcatcatccccacaagtcagtccaacatgtggtacttcaggctctgttttacttgctagacagagctgtggatagctttgaaactcagaggaatggactggtgtttatctatgacatgtgtggttctaattatgccaactttgagctggatcttggcaagaaagtcctaaacctgctgaagggagcatttccagctcgtttgaagaaggtgctgattgtgggggcacccatatggttccgagtgccctattccatcatcagtctcctcctgaaggacaaagtccgggagaggattcaaatattaaagacatctgaggtcacgcagcatctgcccagggagtgtcttccagaaaacctgggtgggtacgtcaaaattgatctcgccacttggaatttccagttcctaccccaggtgaacggccacccagatcccttcgatgagatcatcctgttctccctccctcctgccttagactgggactcagtacatgttccaggtccccatgctatgaccatccaagagttggtggactatgttaatgccaggcaaaagcaaggaatctatgaggaatatgaagacattcgtcgtgagaaccctgttggcactttccactgttccatgtctccaggaaacctagagaaaaaccgttatggggatgtaccctgcctggaccaaactagagtgaagctaacaaagcgaagtggccatactcagacagattacatcaatgccagtttcatggatggctacaagcagaagaatgcttacattggcacacaaggtcctttggagaatacctatcgtgatttctggctcatggtatgggagcaaaaagtcttggtgattgtcatgaccacccgctttgaggaaggcggcaggagaaagtgtggccagtactggcctttagaaaaagactctcggatccgatttggcttcctcacagtgaccaatctaggcgtggagaacatgaatcattataagaaaacaacgctagaaattcacaacacagaggaacggcagaaacgccaggtgacccacttccagttcttgagctggccagactatggtgtcccttcctcagcagcttccctcattgacttcttgagagtggtcagaaaccagcagagtctggctgtgagcaacatgggagcacgctccaaagggcagtgccctgagccacccattgtggtccattgcagtgcaggcattggcaggacaggtaccttctgctcactggacatctgcctggcacagctggaggagcttggcacccttaatgtgttccagacggtgtcacgcatgaggacccagagggccttcagcatccagacccctgagcagtactatttttgctacaaggccatcctggagttcgcagagaaggagggcatggtatcctctggccaaaacctgctggccgtggagagtcagtaactctcctacgaacctcctacctgttggccagccttccttaaactaccctggacaccgctgagcctataggttgccatcagttacgctgaagccatggatcaacttctttcttgtgtctcccagcacacgtgtgcacgcaaggcagcctttccctttggctagataaatgtggtgaaattgccactagaaagggccagtagcaatgtgttcttaattcctagcatctgctatcaaactgtgccttattaaaaccaaattgtggctattgatttttgctagggtccccgaggtaagtggggaaggaacctccctcctcctttctcccgccattctttttctgaggtctcctgtctcccactccttccctttcctaggattttatggggaggtttgatgagcatttgcctttctccccagagagcttgaccaagttacatattctagagatcgtcctgagtgccaagcacgtttataagtagggcgtgtattccagtcctttctgtcattctgtgtgtgtgtgtgtgtgcacttatgtgtatgggtccatatgtacgtgtgtatataatatatattgtatgtgataatatgatcgtattctataaatacatatacacacgatactcctttccagaagttcctggggctccgtgttgcagttcaggactccttgcttcttggaccctactatttatcctggactagcttgggttggtgatcatgtctcctcttgtcaggctacagagtggtggaagaggacacacacacatctcctccatgttcctgccacagggccccttccttaagtaatgacttatctccttccagttgccacctgttggagccaagaatgtattagtttgtggtgacactgggttagctcagcatggatttcccttatccgatgatttttctacatttacttggccaatttggggaacagacctccactgtgattccatactctctctttgctttcactatcccagggatgggaggcggagggtagagatgaactcactgagcagccagagccaaatgcaatcggtacgaatcttagaaggaaggagggggagcccaggtatgagaaagaaaaaaccactaagaaaatacctccctgggaggatgagctggggccctttttcttttgctggatggttcctttatgcagcttggccctgtctaccgagatgcccatctcttcctgcctgctagcctgctagaccctcaaactgggtgggttctgtgtcaataaaaagcttcaccccctggctgagtgaggtggtcccctgcaatcactgtttgtcccctacccacccaacctgtccctgcctgctcccagcccactcatccttatgtgctagggataaatcaagagtcctcagcactccacattcccaaaaaatcccaggaactcctaaaccttcccctgtgacagaagatgaggttggcagctgatcagacctcaataattttatactgtaataagctctttgaatgtgtatattattattttttacaatcatttcattttgtatttaatatcaatggactgagtctgattcagaaaataattgtaatgttcatattcaatatcttacagtgatacagttttgtatttacatataaatataccgacatgatc

SEQ ID NO: 171717 - DNA, 545 bp, Homo sapiens
  Payload ID: 13754
  Gene Symbol: PTPN9
  Gene Name: protein tyrosine phosphatase, non-receptor type 9
  ENST ID: ENST00000561731
  CDS Start-End: 1-525
gtaaagctgaaacctcatgaggaacctcttcgttctgagatcctcagtggaaaattcaccatcttaaatgttcgggacccaacaggagcctccattgccctctttactgccaggttgcatcatccccacaagtcagtccaacatgtggtacttcaggctctgttttacttgctagacagagctgtggatagctttgaaactcagaggaatggactggtgtttatctatgacatgtgtggttctaattatgccaactttgagctggatcttggcaagaaagtcctaaacctgctgaagttaccctttagttctactgatttggagaaaccccagcactcctctatggagaatatacagcatctagaacaaacttctccaaaggcctcttcactgaagtgtgataaactactttcatcttttccttcaaagatgcaacaatttatttcaggacctaaatgtccaaggtccttttaccagcaaatcaaaaaccattctaggaaaacacctgttatttccacaaaatgataaataaaaagtagaagcta

SEQ ID NO: 171718 - DNA, 7813 bp, Homo sapiens
  Payload ID: 13754
  Gene Symbol: PTPN9
  Gene Name: protein tyrosine phosphatase, non-receptor type 9
  Uniprot ID: P43378
  ENST ID: ENST00000618819
  CDS Start-End: 514-2295
agcctggctgaggcagccgcgcaggtcgcagggccagcgtccgcgaggacggcccggctgggcggccccgagctctgtggcgctgtggaggagcgggagcgcggccgaggaagcggggcgccgagggggtcggcggccttcgggaaatttccgccgacccttcgctcccggctctaaaagttcctgatttcctatttccttttaaatcccgagtggctgttagctcttcgcctgcactttttcttccccaggagataagggggagtgtgaggaacggagcgaataatataaaaaaggatttcctcccggaagagagcggcagttcggagagatttttcttaaggaagcagaagcggcgtttgcggccgctgcaggcgccgggccctgccggccacactatgcgcgagccggccccgggctgctgaggcgcggggacgcggaagcggaggccgagcgcgccgggctcccgcgctcgcgagcgagttttgtccgcccggcggcggtggcggggggatggagcccgcgaccgcgccccggcccgacatggcgccggagctgaccccggaggaggagcaggctaccaagcagtttctcgaagagattaacaagtggacagttcagtacaatgtttccccgctgtcttggaatgtggctgtcaagttcctcatggcaaggaagtttgatgtgctccgtgccatagaattgttccactcctacagagaaactcgaaggaaggaaggcattgtaaagctgaaacctcatgaggaacctcttcgttctgagatcctcagtggaaaattcaccatcttaaatgttcgggacccaacaggagcctccattgccctctttactgccaggttgcatcatccccacaagtcagtccaacatgtggtacttcaggctctgttttacttgctagacagagctgtggatagctttgaaactcagaggaatggactggtgtttatctatgacatgtgtggttctaattatgccaactttgagctggatcttggcaagaaagtcctaaacctgctgaagggagcatttccagctcgtttgaagaaggtgctgattgtgggggcacccatatggttccgagtgccctattccatcatcagtctcctcctgaaggacaaagtccgggagaggattcaaatattaaagacatctgaggtcacgcagcatctgcccagggagtgtcttccagaaaacctgggtgggtacgtcaaaattgatctcgccacttggaatttccagttcctaccccaggtgaacggccacccagatcccttcgatgagatcatcctgttctccctccctcctgccttagactgggactcagtacatgttccaggtccccatgctatgaccatccaagagttggtggactatgttaatgccaggcaaaagcaaggaatctatgaggaatatgaagacattcgtcgtgagaaccctgttggcactttccactgttccatgtctccaggaaacctagagaaaaaccgttatggggatgtaccctgcctggaccaaactagagtgaagctaacaaagcgaagtggccatactcagacagattacatcaatgccagtttcatggatggctacaagcagaagaatgcttacattggcacacaaggtcctttggagaatacctatcgtgatttctggctcatggtatgggagcaaaaagtcttggtgattgtcatgaccacccgctttgaggaaggcggcaggagaaagtgtggccagtactggcctttagaaaaagactctcggatccgatttggcttcctcacagtgaccaatctaggcgtggagaacatgaatcattataagaaaacaacgctagaaattcacaacacagaggaacggcagaaacgccaggtgacccacttccagttcttgagctggccagactatggtgtcccttcctcagcagcttccctcattgacttcttgagagtggtcagaaaccagcagagtctggctgtgagcaacatgggagcacgctccaaagggcagtgccctgagccacccattgtggtccattgcagtgcaggcattggcaggacaggtaccttctgctcactggacatctgcctggcacagctggaggagcttggcacccttaatgtgttccagacggtgtcacgcatgaggacccagagggccttcagcatccagacccctgagcagtactatttttgctacaaggccatcctggagttcgcagagaaggagggcatggtatcctctggccaaaacctgctggccgtggagagtcagtaactctcctacgaacctcctacctgttggccagccttccttaaactaccctggacaccgctgagcctataggttgccatcagttacgctgaagccatggatcaacttctttcttgtgtctcccagcacacgtgtgcacgcaaggcagcctttccctttggctagataaatgtggtgaaattgccactagaaagggccagtagcaatgtgttcttaattcctagcatctgctatcaaactgtgccttattaaaaccaaattgtggctattgatttttgctagggtccccgaggtaagtggggaaggaacctccctcctcctttctcccgccattctttttctgaggtctcctgtctcccactccttccctttcctaggattttatggggaggtttgatgagcatttgcctttctccccagagagcttgaccaagttacatattctagagatcgtcctgagtgccaagcacgtttataagtagggcgtgtattccagtcctttctgtcattctgtgtgtgtgtgtgtgtgcacttatgtgtatgggtccatatgtacgtgtgtatataatatatattgtatgtgataatatgatcgtattctataaatacatatacacacgatactcctttccagaagttcctggggctccgtgttgcagttcaggactccttgcttcttggaccctactatttatcctggactagcttgggttggtgatcatgtctcctcttgtcaggctacagagtggtggaagaggacacacacacatctcctccatgttcctgccacagggccccttccttaagtaatgacttatctccttccagttgccacctgttggagccaagaatgtattagtttgtggtgacactgggttagctcagcatggatttcccttatccgatgatttttctacatttacttggccaatttggggaacagacctccactgtgattccatactctctctttgctttcactatcccagggatgggaggcggagggtagagatgaactcactgagcagccagagccaaatgcaatcggtacgaatcttagaaggaaggagggggagcccaggtatgagaaagaaaaaaccactaagaaaatacctccctgggaggatgagctggggccctttttcttttgctggatggttcctttatgcagcttggccctgtctaccgagatgcccatctcttcctgcctgctagcctgctagaccctcaaactgggtgggttctgtgtcaataaaaagcttcaccccctggctgagtgaggtggtcccctgcaatcactgtttgtcccctacccacccaacctgtccctgcctgctcccagcccactcatccttatgtgctagggataaatcaagagtcctcagcactccacattcccaaaaaatcccaggaactcctaaaccttcccctgtgacagaagatgaggttggcagctgatcagacctcaataattttatactgtaataagctctttgaatgtgtatattattattttttacaatcatttcattttgtatttaatatcaatggactgagtctgattcagaaaataattgtaatgttcatattcaatatcttacagtgatacagttttgtatttacatataaatataccgacatgatcaaaacccttttagcttcatcaatttagcagcctgggacatgagggagggggtccaggagctggtctgggagggatgagggaggcagggagggacccaagccttcagtatctgagactttgagttctgacactatgagttcaccttgtctgtaggccatggccctatctctggacagagggaccagcaccagttcagtgcttgagatgtgctaagcactatgctaggtgcttttcccccaccctgcctcattcaaacctcacaacaattcagtgagatattatcttctctcccttctcctgtgcacccctttctcatttctatatagatgaggaaggtgaggtccagagggttacagtgatttgctctaaaacgagctcaagttggtctgcttacaaagcctgtggtctcttcactgcatggaagatggagatcttgtgtttggagaacagaggtttgtttagctctcctttcagagtaaaaaaagttcttaaattccaggttgttgttcttgtgcccatgcttcatgtagtagacgcgaagggtgacagggttggtgactgactgtcctagctaggacctcctgatgtagggtcctcatgtctgcagcgtaccaaaggggttatcattctccccaggagactccatatctatgggtacatggtctttgtgagaagatcttgagtcatttgcatttatctcttagaaagaaaggaaccagaagctttgtacatggaagaccactccccatatcatacctgttggctgttgatggcctgcccagttggggcagttgtggctgggaaatattggggtgttcttaataatagtcatagcagccaatttactggatgctcactctattccaggcactgttcagagtaatttctaggtatcatctcattcaccctcaacaaccttttgaggtaggtattgacagaagaaaaaaattgagagacaggaatgttaatttgctacagccaggatcccagaccatctgactccaaagtatcttctttcacctcttacactagacttcctctaaggatccatcttctgatctgccaataaatttttatcgagtttcttaccataatcaggagctcaagtgtagagcagaagattaatctagttccttctccagatgagcctccattctcttgggagtgcacaaacataagaagtgaacagagattcttggaaatctgagaaaccagagaggtcaggggtttggtggaacatgtaagaaatgggattaatgataaacggcctggaggaggtaactttaaattgtcatttatttgaagaggctgtaacccgactgccctgtgaatttaaggttatgcatgagttcctcattgcatatctgaagactggtgaggttatctatcacttcagctccataaaatgctgatttctgggcccatccagtaggttgttagtgagtgacaggattatccaggtttgggaaccatagatttagttcatgtttctgaccctatagagagttaacaaattgatgtctcctaaattttcagtaaaactcagaggaactcctcccactgccattgtttgtagcttttaccagcgtgaacctacctgtgttaggtgttaaaggaggaggtaaaggaaagggaaggcagagacgcaacccagaatctgtttggcaagtcagggttctcatacaggagacttagtgaacaaagcaagagaaaatgctcagggtccaagtgcagtggctttatgcctgtaatcccagtactttggaaggccgaggtgggcagatcacctgaggtcaggagtttgagaccagcctgaccaatatgatgaaaccccatctctactaaaaatataaaaattacccgggtgtggtggtatgtgcttgtaatcccagctactcgggaggctgaaatgggagaatcacttgaatctgggaggcagaggttgcaatgagccgagatcgcgccattgcactctagcctgggcaacaagagtaaaactccatctcaaaaaaaataaataaataaaaaagaaagacagtgttcaggaaagaagaaaacactgagctaaagcaggcttctgcttctgatttgatggctgtttgtttcacctttctctaacattcccatgctatataatttttcaaacatgagataatccctgtgtcctttttcccattgctcccttcatcttgcccatcctcattggctaggatgggactcctgagacgaagggtgccccagcatcctcagcctcggaggcccacccttatcagtcttcatgtgacagtatgcaggtaaatgacagagtaggacttgttcttgggagaatggactatttagcatcatagccctagggaaatttggttccttccctgaaaggaatgcttcctgtctcttgggacagacagacacacatacaaaaacttttataaatcagagacctagagggaattgggccaagaggcattggccaagtagaaaagcttctctagagtgacccagctcttttgtggttttgaggtcttaccactgaaccaaacccaagtcctaggttccctctgtaaaagaaggggctacactagatgatcctaccatgggtcctctgactgtcagggtccagttctttgttagacagtgcaaacacccatagaggagctattaggcctttacttgggttgagttggctcccactagcactccccacttttcattttttttactttcagagacagagtctcactctgttgcctaggttagaggggagtggcatgatcatggctcactgcagtctcaacaactgggctcaagcaggaacccagctttttttttttttctctctctctctctagagacaggatctcactatgttgcccaggctggtctcgaactccagcctcaagcaatcctcctgcctcggcctcccaaagtgagaggattacaggcatgggccaccacacccagcctctccagttttagtgtgttttcagagtctcttctttcaagctgctgctacttccctagcttccctcagttctcttcccccttggccttccaattggaggaaaagcaggtcaggtctctgtcatctccaagaccagcctataggcctttaaagtttccctgtttcttaatgtggggtctacagggtttctcagaggcaaagcatgaacagaccaagggtcctatagctcccaacctagtccttagatttctctctggccttggttactcccacaaaccactgtgagcctaccaagggcaggaatggaaatgcccatcagcctgggaaccatctttttctcttaggaggtatccgccctatagttacctttacacaacacttgtgaatatcaagtgttctagactgcactgttcataattgactacagagaagactaggatcttctccacaaatagaaatatatcacttttacttggagatgttttcttgggggaaaaaaaatctagcaccttgaaacctgttacaatgtttaaatctcccttctttaccttggctgtcataaaatcctcctgtttgagctaaatgtggcctgctgaagtcttaaatgcccatatttttcaggctaaggccatggtggacatagctaactccactagaatcctagctgggggtgttggaaaaaacggtacagtgcccctctcagactccaggctcacgtccgtctcccctccccgcacattataatctactacttctctaatgctgctgcgtagtttgtcttaaagcctcaagactggccagatgtgcacctgagtaaaggtcagccatttcatctgggggctctttcttgacttttaatgaattttcttctgtgaaaaaatgtatttttaataaaaaattttctgtggccagca

SEQ ID NO: 171719 - DNA, 3725 bp, Homo sapiens
  Payload ID: 13755
  Gene Symbol: PTPRA
  Gene Name: protein tyrosine phosphatase, receptor type, A
  Uniprot ID: P18433
  ENST ID: ENST00000216877
  CDS Start-End: 401-2782
agcgaggctgcggcgagtgcggcgctgacagagacgcgcgcgcgcgcgatcgcgctcggaccccggccgctgccgccatcactgtcgcccgcccagtcgcccctcagccgcttcccctcgccatggaggcgaggccgccgccgccgccgcggggctcggagccgcgggccgggcggcggccctgagggctagtggcggcccgaaacgccgccgcggagccgaggcggagccgctgtcctcgtccccagcggtcccgcccaacgcccgactctgtgacacaactaaaaaaaaacaaaggtatttatggaattccactgagtggtaatggatgatgcagttcaaataactaaggacacatgttcaaagagcataattaactttttaaaagaagctaataagcatggattcctggttcattcttgttctgctcggcagtggtctgatatgtgtcagtgccaacaatgctaccacagttgcaccttctgtaggaattacaagattaattaactcatcaacggcagaaccagttaaagaagaggccaaaacttcaaatccaacttcttcactaacttctctttctgtggcaccaacattcagcccaaatataactctgggacccacctatttaaccactgtcaattcttcagactctgacaatgggaccacaagaacagcaagcaccaattctataggcattacaatttcaccaaatggaacgtggcttccagataaccagttcacggatgccagaacagaaccctgggaggggaattccagcaccgcagcaaccactccagaaactttccctccttcagatgagacaccaattattgcggtgatggtggccctgtcctctctgctagtgatcgtgtttattatcatagttttgtacatgttaaggtttaagaaatacaagcaagctgggagccattccaattctttccgcttatccaacggccgcactgaggatgtggagccccagagtgtgccacttctggccagatccccaagcaccaacaggaaatacccacccctgcccgtggacaagctggaagaggaaattaaccggagaatggcagacgacaataagctcttcagggaggaattcaacgctctccctgcatgtcctatccaggccacctgtgaggctgcttccaaggaggaaaacaaggaaaaaaatcgatatgtaaacatcttgccttatgaccactctagagtccacctgacaccggttgaaggggttccagattctgattacatcaatgcttcattcatcaacggctaccaagaaaagaacaaattcattgctgcacaaggaccaaaagaagaaacggtgaatgatttctggcggatgatctgggaacaaaacacagccaccatcgtcatggttaccaacctgaaggagagaaaggagtgcaagtgcgcccagtactggccagaccaaggctgctggacctatgggaatattcgggtgtctgtagaggatgtgactgtcctggtggactacacagtacggaagttctgcatccagcaggtgggcgacatgaccaacagaaagccacagcgcctcatcactcagttccactttaccagctggccagactttggggtgccttttaccccgatcggcatgctcaagttcctcaagaaggtgaaggcctgtaaccctcagtatgcaggggccatcgtggtccactgcagtgcaggtgtagggcgtacaggtacctttgtcgtcattgatgccatgctggacatgatgcatacagaacggaaggtggacgtgtatggctttgtgagccggatccgggcacagcgctgccagatggtgcaaaccgatatgcagtatgtcttcatataccaagcccttctggagcattatctctatggagatacagaactggaagtgacctctctagaaacccacctgcagaaaatttacaacaaaatcccagggaccagcaacaatggattagaggaggagtttaagaagttaacatcaatcaaaatccagaatgacaagatgcggactggaaaccttccagccaacatgaagaagaaccgtgttttacagatcattccatatgaattcaacagagtgatcattccagttaagcggggcgaagagaatacagactatgtgaacgcatcctttattgatggctaccggcagaaggactcctatatcgccagccagggccctcttctccacacaattgaggacttctggcgaatgatctgggagtggaaatcctgctctatcgtgatgctaacagaactggaggagagaggccaggagaagtgtgcccagtactggccatctgatggactggtgtcctatggagatattacagtggaactgaagaaggaggaggaatgtgagagctacaccgtccgagacctcctggtcaccaacaccagggagaataagagccggcagatccggcagttccacttccatggctggcctgaagtgggcatccccagtgacggaaagggcatgatcagcatcatcgccgccgtgcagaagcagcagcagcagtcagggaaccaccccatcaccgtgcactgcagcgccggggcaggaaggacggggaccttctgtgccctgagcaccgtcctggagcgtgtgaaagcagaggggattttggatgtcttccagactgtcaagagcctgcggctacagaggccacacatggtccagacactggaacagtatgagttctgctacaaggtggtgcaggagtatattgatgcattctcagattatgccaacttcaagtaagcggcaacaagggtccgtggaccaggaggattgcctttaatattttgtaatattctgttttgttaatataccccaaattgtgtatatatcttataactgttttagaaattggtacataggcttctattacctattaggtggaaattttatatgtaaatgtgttagcactgatagtcctttttccaatgttttattggggaattaaatagtgtgatgtttggattgatatcgtgaaatcctcagccgagaaattgggctggattgtgctttggttaatacatctttccctaaagaagataaacacaaaatccattccaggtagctcggcaccaactaagaaaaaaagcacaaagttctcagagctctcgaggaaagtggttgtccccgtaccaccatgcactgtaaatatccctcccctctctccctggtcccctcccccatccccaccactgatatcatggggagtaataggaccagagcggtatctctggcaccacactagggactatcaggtaataaaagctttgactccctgaggaaatgtctctccctttgtctgggggtggggcagccatacaggctggggctctcctcggctgttcatggccctcctgttgctgttctctctgagttatctgagagaggccacagtcccccagctcctcctgtccaccaaacacagcccttccagttcttaggtgatctccaggaccctcctttcattcccagcacatctttggtttagtggtcctggccagcctccctccctaggaaggtggccaggtcctcactgagtctccttaaggacaggggcacaggggagactagagctggctcagctttgggctgaggccagtctgacctctccagtctgtggtgctttgctacaaaactgtctggattgtgtcaccctatctaggataaatctttatgtccacatata

SEQ ID NO: 171720 - DNA, 3219 bp, Homo sapiens
  Payload ID: 13755
  Gene Symbol: PTPRA
  Gene Name: protein tyrosine phosphatase, receptor type, A
  Uniprot ID: P18433
  ENST ID: ENST00000318266
  CDS Start-End: 297-2678
gcggcccgaaacgccgccgcggagccgaggcggagccgctgtcctcgtccccagcggtcccgcccaacgcccgactctgtgacacaactaaaaaaaaacaaaggtatttatggaattccactgagtggtaatggatgatgcagttcaaataactaaggacacatgttcaaagagcataattaactttttaaaagaagctagacttcttcagaagcttgccagtttttcaagctgatttctctcactggcaactcttcagagtgctgttcctactccaccctcccctggtgataagcatggattcctggttcattcttgttctgctcggcagtggtctgatatgtgtcagtgccaacaatgctaccacagttgcaccttctgtaggaattacaagattaattaactcatcaacggcagaaccagttaaagaagaggccaaaacttcaaatccaacttcttcactaacttctctttctgtggcaccaacattcagcccaaatataactctgggacccacctatttaaccactgtcaattcttcagactctgacaatgggaccacaagaacagcaagcaccaattctataggcattacaatttcaccaaatggaacgtggcttccagataaccagttcacggatgccagaacagaaccctgggaggggaattccagcaccgcagcaaccactccagaaactttccctccttcagatgagacaccaattattgcggtgatggtggccctgtcctctctgctagtgatcgtgtttattatcatagttttgtacatgttaaggtttaagaaatacaagcaagctgggagccattccaattctttccgcttatccaacggccgcactgaggatgtggagccccagagtgtgccacttctggccagatccccaagcaccaacaggaaatacccacccctgcccgtggacaagctggaagaggaaattaaccggagaatggcagacgacaataagctcttcagggaggaattcaacgctctccctgcatgtcctatccaggccacctgtgaggctgcttccaaggaggaaaacaaggaaaaaaatcgatatgtaaacatcttgccttatgaccactctagagtccacctgacaccggttgaaggggttccagattctgattacatcaatgcttcattcatcaacggctaccaagaaaagaacaaattcattgctgcacaaggaccaaaagaagaaacggtgaatgatttctggcggatgatctgggaacaaaacacagccaccatcgtcatggttaccaacctgaaggagagaaaggagtgcaagtgcgcccagtactggccagaccaaggctgctggacctatgggaatattcgggtgtctgtagaggatgtgactgtcctggtggactacacagtacggaagttctgcatccagcaggtgggcgacatgaccaacagaaagccacagcgcctcatcactcagttccactttaccagctggccagactttggggtgccttttaccccgatcggcatgctcaagttcctcaagaaggtgaaggcctgtaaccctcagtatgcaggggccatcgtggtccactgcagtgcaggtgtagggcgtacaggtacctttgtcgtcattgatgccatgctggacatgatgcatacagaacggaaggtggacgtgtatggctttgtgagccggatccgggcacagcgctgccagatggtgcaaaccgatatgcagtatgtcttcatataccaagcccttctggagcattatctctatggagatacagaactggaagtgacctctctagaaacccacctgcagaaaatttacaacaaaatcccagggaccagcaacaatggattagaggaggagtttaagaagttaacatcaatcaaaatccagaatgacaagatgcggactggaaaccttccagccaacatgaagaagaaccgtgttttacagatcattccatatgaattcaacagagtgatcattccagttaagcggggcgaagagaatacagactatgtgaacgcatcctttattgatggctaccggcagaaggactcctatatcgccagccagggccctcttctccacacaattgaggacttctggcgaatgatctgggagtggaaatcctgctctatcgtgatgctaacagaactggaggagagaggccaggagaagtgtgcccagtactggccatctgatggactggtgtcctatggagatattacagtggaactgaagaaggaggaggaatgtgagagctacaccgtccgagacctcctggtcaccaacaccagggagaataagagccggcagatccggcagttccacttccatggctggcctgaagtgggcatccccagtgacggaaagggcatgatcagcatcatcgccgccgtgcagaagcagcagcagcagtcagggaaccaccccatcaccgtgcactgcagcgccggggcaggaaggacggggaccttctgtgccctgagcaccgtcctggagcgtgtgaaagcagaggggattttggatgtcttccagactgtcaagagcctgcggctacagaggccacacatggtccagacactggaacagtatgagttctgctacaaggtggtgcaggagtatattgatgcattctcagattatgccaacttcaagtaagcggcaacaagggtccgtggaccaggaggattgcctttaatattttgtaatattctgttttgttaatataccccaaattgtgtatatatcttataactgttttagaaattggtacataggcttctattacctattaggtggaaattttatatgtaaatgtgttagcactgatagtcctttttccaatgttttattggggaattaaatagtgtgatgtttggattgatatcgtgaaatcctcagccgagaaattgggctggattgtgctttggttaatacatctttccctaaagaagataaacacaaaatccattccaggtagctcggcaccaactaagaaaaaaagcacaaagttctcagagctctcgaggaaagtggttgtccccgtaccaccatgcactgtaaatatccctcccctctctccctggtcccctcccccatccccaccactgatatcatggggagtaataggaccagagcggtatctctggcaccacactagggactatcaggtaataaaagctttgactccctgaggaaa

SEQ ID NO: 171721 - DNA, 3135 bp, Homo sapiens
  Payload ID: 13755
  Gene Symbol: PTPRA
  Gene Name: protein tyrosine phosphatase, receptor type, A
  Uniprot ID: P18433
  ENST ID: ENST00000356147
  CDS Start-End: 219-2600
gtgacacaactaaaaaaaaacaaaggtatttatggaattccactgagtggtaatggatgatgcagttcaaataactaaggacacatgttcaaagagcataattaactttttaaaagaagctagacttcttcagaagcttgccagtttttcaagctgatttctctcactggcaactcttcagagtgctgttcctactccaccctcccctggtgataagcatggattcctggttcattcttgttctgctcggcagtggtctgatatgtgtcagtgccaacaatgctaccacagttgcaccttctgtaggaattacaagattaattaactcatcaacggcagaaccagttaaagaagaggccaaaacttcaaatccaacttcttcactaacttctctttctgtggcaccaacattcagcccaaatataactctgggacccacctatttaaccactgtcaattcttcagactctgacaatgggaccacaagaacagcaagcaccaattctataggcattacaatttcaccaaatggaacgtggcttccagataaccagttcacggatgccagaacagaaccctgggaggggaattccagcaccgcagcaaccactccagaaactttccctccttcagatgagacaccaattattgcggtgatggtggccctgtcctctctgctagtgatcgtgtttattatcatagttttgtacatgttaaggtttaagaaatacaagcaagctgggagccattccaattctttccgcttatccaacggccgcactgaggatgtggagccccagagtgtgccacttctggccagatccccaagcaccaacaggaaatacccacccctgcccgtggacaagctggaagaggaaattaaccggagaatggcagacgacaataagctcttcagggaggaattcaacgctctccctgcatgtcctatccaggccacctgtgaggctgcttccaaggaggaaaacaaggaaaaaaatcgatatgtaaacatcttgccttatgaccactctagagtccacctgacaccggttgaaggggttccagattctgattacatcaatgcttcattcatcaacggctaccaagaaaagaacaaattcattgctgcacaaggaccaaaagaagaaacggtgaatgatttctggcggatgatctgggaacaaaacacagccaccatcgtcatggttaccaacctgaaggagagaaaggagtgcaagtgcgcccagtactggccagaccaaggctgctggacctatgggaatattcgggtgtctgtagaggatgtgactgtcctggtggactacacagtacggaagttctgcatccagcaggtgggcgacatgaccaacagaaagccacagcgcctcatcactcagttccactttaccagctggccagactttggggtgccttttaccccgatcggcatgctcaagttcctcaagaaggtgaaggcctgtaaccctcagtatgcaggggccatcgtggtccactgcagtgcaggtgtagggcgtacaggtacctttgtcgtcattgatgccatgctggacatgatgcatacagaacggaaggtggacgtgtatggctttgtgagccggatccgggcacagcgctgccagatggtgcaaaccgatatgcagtatgtcttcatataccaagcccttctggagcattatctctatggagatacagaactggaagtgacctctctagaaacccacctgcagaaaatttacaacaaaatcccagggaccagcaacaatggattagaggaggagtttaagaagttaacatcaatcaaaatccagaatgacaagatgcggactggaaaccttccagccaacatgaagaagaaccgtgttttacagatcattccatatgaattcaacagagtgatcattccagttaagcggggcgaagagaatacagactatgtgaacgcatcctttattgatggctaccggcagaaggactcctatatcgccagccagggccctcttctccacacaattgaggacttctggcgaatgatctgggagtggaaatcctgctctatcgtgatgctaacagaactggaggagagaggccaggagaagtgtgcccagtactggccatctgatggactggtgtcctatggagatattacagtggaactgaagaaggaggaggaatgtgagagctacaccgtccgagacctcctggtcaccaacaccagggagaataagagccggcagatccggcagttccacttccatggctggcctgaagtgggcatccccagtgacggaaagggcatgatcagcatcatcgccgccgtgcagaagcagcagcagcagtcagggaaccaccccatcaccgtgcactgcagcgccggggcaggaaggacggggaccttctgtgccctgagcaccgtcctggagcgtgtgaaagcagaggggattttggatgtcttccagactgtcaagagcctgcggctacagaggccacacatggtccagacactggaacagtatgagttctgctacaaggtggtgcaggagtatattgatgcattctcagattatgccaacttcaagtaagcggcaacaagggtccgtggaccaggaggattgcctttaatattttgtaatattctgttttgttaatataccccaaattgtgtatatatcttataactgttttagaaattggtacataggcttctattacctattaggtggaaattttatatgtaaatgtgttagcactgatagtcctttttccaatgttttattggggaattaaatagtgtgatgtttggattgatatcgtgaaatcctcagccgagaaattgggctggattgtgctttggttaatacatctttccctaaagaagataaacacaaaatccattccaggtagctcggcaccaactaagaaaaaaagcacaaagttctcagagctctcgaggaaagtggttgtccccgtaccaccatgcactgtaaatatccctcccctctctccctggtcccctcccccatccccaccactgatatcatggggagtaataggaccagagcggtatctctggcaccacactagggactatcaggtaataaaagctttgactccctg

SEQ ID NO: 171722 - DNA, 3636 bp, Homo sapiens
  Payload ID: 13755
  Gene Symbol: PTPRA
  Gene Name: protein tyrosine phosphatase, receptor type, A
  Uniprot ID: P18433
  ENST ID: ENST00000380393
  CDS Start-End: 687-3095
ggagtatgagccacgctcaggggagcaggtaccccttctcctaaagatgaagaggagcaaactggcactaagcaaggccatcgagagcggggacactgacctggtgttcacggtgttgctgcacctgaagaacgagctgaaccgaggagattttttcatgacccttcggaatcagcccatggccctcagtttgtaccgacagttctgtaagcatcaggagctagagacgctgaaggacctttacaatcaggatgacaatcaccaggaattgggcagcttccacatccgagccagctatgctgcagaagagcgtattgaggggcgagtagcagctctgcagacagccgccgatgccttctacaaggccaagaatgagtttgcagccaaggctacagaggatcaaatgcggctcctacggctgcagcggcgcctagaagacgagctggggggccagttcctagacctgtctctacatgacacagttaccaccctcattcttggcggtcacaacaagcgtgcagagcagctggcacgtgacttccgcatccctgacaagaggtgacacaactaaaaaaaaacaaaggtatttatggaattccactgagtggtaatggatgatgcagttcaaataactaaggacacatgttcaaagagcataattaactttttaaaagaagctaataagcatggattcctggttcattcttgttctgctcggcagtggtctgatatgtgtcagtgccaacaatgctaccacagttgcaccttctgtaggaattacaagattaattaactcatcaacggcagaaccagttaaagaagaggccaaaacttcaaatccaacttcttcactaacttctctttctgtggcaccaacattcagcccaaatataactctgggacccacctatttaaccactgtcaattcttcagactctgacaatgggaccacaagaacagcaagcaccaattctataggcattacaatttcaccaaatggaacgtggcttccagataaccagttcacggatgccagaacagaaccctgggaggggaattccagcaccgcagcaaccactccagaaactttccctccttcaggtaattctgactcgaaggacagaagagatgagacaccaattattgcggtgatggtggccctgtcctctctgctagtgatcgtgtttattatcatagttttgtacatgttaaggtttaagaaatacaagcaagctgggagccattccaattctttccgcttatccaacggccgcactgaggatgtggagccccagagtgtgccacttctggccagatccccaagcaccaacaggaaatacccacccctgcccgtggacaagctggaagaggaaattaaccggagaatggcagacgacaataagctcttcagggaggaattcaacgctctccctgcatgtcctatccaggccacctgtgaggctgcttccaaggaggaaaacaaggaaaaaaatcgatatgtaaacatcttgccttatgaccactctagagtccacctgacaccggttgaaggggttccagattctgattacatcaatgcttcattcatcaacggctaccaagaaaagaacaaattcattgctgcacaaggaccaaaagaagaaacggtgaatgatttctggcggatgatctgggaacaaaacacagccaccatcgtcatggttaccaacctgaaggagagaaaggagtgcaagtgcgcccagtactggccagaccaaggctgctggacctatgggaatattcgggtgtctgtagaggatgtgactgtcctggtggactacacagtacggaagttctgcatccagcaggtgggcgacatgaccaacagaaagccacagcgcctcatcactcagttccactttaccagctggccagactttggggtgccttttaccccgatcggcatgctcaagttcctcaagaaggtgaaggcctgtaaccctcagtatgcaggggccatcgtggtccactgcagtgcaggtgtagggcgtacaggtacctttgtcgtcattgatgccatgctggacatgatgcatacagaacggaaggtggacgtgtatggctttgtgagccggatccgggcacagcgctgccagatggtgcaaaccgatatgcagtatgtcttcatataccaagcccttctggagcattatctctatggagatacagaactggaagtgacctctctagaaacccacctgcagaaaatttacaacaaaatcccagggaccagcaacaatggattagaggaggagtttaagaagttaacatcaatcaaaatccagaatgacaagatgcggactggaaaccttccagccaacatgaagaagaaccgtgttttacagatcattccatatgaattcaacagagtgatcattccagttaagcggggcgaagagaatacagactatgtgaacgcatcctttattgatggctaccggcagaaggactcctatatcgccagccagggccctcttctccacacaattgaggacttctggcgaatgatctgggagtggaaatcctgctctatcgtgatgctaacagaactggaggagagaggccaggagaagtgtgcccagtactggccatctgatggactggtgtcctatggagatattacagtggaactgaagaaggaggaggaatgtgagagctacaccgtccgagacctcctggtcaccaacaccagggagaataagagccggcagatccggcagttccacttccatggctggcctgaagtgggcatccccagtgacggaaagggcatgatcagcatcatcgccgccgtgcagaagcagcagcagcagtcagggaaccaccccatcaccgtgcactgcagcgccggggcaggaaggacggggaccttctgtgccctgagcaccgtcctggagcgtgtgaaagcagaggggattttggatgtcttccagactgtcaagagcctgcggctacagaggccacacatggtccagacactggaacagtatgagttctgctacaaggtggtgcaggagtatattgatgcattctcagattatgccaacttcaagtaagcggcaacaagggtccgtggaccaggaggattgcctttaatattttgtaatattctgttttgttaatataccccaaattgtgtatatatcttataactgttttagaaattggtacataggcttctattacctattaggtggaaattttatatgtaaatgtgttagcactgatagtcctttttccaatgttttattggggaattaaatagtgtgatgtttggattgatatcgtgaaatcctcagccgagaaattgggctggattgtgctttggttaatacatctttccctaaagaagataaacacaaaatccattccaggtagctcggcaccaactaagaaaaaaagcacaaagttctcagagctctcgaggaaagtggttgtccccgtaccaccatgcactgtaaatatccctcccctctctccctggtcccctcccccatccccaccactgatatcatggggagtaataggaccagagcggtatctctggcaccacactagggactatcaggtaataaaagctttgactccctgaggaaa

SEQ ID NO: 171723 - DNA, 3337 bp, Homo sapiens
  Payload ID: 13755
  Gene Symbol: PTPRA
  Gene Name: protein tyrosine phosphatase, receptor type, A
  Uniprot ID: P18433
  ENST ID: ENST00000399903
  CDS Start-End: 394-2802
ctgcggcgagtgcggcgctgacagagacgcgcgcgcgcgcgatcgcgctcggaccccggccgctgccgccatcactgtcgcccgcccagtcgcccctcagccgcttcccctcgccatggaggcgaggccgccgccgccgccgcggggctcggagccgcgggccgggcggcggccctgagggctagtggcggcccgaaacgccgccgcggagccgaggcggagccgctgtcctcgtccccagcggtcccgcccaacgcccgactctgtgacacaactaaaaaaaaacaaaggtatttatggaattccactgagtggtaatggatgatgcagttcaaataactaaggacacatgttcaaagagcataattaactttttaaaagaagctaataagcatggattcctggttcattcttgttctgctcggcagtggtctgatatgtgtcagtgccaacaatgctaccacagttgcaccttctgtaggaattacaagattaattaactcatcaacggcagaaccagttaaagaagaggccaaaacttcaaatccaacttcttcactaacttctctttctgtggcaccaacattcagcccaaatataactctgggacccacctatttaaccactgtcaattcttcagactctgacaatgggaccacaagaacagcaagcaccaattctataggcattacaatttcaccaaatggaacgtggcttccagataaccagttcacggatgccagaacagaaccctgggaggggaattccagcaccgcagcaaccactccagaaactttccctccttcaggtaattctgactcgaaggacagaagagatgagacaccaattattgcggtgatggtggccctgtcctctctgctagtgatcgtgtttattatcatagttttgtacatgttaaggtttaagaaatacaagcaagctgggagccattccaattctttccgcttatccaacggccgcactgaggatgtggagccccagagtgtgccacttctggccagatccccaagcaccaacaggaaatacccacccctgcccgtggacaagctggaagaggaaattaaccggagaatggcagacgacaataagctcttcagggaggaattcaacgctctccctgcatgtcctatccaggccacctgtgaggctgcttccaaggaggaaaacaaggaaaaaaatcgatatgtaaacatcttgccttatgaccactctagagtccacctgacaccggttgaaggggttccagattctgattacatcaatgcttcattcatcaacggctaccaagaaaagaacaaattcattgctgcacaaggaccaaaagaagaaacggtgaatgatttctggcggatgatctgggaacaaaacacagccaccatcgtcatggttaccaacctgaaggagagaaaggagtgcaagtgcgcccagtactggccagaccaaggctgctggacctatgggaatattcgggtgtctgtagaggatgtgactgtcctggtggactacacagtacggaagttctgcatccagcaggtgggcgacatgaccaacagaaagccacagcgcctcatcactcagttccactttaccagctggccagactttggggtgccttttaccccgatcggcatgctcaagttcctcaagaaggtgaaggcctgtaaccctcagtatgcaggggccatcgtggtccactgcagtgcaggtgtagggcgtacaggtacctttgtcgtcattgatgccatgctggacatgatgcatacagaacggaaggtggacgtgtatggctttgtgagccggatccgggcacagcgctgccagatggtgcaaaccgatatgcagtatgtcttcatataccaagcccttctggagcattatctctatggagatacagaactggaagtgacctctctagaaacccacctgcagaaaatttacaacaaaatcccagggaccagcaacaatggattagaggaggagtttaagaagttaacatcaatcaaaatccagaatgacaagatgcggactggaaaccttccagccaacatgaagaagaaccgtgttttacagatcattccatatgaattcaacagagtgatcattccagttaagcggggcgaagagaatacagactatgtgaacgcatcctttattgatggctaccggcagaaggactcctatatcgccagccagggccctcttctccacacaattgaggacttctggcgaatgatctgggagtggaaatcctgctctatcgtgatgctaacagaactggaggagagaggccaggagaagtgtgcccagtactggccatctgatggactggtgtcctatggagatattacagtggaactgaagaaggaggaggaatgtgagagctacaccgtccgagacctcctggtcaccaacaccagggagaataagagccggcagatccggcagttccacttccatggctggcctgaagtgggcatccccagtgacggaaagggcatgatcagcatcatcgccgccgtgcagaagcagcagcagcagtcagggaaccaccccatcaccgtgcactgcagcgccggggcaggaaggacggggaccttctgtgccctgagcaccgtcctggagcgtgtgaaagcagaggggattttggatgtcttccagactgtcaagagcctgcggctacagaggccacacatggtccagacactggaacagtatgagttctgctacaaggtggtgcaggagtatattgatgcattctcagattatgccaacttcaagtaagcggcaacaagggtccgtggaccaggaggattgcctttaatattttgtaatattctgttttgttaatataccccaaattgtgtatatatcttataactgttttagaaattggtacataggcttctattacctattaggtggaaattttatatgtaaatgtgttagcactgatagtcctttttccaatgttttattggggaattaaatagtgtgatgtttggattgatatcgtgaaatcctcagccgagaaattgggctggattgtgctttggttaatacatctttccctaaagaagataaacacaaaatccattccaggtagctcggcaccaactaagaaaaaaagcacaaagttctcagagctctcgaggaaagtggttgtccccgtaccaccatgcactgtaaatatccctcccctctctccctggtcccctcccccatccccaccactgatatcatggggagtaataggaccagagcggtatctctggcaccacactagggactatcaggtaataaaagctttgactccctg

SEQ ID NO: 171724 - DNA, 707 bp, Homo sapiens
  Payload ID: 13755
  Gene Symbol: PTPRA
  Gene Name: protein tyrosine phosphatase, receptor type, A
  ENST ID: ENST00000431048
  CDS Start-End: 293-707
agagacgcgcgcgcgcgcgatcgcgctcggaccccggccgctgccgccatcactgtcgcccgcccagtcgcccctcagccgcttcccctcgccatggaggcgaggccgccgccgccgccgcggggctcggagccgcgggccgggcggcggccctgagggctagtggcggcccgaaacgccgccgcggagccgaggcggagccgctgtcctcgtccccagcggtcccgcccaacgcccgactctgacacatgttcaaagagcataattaactttttaaaagaagctaataagcatggattcctggttcattcttgttctgctcggcagtggtctgatatgtgtcagtgccaacaatgctaccacagttgcaccttctgtaggaattacaagattaattaactcatcaacggcagaaccagttaaagaagaggccaaaacttcaaatccaacttcttcactaacttctctttctgtggcaccaacattcagcccaaatataactctgggacccacctatttaaccactgtcaattcttcagactctgacaatgggaccacaagaacagcaagcaccaattctataggcattacaatttcaccaaatggaacgtggcttccagataaccagttcacggatgccagaacagaaccctgggaggggaattccagcaccgcagcaaccactccagaaactttccctccttcag

SEQ ID NO: 171725 - DNA, 733 bp, Homo sapiens
  Payload ID: 13755
  Gene Symbol: PTPRA
  Gene Name: protein tyrosine phosphatase, receptor type, A
  ENST ID: ENST00000430705
  CDS Start-End: 207-733
gcggcccgaaacgccgccgcggagccgaggcggagccgctgtcctcgtccccagcggtcccgcccaacgcccgactctgtgacacaactaaaaaaaaacaaaggtatttatggaattccactgagtggtaatggatgatgcagttcaaataactaaggacacatgttcaaagagcataattaactttttaaaagaagctaataagcatggattcctggttcattcttgttctgctcggcagtggtctgatatgtgtcagtgccaacaatgctaccacagttgcaccttctgtaggaattacaagattaattaactcatcaacggcagaaccagttaaagaagaggccaaaacttcaaatccaacttcttcactaacttctctttctgtggcaccaacattcagcccaaatataactctgggacccacctatttaaccactgtcaattcttcagactctgacaatgggaccacaagaacagcaagcaccaattctataggcattacaatttcaccaaatggaacgtggcttccagataaccagttcacggatgccagaacagaaccctgggaggggaattccagcaccgcagcaaccactccagaaactttccctccttcaggtaattctgactcgaaggacagaagagatgagacaccaattattgcggtgatggtggccctgtcctctctgctagtgatcgtgtttattatcatagttttgtacatgttaag

SEQ ID NO: 171726 - DNA, 1107 bp, Homo sapiens
  Payload ID: 13755
  Gene Symbol: PTPRA
  Gene Name: protein tyrosine phosphatase, receptor type, A
  ENST ID: ENST00000455631
  CDS Start-End: 348-1107
tgtcggccaaccagcgcctgtctctgaacagccaatgaacacgcgtcttacagccaaggccgggtcgggagcgaggctgcggcgagtgcggcgctgacagagacgcgcgcgcgcgcgatcgcgctcggaccccggccgctgccgccatcactgtcgcccgcccagtcgcccctcagccgcttcccctcgccatggaggcgaggccgccgccgccgccgcggggctcggagccgcgggccgggcggcggccctgagggctagtggcggcccgaaacgccgccgcggagccgaggcggagccgctgtcctcgtccccagcggtcccgcccaacgcccgactctataagcatggattcctggttcattcttgttctgctcggcagtggtctgatatgtgtcagtgccaacaatgctaccacagttgcaccttctgtaggaattacaagattaattaactcatcaacggcagaaccagttaaagaagaggccaaaacttcaaatccaacttcttcactaacttctctttctgtggcaccaacattcagcccaaatataactctgggacccacctatttaaccactgtcaattcttcagactctgacaatgggaccacaagaacagcaagcaccaattctataggcattacaatttcaccaaatggaacgtggcttccagataaccagttcacggatgccagaacagaaccctgggaggggaattccagcaccgcagcaaccactccagaaactttccctccttcagatgagacaccaattattgcggtgatggtggccctgtcctctctgctagtgatcgtgtttattatcatagttttgtacatgttaaggtttaagaaatacaagcaagctgggagccattccaattctttccgcttatccaacggccgcactgaggatgtggagccccagagtgtgccacttctggccagatccccaagcaccaacaggaaatacccacccctgcccgtggacaagctggaagaggaaattaaccggagaatggcagacgacaataagctcttcagggaggaattcaacgctctccctgcatgtcctatccaggccacctgtgaggctgcttccaagg

SEQ ID NO: 171727 - DNA, 6110 bp, Homo sapiens
  Payload ID: 13756
  Gene Symbol: PTPRB
  Gene Name: protein tyrosine phosphatase, receptor type, B
  Uniprot ID: P23467
  ENST ID: ENST00000261266
  CDS Start-End: 31-6024
gtctcctctggatcttaactactgagcgcaatgctgagccatggagccgggttggccttgtggatcacactgagcctgctgcagactggactggcggagccagagagatgtaacttcaccctggcggagtccaaggcctccagccattctgtgtctatccagtggagaattttgggctcaccctgtaactttagcctcatctatagcagtgacaccctgggggccgcgttgtgccctacctttcggatagacaacaccacatacggatgtaaccttcaagatttacaagcaggaaccatctataacttcaggattatttctctggatgaagagagaacagtggtcttgcaaacagatcctttacctcctgctaggtttggagtcagtaaagagaagacgacttcaaccagcttgcatgtttggtggactccttcttccggaaaagtcacctcatatgaggtgcaattatttgatgaaaataaccaaaagatacagggggttcaaattcaagaaagtacttcatggaatgaatacacttttttcaatctcactgctggtagtaaatacaatattgccatcacagctgtttctggaggaaaacgttctttttcagtttataccaatggatcaacagtgccatctccagtgaaagatattggtatttccacaaaagccaattctctcctgatttcctggtcccatggttctgggaatgtggaacgataccggctgatgctaatggataaagggatcctagttcatggcggtgttgtggacaaacatgctacttcctatgcttttcacgggctgacccctggctacctctacaacctcactgttatgactgaggctgcagggctgcaaaactacaggtggaaactagtcaggacagcccccatggaagtctcaaatctgaaggtgacaaatgatggcagtttgacctctctaaaagtcaaatggcaaagacctcctggaaatgtggattcttacaatatcaccctgtctcacaaagggaccatcaaggaatccagagtattagcaccttggattactgaaactcactttaaagagttagtccccggtcgactttatcaagttactgtcagctgtgtctctggtgaactgtctgctcagaagatggcagtgggcagaacatttccagacaaagttgcaaacctggaggcaaacaataatggcaggatgaggtctcttgtagtgagctggtcgccccctgctggagactgggagcagtatcggatcctactcttcaatgattctgtggtgctgctcaacatcactgtgggaaaggaagaaacacagtatgtcatggatgacacggggctcgtaccgggaagacagtatgaggtggaagtcattgttgagagtggaaatttgaagaattctgagcgttgccaaggcaggacagtccccctggctgtcctccagcttcgtgtcaaacatgccaatgaaacctcactgagtatcatgtggcagacccctgtagcagaatgggagaaatacatcatttccctagctgacagagacctcttactgatccacaagtcactctccaaagatgccaaagaattcacttttactgacctggtgcctggacgaaaatacatggctacagtcaccagtattagtggagacttaaaaaattcctcttcagtaaaaggaagaacagtgcctgcccaagtgactgacttgcatgtggccaaccaaggaatgaccagtagtctgtttactaactggacccaggcacaaggagacgtagaattttaccaagtcttactgatccatgaaaatgtggtcattaaaaatgaaagcatctccagtgagaccagcagatacagcttccactctctcaagtccggcagcctgtactccgtggtggtaacaacagtgagtggagggatctcttcccgacaagtggttgtggagggaagaacagtcccttccagtgtgagtggagtaacggtgaacaattccggtcgtaatgactacctcagcgtttcctggctgctggcgcccggagatgtggataactatgaggtaacattgtctcatgacggcaaggtggttcagtcccttgtcattgccaagtctgtcagagaatgttccttcagctccctcaccccaggccgcctctacaccgtgaccataactacaaggagtggcaagtatgaaaatcactccttcagccaagagcggacagtgcctgacaaagtccagggagtcagtgttagcaactcagccaggagtgactatttaagggtatcctgggtgcatgccactggagactttgatcactatgaagtcaccattaaaaacaaaaacaacttcattcaaactaaaagcattcccaagtcagaaaacgaatgtgtatttgttcagctagtccctggacggttgtacagtgtcactgttactacaaaaagtggacaatatgaagccaatgaacaagggaatgggagaacaattccagagcctgttaaggatctaacattgcgcaacaggagcactgaggacttgcatgtgacttggtcaggagctaatggggatgtcgaccaatatgagatccagctgctcttcaatgacatgaaagtatttcctccttttcaccttgtaaataccgcaaccgagtatcgatttacttccctaacaccaggccgccaatacaaaattcttgtcttgacgattagcggggatgtacagcagtcagccttcattgagggcttcacagttcctagtgctgtcaaaaatattcacatttctcccaatggagcaacagatagcctgacggtgaactggactcctggtgggggagacgttgattcctacacggtgtcggcattcaggcacagtcaaaaggttgactctcagactattcccaagcacgtctttgagcacacgttccacagactggaggccggggagcagtaccagatcatgattgcctcagtcagcgggtccctgaagaatcagataaatgtggttgggcggacagttccagcatctgtccaaggagtaattgcagacaatgcatacagcagttattccttaatagtaagttggcaaaaagctgctggtgtggcagaaagatatgatatcctgcttctaactgaaaatggaatccttctgcgcaacacatcagagccagccaccactaagcaacacaaatttgaagatctaacaccaggcaagaaatacaagatacagatcctaactgtcagtggaggcctctttagcaaggaagcccagactgaaggccgaacagtcccagcagctgtcaccgacctgaggatcacagagaactccaccaggcacctgtccttccgctggaccgcctcagagggggagctcagctggtacaacatctttttgtacaacccagatgggaatctccaggagagagctcaagttgacccactagtccagagcttctctttccagaacttgctacaaggcagaatgtacaagatggtgattgtaactcacagtggggagctgtctaatgagtctttcatatttggtagaacagtcccagcctctgtgagtcatctcagggggtccaatcggaacacgacagacagcctttggttcaactggagtccagcctctggggactttgacttttatgagctgattctctataatcccaatggcacaaagaaggaaaactggaaagacaaggacctgacggagtggcggtttcaaggccttgttcctggaaggaagtacgtgctgtgggtggtaactcacagtggagatctcagcaataaagtcacagcggagagcagaacagctccaagtcctcccagtcttatgtcatttgctgacattgcaaacacatccttggccatcacgtggaaagggcccccagactggacagactacaacgactttgagctgcagtggttgcccagagatgcacttactgtcttcaacccctacaacaacagaaaatcagaaggacgcattgtgtatggtcttcgtccagggagatcctatcaattcaacgtcaagactgtcagtggtgattcctggaaaacttacagcaaaccaatttttggatctgtgaggacaaagcctgacaagatacaaaacctgcattgccggcctcagaactccacggccattgcctgttcttggatccctcctgattctgactttgatggttatagtattgaatgccggaaaatggacacccaagaagttgagttttccagaaagctggagaaagaaaaatctctgctcaacatcatgatgctagtgccccataagaggtacctggtgtccatcaaagtgcagtcggccggcatgaccagcgaggtggttgaagacagcactatcacaatgatagaccgcccccctcctccacccccacacattcgtgtgaatgaaaaggatgtgctaattagcaagtcttccatcaactttactgtcaactgcagctggttcagcgacaccaatggagctgtgaaatacttcacagtggtggtgagagaggctgatggcagtgatgagctgaagccagaacagcagcaccctctcccttcctacctggagtacaggcacaatgcctccattcgggtgtatcagactaattattttgccagcaaatgtgccgaaaatcctaacagcaactccaagagttttaacattaagcttggagcagagatggagagcctaggtggaaaatgcgatcccactcagcaaaaattctgtgatggaccactgaagccacacactgcctacagaatcagcattcgagcttttacacagctctttgatgaggacctgaaggaattcacaaagccactctattcagacacatttttttctttacccatcactactgaatcagagcccttgtttggagctattgaaggtgtgagtgctggtctgtttttaattggcatgctagtggctgttgttgccttattgatctgcagacagaaagtgagccatggtcgagaaagaccctctgcccgtctgagcattcgtagggatcgaccattatctgtccacttaaacctgggccagaaaggtaaccggaaaacttcttgtccaataaaaataaatcagtttgaagggcatttcatgaagctacaggctgactccaactaccttctatccaaggaatacgaggagttaaaagacgtgggccgaaaccagtcatgtgacattgcactcttgccggagaatagagggaaaaatcgatacaacaatatattgccctatgatgccacgcgagtgaagctctccaatgtagatgatgatccttgctctgactacatcaatgccagctacatccctggcaacaacttcagaagagaatacattgtcactcagggaccgcttcctggcaccaaggatgacttctggaaaatggtgtgggaacaaaacgttcacaacatcgtcatggtgacccagtgtgttgagaagggccgagtaaagtgtgatcattactggccagcggaccaggattccctctactatggggacctcatcctgcagatgctctcagagtccgtcctgcctgagtggaccatccgggagtttaagatatgcggtgaggaacagcttgatgcacacagactcatccgccactttcactatacggtgtggccagaccatggagtcccagaaaccacccagtctctgatccagtttgtgagaactgtcagggactacatcaacagaagcccgggtgctgggcccactgtggtgcactgcagtgctggtgtgggtaggactggaacctttattgcattggaccgaatcctccagcagttagactccaaagactctgtggacatttatggagcagtgcacgacctaagacttcacagggttcacatggtccagactgagtgtcagtatgtctacctacatcagtgtgtaagagatgtcctcagagcaagaaagctacggagtgaacaagaaaaccccttgtttccaatctatgaaaatgtgaatccagagtatcacagagatccagtctattcaaggcattgagaatgtacctgaagagctcctggataaaaattattcactgtgtgatttgtttttaaaaacttgcttcatgccctacagaggtgcca

SEQ ID NO: 171728 - DNA, 12316 bp, Homo sapiens
  Payload ID: 13756
  Gene Symbol: PTPRB
  Gene Name: protein tyrosine phosphatase, receptor type, B
  Uniprot ID: P23467
  ENST ID: ENST00000334414
  CDS Start-End: 46-6693
ttttttttttccccaagcgaagcatgaacagttgctaagtggaaaatggaggctgaattttacatggtgattcttacctgcttgatcttcaggaactcagaagggtttcagattgtccatgtccagaaacaacagtgtcttttcaaaaatgagaaagtggtcgtgggctcatgcaacaggaccatccagaaccagcagtggatgtggactgaggatgaaaagctccttcatgttaaatctgcactgtgcttggccatctccaactcttcccgcggcccctcccgctcagccatcttggaccgctgttcccaggcaccccgatggacctgctatgatcaggaaggcttccttgaggtggaaaatgcctctctctttctccagaaacaaggctccagagtagtggtcaagaaggccaggaaatacctccatagctggatgaaaatagatgtcaacaaggagggaaaactggtcaatgaaagcctctgtttacaaaaagctggcctgggagcagaagtttcggtgaggagcactagaaacacggctccaccccagattctcactacctttaatgcagttccagatggcctggtattccttattaggaataccacagaggccttcatcagaaatgctgcagaaaactacagccaaaacagcagcgagaggcagcatcccaatctgcacatgactggaattacagacacatcatgggttttgtcgactactcagcccttctccagcaccactgaagagactggactggcggagccagagagatgtaacttcaccctggcggagtccaaggcctccagccattctgtgtctatccagtggagaattttgggctcaccctgtaactttagcctcatctatagcagtgacaccctgggggccgcgttgtgccctacctttcggatagacaacaccacatacggatgtaaccttcaagatttacaagcaggaaccatctataacttcaggattatttctctggatgaagagagaacagtggtcttgcaaacagatcctttacctcctgctaggtttggagtcagtaaagagaagacgacttcaaccagcttgcatgtttggtggactccttcttccggaaaagtcacctcatatgaggtgcaattatttgatgaaaataaccaaaagatacagggggttcaaattcaagaaagtacttcatggaatgaatacacttttttcaatctcactgctggtagtaaatacaatattgccatcacagctgtttctggaggaaaacgttctttttcagtttataccaatggatcaacagtgccatctccagtgaaagatattggtatttccacaaaagccaattctctcctgatttcctggtcccatggttctgggaatgtggaacgataccggctgatgctaatggataaagggatcctagttcatggcggtgttgtggacaaacatgctacttcctatgcttttcacgggctgacccctggctacctctacaacctcactgttatgactgaggctgcagggctgcaaaactacaggtggaaactagtcaggacagcccccatggaagtctcaaatctgaaggtgacaaatgatggcagtttgacctctctaaaagtcaaatggcaaagacctcctggaaatgtggattcttacaatatcaccctgtctcacaaagggaccatcaaggaatccagagtattagcaccttggattactgaaactcactttaaagagttagtccccggtcgactttatcaagttactgtcagctgtgtctctggtgaactgtctgctcagaagatggcagtgggcagaacatttccagacaaagttgcaaacctggaggcaaacaataatggcaggatgaggtctcttgtagtgagctggtcgccccctgctggagactgggagcagtatcggatcctactcttcaatgattctgtggtgctgctcaacatcactgtgggaaaggaagaaacacagtatgtcatggatgacacggggctcgtaccgggaagacagtatgaggtggaagtcattgttgagagtggaaatttgaagaattctgagcgttgccaaggcaggacagtccccctggctgtcctccagcttcgtgtcaaacatgccaatgaaacctcactgagtatcatgtggcagacccctgtagcagaatgggagaaatacatcatttccctagctgacagagacctcttactgatccacaagtcactctccaaagatgccaaagaattcacttttactgacctggtgcctggacgaaaatacatggctacagtcaccagtattagtggagacttaaaaaattcctcttcagtaaaaggaagaacagtgcctgcccaagtgactgacttgcatgtggccaaccaaggaatgaccagtagtctgtttactaactggacccaggcacaaggagacgtagaattttaccaagtcttactgatccatgaaaatgtggtcattaaaaatgaaagcatctccagtgagaccagcagatacagcttccactctctcaagtccggcagcctgtactccgtggtggtaacaacagtgagtggagggatctcttcccgacaagtggttgtggagggaagaacagtcccttccagtgtgagtggagtaacggtgaacaattccggtcgtaatgactacctcagcgtttcctggctgctggcgcccggagatgtggataactatgaggtaacattgtctcatgacggcaaggtggttcagtcccttgtcattgccaagtctgtcagagaatgttccttcagctccctcaccccaggccgcctctacaccgtgaccataactacaaggagtggcaagtatgaaaatcactccttcagccaagagcggacagtgcctgacaaagtccagggagtcagtgttagcaactcagccaggagtgactatttaagggtatcctgggtgcatgccactggagactttgatcactatgaagtcaccattaaaaacaaaaacaacttcattcaaactaaaagcattcccaagtcagaaaacgaatgtgtatttgttcagctagtccctggacggttgtacagtgtcactgttactacaaaaagtggacaatatgaagccaatgaacaagggaatgggagaacaattccagagcctgttaaggatctaacattgcgcaacaggagcactgaggacttgcatgtgacttggtcaggagctaatggggatgtcgaccaatatgagatccagctgctcttcaatgacatgaaagtatttcctccttttcaccttgtaaataccgcaaccgagtatcgatttacttccctaacaccaggccgccaatacaaaattcttgtcttgacgattagcggggatgtacagcagtcagccttcattgagggcttcacagttcctagtgctgtcaaaaatattcacatttctcccaatggagcaacagatagcctgacggtgaactggactcctggtgggggagacgttgattcctacacggtgtcggcattcaggcacagtcaaaaggttgactctcagactattcccaagcacgtctttgagcacacgttccacagactggaggccggggagcagtaccagatcatgattgcctcagtcagcgggtccctgaagaatcagataaatgtggttgggcggacagttccagcatctgtccaaggagtaattgcagacaatgcatacagcagttattccttaatagtaagttggcaaaaagctgctggtgtggcagaaagatatgatatcctgcttctaactgaaaatggaatccttctgcgcaacacatcagagccagccaccactaagcaacacaaatttgaagatctaacaccaggcaagaaatacaagatacagatcctaactgtcagtggaggcctctttagcaaggaagcccagactgaaggccgaacagtcccagcagctgtcaccgacctgaggatcacagagaactccaccaggcacctgtccttccgctggaccgcctcagagggggagctcagctggtacaacatctttttgtacaacccagatgggaatctccaggagagagctcaagttgacccactagtccagagcttctctttccagaacttgctacaaggcagaatgtacaagatggtgattgtaactcacagtggggagctgtctaatgagtctttcatatttggtagaacagtcccagcctctgtgagtcatctcagggggtccaatcggaacacgacagacagcctttggttcaactggagtccagcctctggggactttgacttttatgagctgattctctataatcccaatggcacaaagaaggaaaactggaaagacaaggacctgacggagtggcggtttcaaggccttgttcctggaaggaagtacgtgctgtgggtggtaactcacagtggagatctcagcaataaagtcacagcggagagcagaacagctccaagtcctcccagtcttatgtcatttgctgacattgcaaacacatccttggccatcacgtggaaagggcccccagactggacagactacaacgactttgagctgcagtggttgcccagagatgcacttactgtcttcaacccctacaacaacagaaaatcagaaggacgcattgtgtatggtcttcgtccagggagatcctatcaattcaacgtcaagactgtcagtggtgattcctggaaaacttacagcaaaccaatttttggatctgtgaggacaaagcctgacaagatacaaaacctgcattgccggcctcagaactccacggccattgcctgttcttggatccctcctgattctgactttgatggttatagtattgaatgccggaaaatggacacccaagaagttgagttttccagaaagctggagaaagaaaaatctctgctcaacatcatgatgctagtgccccataagaggtacctggtgtccatcaaagtgcagtcggccggcatgaccagcgaggtggttgaagacagcactatcacaatgatagaccgcccccctcctccacccccacacattcgtgtgaatgaaaaggatgtgctaattagcaagtcttccatcaactttactgtcaactgcagctggttcagcgacaccaatggagctgtgaaatacttcacagtggtggtgagagaggctgatggcagtgatgagctgaagccagaacagcagcaccctctcccttcctacctggagtacaggcacaatgcctccattcgggtgtatcagactaattattttgccagcaaatgtgccgaaaatcctaacagcaactccaagagttttaacattaagcttggagcagagatggagagcctaggtggaaaatgcgatcccactcagcaaaaattctgtgatggaccactgaagccacacactgcctacagaatcagcattcgagcttttacacagctctttgatgaggacctgaaggaattcacaaagccactctattcagacacatttttttctttacccatcactactgaatcagagcccttgtttggagctattgaaggtgtgagtgctggtctgtttttaattggcatgctagtggctgttgttgccttattgatctgcagacagaaagtgagccatggtcgagaaagaccctctgcccgtctgagcattcgtagggatcgaccattatctgtccacttaaacctgggccagaaaggtaaccggaaaacttcttgtccaataaaaataaatcagtttgaagggcatttcatgaagctacaggctgactccaactaccttctatccaaggaatacgaggagttaaaagacgtgggccgaaaccagtcatgtgacattgcactcttgccggagaatagagggaaaaatcgatacaacaatatattgccctatgatgccacgcgagtgaagctctccaatgtagatgatgatccttgctctgactacatcaatgccagctacatccctggcaacaacttcagaagagaatacattgtcactcagggaccgcttcctggcaccaaggatgacttctggaaaatggtgtgggaacaaaacgttcacaacatcgtcatggtgacccagtgtgttgagaagggccgagtaaagtgtgatcattactggccagcggaccaggattccctctactatggggacctcatcctgcagatgctctcagagtccgtcctgcctgagtggaccatccgggagtttaagatatgcggtgaggaacagcttgatgcacacagactcatccgccactttcactatacggtgtggccagaccatggagtcccagaaaccacccagtctctgatccagtttgtgagaactgtcagggactacatcaacagaagcccgggtgctgggcccactgtggtgcactgcagtgctggtgtgggtaggactggaacctttattgcattggaccgaatcctccagcagttagactccaaagactctgtggacatttatggagcagtgcacgacctaagacttcacagggttcacatggtccagactgagtgtcagtatgtctacctacatcagtgtgtaagagatgtcctcagagcaagaaagctacggagtgaacaagaaaaccccttgtttccaatctatgaaaatgtgaatccagagtatcacagagatccagtctattcaaggcattgagaatgtacctgaagagctcctggataaaaattattcactgtgtgatttgtttttaaaaacttgcttcatgccctacagaggtgccagctatttctgttgatactatgtataatttattaatctggagaatgtttaaaattttatataatttaaaggtaacagatattattgtacatagttgtattttgtagtttcttctgtaaatatgtatttttcataatgtttaatattaagctttatataatactatttttccacactaaagtgttcatgacttgttctacataaaactaattcaacctgtatgacaggactactggtaaaatgcatatggaggtggtggcagagacaatccttcaggccatgttttctacctgttttgatattcactggacaggaaaaagggcagggctagagagagcaaatactatggctagatttgctgcattgctgtcccatgaatctcgagagccaacagacatgtcctaacttgctattaggacaaatgtgacagtcaaaaaaaggattagagggagggagaaaaaagaattaagcagtaccaaagctgaactagatgcttgtgtctgaactagttgctctctctctcctttctccttccagggattcaagccaaagtggtcagctcagggatcatgtaacttgcagtgcaagcccaggatggtaggatgcagggttgagggttctgatagagaatgattccaaacagaagtgatgaattccttttgttaataagatgccagctatacccagactggaaacataacatgcaaagcactatctacagtgattagagatcctttcattgcattcatggtgtggagtgtgaacatccacacccatactgtaatgtatttatacacactagtttctgtctcattttcagtggtctccattcctagaaaagtcacaattatccattcctacttgatttcccattaaaagaatattatggtagcagattgtgcccctcattaaaaggcttaatgccaacattttcatagaaatgactacaaacatcatatatagtaaatttaaaaacaatagcaaaaacaaaaacagtggtcttcagtaaaattttcaaaacttcttttagtaaatcaatgaagtcaaaatgtcaagtaatcacccaaagttgcatttaataacaaaaggcactacatactgtaccaagtttatcttcaatatttgtgccttacttactttgactataacaaattccaatgagtcagaaagtatttccttcatcaaggtccagttccgacagcattcctgggaaaaatttgaaaggagtttgtacggaatcttcatagatacctgagaagatgagctggagatgtttgcctttttcacactacaaatttttctgtaataaacttgggaattagaggtcaagtttgttgatggcatagcttcctttgcataaagagtatatttcttttcaaagtatatatttttgtaacctaccataaagtccgtaagtgaatacaacgaatgtaattgacataataattgaaaatcattgactatacctaaaatagttctttataattaaataactctacacccaatctggaaatttttccaaggttatttgaagtttacaaaaatgtgaagcataatcataagcttcaaagattcacagtttcattgtgctcaatgctcttgtgaaatgacagtcttaagctctgattctgtatcaaggaactaagtgaatcttctggaaatgaaaaggaacaacatatgtgtaagtgcagtagatgtaccaccagcgagaaaatagaggtcagagatctacaacgtgtggcatccattagaaatcacctttcctacattgaaaagaaaaaagagaaaaagcagaattttacactaatgttgcttgatgcaaagcacattaatgcttggaaggatacattcattttcgacttttcattcactcagaaaacttctagtaagtatctgcaacctgctaggcactgttccagaatctacacatttctactcacataaagagaatcctcataaagttaggattgttgttactaccttcaattgagcttaaaagacagcctcatcaagggaatgggataactgagccagtctaggacagtggtcaccttccacaggccacacactggaaagtgctaatgctactttaatagcaaacctctggatctaggagagagagcaattaattgcacaaaccaggagttaaaaccataaaaaaaacctatgcatctgtaatagtaaataacactcacgtactctggcaacatctagggtagtatcagaattatgtaaatggacatgacagggaaaaatcgtaggtttttttagtctaatccaacccaggaaatgtttattcctaccctacacctaattttaaaccttcttagcaacaaatatttcactattcgctcctactcctgggaagactaaatatataattgacttatttattaaatttaggagaaaaaaaaagttttccttgacattcagctctattggatttatttccatttaattgcatcatgtgttatgtcttggtaaacactccatttcctgtcttggtgggcatcctgtctgtgtacctgtgcagtacactttaatcatcaagacttcaaagtgcttttgagctatcaaatcttgggagagtcccatctagcatcttaataattatttttccaagttcgttataattaactcctttaacctcatctcattaaatcaattttgtattgtcattctgttgttctctggaaagcagccaattgttcagctcttgaatcagaattttcaaagactcacctctcttacctgggcttgcacatatttgtcctaagtaattctctatcccttaaacctctgagtccctctgttttattacttgccccactcctcctacttgaatatgtttgttttcccagttgaatgtgatttttatctactgttcatattatcttttatacccatgagtataatttcatagtcctttcaggttccacatcatcaaagagatgaccataatttcacttttttttgaaatgaagtcttgctctgttgcccaggctggagtgcagtggcacaatctcagctcactacaacctccgcctcccaggttcaagcgattctgccttagcctcccaagtagctggaattacaggtgcctgccaccatgtctggctaatttttgtgtttttagtagagatggggtttcaccatgttggccaggctggtcttgaactcgtgaccttaggtgatccacccacctcaacctcccaaagtgctaggattacaagagtgagccaccgcacctggccaattcacttttaaatactaaaaggcacacagcacacagacattttcggggcagttttctttgggagggtctttgataaattttgtaatcacctctcggaagaaagcccaaaatgacatgtgaaaataatattaaaccatttaccagatgtccagcaatataaaaatagacctcacatgctacccttcacatgctgattctcttgccttgctgtttaaggatccagtttcttatgttaaacattttccttaccttttgcaataatattattggccatatactaaattctcattcacttagctttctaagaattctttgaggttggaatcctgaaatcataaagctaccagatctgcacaacagcagtggtagtatctgagcccaaactctgagacgctctagagttttagtttacaaacatgagccagaccaaacctgacctggtgaaaatcaataggtaataaactgcttgtatatgatagcagttcaagggctttctgggttccatttcactgaggaaatgaaaatataactgattagccaagacagagtggcaataaggaataactgatcctcctccaagttgcagtgagcaagccctcaagcctacctcattcctgaagagttgaaggagaaaatgccgtgctaattttctgccctgctatttttaacctgaaatttagaattacatcaggtattcaaagaatgttccctatcaaaggaaaatctgtaaacgatgactgcaaaaagcaagtgaaatgatgcaaagagaaaatatttgcaaaacagaatctaaccagacatcatcatgaagataaaatggcatctcttctgtgtggcctgggtgtgcttggacaatcctgtcacacgtttctattaggacatgttgcccttttgaggattcactctatgttggccagatggtttaactgattaaacaattgaatcaatttattttgctttttgaattgaccagatatttaactaaatgtactgggtttggcattttagacacactgccttagattcttgtagtgcatgatgactttgaaaatgtttggccattttagttaaaatgcagggtaacatttgatgcagccatgataacaggaaaaatctgttctgttctaaaaatgtttctagcaatagaagtatttctggctaagagaatactcttgacttgtagggaggctccctcggaataaatgtatgcaacacaaataaggcattttattttttaaaagattgtctatataagatacacttattaaataaagaaattgttggtgaatgctctgaaaatagaggcttatgtaatggaaataagagattaacaggtttaccaaagattatttttataacctctatgccaattcacatgatcttatataagacaccaaaataagttattcaaaactgtgaataatgtcagacaaatgcaatgtgtcccttctagaacagtcacaaaaagaattggttatagctattttaataaataatatcctcaccccaagaacaaacgttcagttatgctgagatgttctaatagctgtgtgcgtagataagcacctccatcaagaaaggaacacatgaaattgtggctttaagagtttgtggcagagttggacagcattccatctgcaggttagtaggaaagcctgtaccagcctttgtggaatgtcctagtctgccacactgacaagagggtgcaccagtgctctactggaagagtatttctggttttctatgcaggactattgggcttataaattcctcaagaacaaggaccaagtctttaatctcgtctcgactcctaccttgtggaaattagtgcacagctcatagacattctacacacacttcttgaaattgctcctggcctgatattttggatgttaggtagtcagtgtccaataatactgttgtccgtgcaggttaatctagccattccttcatttgtgtgaagcataaataatgtaagtaaatacagcaactgaactttttatgttctataatagagcacttttatgtttttaatatcatttattatttctctgaaaatccagttaagatggcagatgattctattttttcatattatagcatctacccacaatatttctaactaactgtatttgaacaaagaacttccttagtctttcaatttaaattatgtatttgcttaatacatttttatatttgtaactgtggtaaaaaaaaaatctatatagcatcttgcatacattctcactagtacaggaataaaactgcagtttgttgaaggag

SEQ ID NO: 171729 - DNA, 6581 bp, Homo sapiens
  Payload ID: 13756
  Gene Symbol: PTPRB
  Gene Name: protein tyrosine phosphatase, receptor type, B
  ENST ID: ENST00000451516
  CDS Start-End: 27-2786
aagcatgaacagttgctaagtggaaaatggaggctgaattttacatggtgattcttacctgcttgatcttcaggaactcagaagggtttcagattgtccatgtccagaaacaacagtgtcttttcaaaaatgagaaagtggtcgtgggctcatgcaacaggaccatccagaaccagcagtggatgtggactgaggatgaaaagctccttcatgttaaatctgcactgtgcttggccatctccaactcttcccgcggcccctcccgctcagccatcttggaccgctgttcccaggcaccccgatggacctgctatgatcaggaaggcttccttgaggtggaaaatgcctctctctttctccagaaacaaggctccagagtagtggtcaagaaggccaggaaatacctccatagctggatgaaaatagatgtcaacaaggagggaaaactggtcaatgaaagcctctgtttacaaaaagctggcctgggagcagaagtttcggtgaggagcactagaaacacggctccaccccagattctcactacctttaatgcagttccagatggcctggtattccttattaggaataccacagaggccttcatcagaaatgctgcagaaaactacagccaaaacagcagcgagaggcagcatcccaatctgcacatgactggaattacagacacatcatgggttttgtcgactactcagcccttctccagcaccactgaagagactggactggcggagccagagagatgtaacttcaccctggcggagtccaaggcctccagccattctgtgtctatccagtggagaattttgggctcaccctgtaactttagcctcatctatagcagtgacaccctgggggccgcgttgtgccctacctttcggatagacaacaccacatacggatgtaaccttcaagatttacaagcaggaaccatctataacttcaggattatttctctggatgaagagagaacagtggtcttgcaaacagatcctttacctcctgctaggtttggagtcagtaaagagaagacgacttcaaccagcttgcatgtttggtggactccttcttccggaaaagtcacctcatatgaggtgcaattatttgatgaaaataaccaaaagatacagggggttcaaattcaagaaagtacttcatggaatgaatacacttttttcaatctcactgctggtagtaaatacaatattgccatcacagctgtttctggaggaaaacgttctttttcagtttataccaatggatcaacagtgccatctccagtgaaagatattggtatttccacaaaagccaattctctcctgatttcctggtcccatggttctgggaatgtggaacgataccggctgatgctaatggataaagggatcctagttcatggcggtgttgtggacaaacatgctacttcctatgcttttcacgggctgacccctggctacctctacaacctcactgttatgactgaggctgcagggctgcaaaactacaggtggaaactagtcaggacagcccccatggaagtctcaaatctgaaggtgacaaatgatggcagtttgacctctctaaaagtcaaatggcaaagacctcctggaaatgtggattcttacaatatcaccctgtctcacaaagggaccatcaaggaatccagagtattagcaccttggattactgaaactcactttaaagagttagtccccggtcgactttatcaagttactgtcagctgtgtctctggtgaactgtctgctcagaagatggcagtgggcagaacatttccagacaaagttgcaaacctggaggcaaacaataatggcaggatgaggtctcttgtagtgagctggtcgccccctgctggagactgggagcagtatcggatcctactcttcaatgattctgtggtgctgctcaacatcactgtgggaaaggaagaaacacagtatgtcatggatgacacggggctcgtaccgggaagacagtatgaggtggaagtcattgttgagagtggaaatttgaagaattctgagcgttgccaaggcaggacagtccccctggctgtcctccagcttcgtgtcaaacatgccaatgaaacctcactgagtatcatgtggcagacccctgtagcagaatgggagaaatacatcatttccctagctgacagagacctcttactgatccacaagtcactctccaaagatgccaaagaattcacttttactgacctggtgcctggacgaaaatacatggctacagtcaccagtattagtggagacttaaaaaattcctcttcagtaaaaggaagaacagtgcctgcccaagtgactgacttgcatgtggccaaccaaggaatgaccagtagtctgtttactaactggacccaggcacaaggagacgtagaattttaccaagtcttactgatccatgaaaatgtggtcattaaaaatgaaagcatctccagtgagaccagcagatacagcttccactctctcaagtccggcagcctgtactccgtggtggtaacaacagtgagtggagggatctcttcccgacaagtggttgtggagggaagaacagtgcctgacaaagtccagggagtcagtgttagcaactcagccaggagtgactatttaagggtatcctgggtgcatgccactggagactttgatcactatgaagtcaccattaaaaacaaaaacaacttcattcaaactaaagcattcccaagtcagaaaacgaatgtgtatttgttcagctagtccctggacggttgtacagtgtcactgttactacaaaaagtggacaatatgaagccaatgaacaagggaatgggagaacaattccagagcctgttaaggatctaacattgcgcaacaggagcactgaggacttgcatgtgacttggtcaggagctaatggggatgtcgaccaatatgagatccagctgctcttcaatgacatgaaagtatttcctccttttcaccttgtaaataccgcaaccgagtatcgatttacttccctaacaccaggccgccaatacaaaattcttgtcttgacgattagcggggatgtacagcagtcagccttcattgagggcttcacagttcctagtgctgtcaaaaatattcacatttctcccaatggagcaacagatagcctgacggtgaactggactcctggtgggggagacgttgattcctacacggtgtcggcattcaggcacagtcaaaaggttgactctcagactattcccaagcacgtctttgagcacacgttccacagactggaggccggggagcagtaccagatcatgattgcctcagtcagcgggtccctgaagaatcagataaatgtggttgggcggacagttccagcatctgtccaaggagtaattgcagacaatgcatacagcagttattccttaatagtaagttggcaaaaagctgctggtgtggcagaaagatatgatatcctgcttctaactgaaaatggaatccttctgcgcaacacatcagagccagccaccactaagcaacacaaatttgaagatctaacaccaggcaagaaatacaagatacagatcctaactgtcagtggaggcctctttagcaaggaagcccagactgaaggccgaacagtcccagcagctgtcaccgacctgaggatcacagagaactccaccaggcacctgtccttccgctggaccgcctcagagggggagctcagctggtacaacatctttttgtacaacccagatgggaatctccaggagagagctcaagttgacccactagtccagagcttctctttccagaacttgctacaaggcagaatgtacaagatggtgattgtaactcacagtggggagctgtctaatgagtctttcatatttggtagaacagtcccagcctctgtgagtcatctcagggggtccaatcggaacacgacagacagcctttggttcaactggagtccagcctctggggactttgacttttatgagctgattctctataatcccaatggcacaaagaaggaaaactggaaagacaaggacctgacggagtggcggtttcaaggccttgttcctggaaggaagtacgtgctgtgggtggtaactcacagtggagatctcagcaataaagtcacagcggagagcagaacagctccaagtcctcccagtcttatgtcatttgctgacattgcaaacacatccttggccatcacgtggaaagggcccccagactggacagactacaacgactttgagctgcagtggttgcccagagatgcacttactgtcttcaacccctacaacaacagaaaatcagaaggacgcattgtgtatggtcttcgtccagggagatcctatcaattcaacgtcaagactgtcagtggtgattcctggaaaacttacagcaaaccaatttttggatctgtgaggacaaagcctgacaagatacaaaacctgcattgccggcctcagaactccacggccattgcctgttcttggatccctcctgattctgactttgatggttatagtattgaatgccggaaaatggacacccaagaagttgagttttccagaaagctggagaaagaaaaatctctgctcaacatcatgatgctagtgccccataagaggtacctggtgtccatcaaagtgcagtcggccggcatgaccagcgaggtggttgaagacagcactatcacaatgatagaccgcccccctcctccacccccacacattcgtgtgaatgaaaaggatgtgctaattagcaagtcttccatcaactttactgtcaactgcagctggttcagcgacaccaatggagctgtgaaatacttcacagtggtggtgagagaggctgatggcagtgatgagctgaagccagaacagcagcaccctctcccttcctacctggagtacaggcacaatgcctccattcgggtgtatcagactaattattttgccagcaaatgtgccgaaaatcctaacagcaactccaagagttttaacattaagcttggagcagagatggagagcctaggtggaaaatgcgatcccactcagcaaaaattctgtgatggaccactgaagccacacactgcctacagaatcagcattcgagcttttacacagctctttgatgaggacctgaaggaattcacaaagccactctattcagacacatttttttctttacccatcactactgaatcagagcccttgtttggagctattgaaggtgtgagtgctggtctgtttttaattggcatgctagtggctgttgttgccttattgatctgcagacagaaagtgagccatggtcgagaaagaccctctgcccgtctgagcattcgtagggatcgaccattatctgtccacttaaacctgggccagaaaggtaaccggaaaacttcttgtccaataaaaataaatcagtttgaagggcatttcatgaagctacaggctgactccaactaccttctatccaaggaatacgaggagttaaaagacgtgggccgaaaccagtcatgtgacattgcactcttgccggagaatagagggaaaaatcgatacaacaatatattgccctatgatgccacgcgagtgaagctctccaatgtagatgatgatccttgctctgactacatcaatgccagctacatccctggcaacaacttcagaagagaatacattgtcactcagggaccgcttcctggcaccaaggatgacttctggaaaatggtgtgggaacaaaacgttcacaacatcgtcatggtgacccagtgtgttgagaagggccgagtaaagtgtgatcattactggccagcggaccaggattccctctactatggggacctcatcctgcagatgctctcagagtccgtcctgcctgagtggaccatccgggagtttaagatatgcggtgaggaacagcttgatgcacacagactcatccgccactttcactatacggtgtggccagaccatggagtcccagaaaccacccagtctctgatccagtttgtgagaactgtcagggactacatcaacagaagcccgggtgctgggcccactgtggtgcactgcagtgctggtgtgggtaggactggaacctttattgcattggaccgaatcctccagcagttagactccaaagactctgtggacatttatggagcagtgcacgacctaagacttcacagggttcacatggtccagactgagtgtcagtatgtctacctacatcagtgtgtaagagatgtcctcagagcaagaaagctacggagtgaacaagaaaaccccttgtttccaatctatgaaaatgtgaatccagagtatcacagagatccagtctattcaaggcattgagaatgtacctgaagagctcctggataaaaattattcactgtgtgatttgtttttaaaaacttgcttcatgccctacagaggtgccagctatttctgttgatactatgtataatttattaatctggagaatgtttaaaattttatataatttaaaggtaacagatattattgt

SEQ ID NO: 171730 - DNA, 5839 bp, Homo sapiens
  Payload ID: 13756
  Gene Symbol: PTPRB
  Gene Name: protein tyrosine phosphatase, receptor type, B
  Uniprot ID: P23467
  ENST ID: ENST00000538708
  CDS Start-End: 30-5753
tctcctctggatcttaactactgagcgcaatgctgagccatggagccgggttggccttgtggatcacactgagcctgctgcagactggactggcggagccagagagatgtaacttcaccctggcggagtccaaggcctccagccattctgtgtctatccagtggagaattttgggctcaccctgtaactttagcctcatctatagcagtgacaccctgggggccgcgttgtgccctacctttcggatagacaacaccacatacggatgtaaccttcaagatttacaagcaggaaccatctataacttcaggattatttctctggatgaagagagaacagtggtcttgcaaacagatcctttacctcctgctaggtttggagtcagtaaagagaagacgacttcaaccagcttgcatgtttggtggactccttcttccggaaaagtcacctcatatgaggtgcaattatttgatgaaaataaccaaaagatacagggggttcaaattcaagaaagtacttcatggaatgaatacacttttttcaatctcactgctggtagtaaatacaatattgccatcacagctgtttctggaggaaaacgttctttttcagtttataccaatggatcaacagtgccatctccagtgaaagatattggtatttccacaaaagccaattctctcctgatttcctggtcccatggttctgggaatgtggaacgataccggctgatgctaatggataaagggatcctagttcatggcggtgttgtggacaaacatgctacttcctatgcttttcacgggctgacccctggctacctctacaacctcactgttatgactgaggctgcagggctgcaaaactacaggtggaaactagtcaggacagcccccatggaagtctcaaatctgaaggtgacaaatgatggcagtttgacctctctaaaagtcaaatggcaaagacctcctggaaatgtggattcttacaatatcaccctgtctcacaaagggaccatcaaggaatccagagtattagcaccttggattactgaaactcactttaaagagttagtccccggtcgactttatcaagttactgtcagctgtgtctctggtgaactgtctgctcagaagatggcagtgggcagaacatttccagacaaagttgcaaacctggaggcaaacaataatggcaggatgaggtctcttgtagtgagctggtcgccccctgctggagactgggagcagtatcggatcctactcttcaatgattctgtggtgctgctcaacatcactgtgggaaaggaagaaacacagtatgtcatggatgacacggggctcgtaccgggaagacagtatgaggtggaagtcattgttgagagtggaaatttgaagaattctgagcgttgccaaggcaggacagtccccctggctgtcctccagcttcgtgtcaaacatgccaatgaaacctcactgagtatcatgtggcagacccctgtagcagaatgggagaaatacatcatttccctagctgacagagacctcttactgatccacaagtcactctccaaagatgccaaagaattcacttttactgacctggtgcctggacgaaaatacatggctacagtcaccagtattagtggagacttaaaaaattcctcttcagtaaaaggaagaacagtgcctgcccaagtgactgacttgcatgtggccaaccaaggaatgaccagtagtctgtttactaactggacccaggcacaaggagacgtagaattttaccaagtcttactgatccatgaaaatgtggtcattaaaaatgaaagcatctccagtgagaccagcagatacagcttccactctctcaagtccggcagcctgtactccgtggtggtaacaacagtgagtggagggatctcttcccgacaagtggttgtggagggaagaacagtcccttccagtgtgagtggagtaacggtgaacaattccggtcgtaatgactacctcagcgtttcctggctgctggcgcccggagatgtggataactatgaggtaacattgtctcatgacggcaaggtggttcagtcccttgtcattgccaagtctgtcagagaatgttccttcagctccctcaccccaggccgcctctacaccgtgaccataactacaaggagtggcaagtatgaaaatcactccttcagccaagagcggacagtgcctgacaaagtccagggagtcagtgttagcaactcagccaggagtgactatttaagggtatcctgggtgcatgccactggagactttgatcactatgaagtcaccattaaaaacaaaaacaacttcattcaaactaaaagcattcccaagtcagaaaacgaatgtgtatttgttcagctagtccctggacggttgtacagtgtcactgttactacaaaaagtggacaatatgaagccaatgaacaagggaatgggagaacaattccagagcctgttaaggatctaacattgcgcaacaggagcactgaggacttgcatgtgacttggtcaggagctaatggggatgtcgaccaatatgagatccagctgctcttcaatgacatgaaagtatttcctccttttcaccttgtaaataccgcaaccgagtatcgatttacttccctaacaccaggccgccaatacaaaattcttgtcttgacgattagcggggatgtacagcagtcagccttcattgagggcttcacagttcctagtgctgtcaaaaatattcacatttctcccaatggagcaacagatagcctgacggtgaactggactcctggtgggggagacgttgattcctacacggtgtcggcattcaggcacagtcaaaaggttgactctcagactattcccaagcacgtctttgagcacacgttccacagactggaggccggggagcagtaccagatcatgattgcctcagtcagcgggtccctgaagaatcagataaatgtggttgggcggacagtcccagcagctgtcaccgacctgaggatcacagagaactccaccaggcacctgtccttccgctggaccgcctcagagggggagctcagctggtacaacatctttttgtacaacccagatgggaatctccaggagagagctcaagttgacccactagtccagagcttctctttccagaacttgctacaaggcagaatgtacaagatggtgattgtaactcacagtggggagctgtctaatgagtctttcatatttggtagaacagtcccagcctctgtgagtcatctcagggggtccaatcggaacacgacagacagcctttggttcaactggagtccagcctctggggactttgacttttatgagctgattctctataatcccaatggcacaaagaaggaaaactggaaagacaaggacctgacggagtggcggtttcaaggccttgttcctggaaggaagtacgtgctgtgggtggtaactcacagtggagatctcagcaataaagtcacagcggagagcagaacagctccaagtcctcccagtcttatgtcatttgctgacattgcaaacacatccttggccatcacgtggaaagggcccccagactggacagactacaacgactttgagctgcagtggttgcccagagatgcacttactgtcttcaacccctacaacaacagaaaatcagaaggacgcattgtgtatggtcttcgtccagggagatcctatcaattcaacgtcaagactgtcagtggtgattcctggaaaacttacagcaaaccaatttttggatctgtgaggacaaagcctgacaagatacaaaacctgcattgccggcctcagaactccacggccattgcctgttcttggatccctcctgattctgactttgatggttatagtattgaatgccggaaaatggacacccaagaagttgagttttccagaaagctggagaaagaaaaatctctgctcaacatcatgatgctagtgccccataagaggtacctggtgtccatcaaagtgcagtcggccggcatgaccagcgaggtggttgaagacagcactatcacaatgatagaccgcccccctcctccacccccacacattcgtgtgaatgaaaaggatgtgctaattagcaagtcttccatcaactttactgtcaactgcagctggttcagcgacaccaatggagctgtgaaatacttcacagtggtggtgagagaggctgatggcagtgatgagctgaagccagaacagcagcaccctctcccttcctacctggagtacaggcacaatgcctccattcgggtgtatcagactaattattttgccagcaaatgtgccgaaaatcctaacagcaactccaagagttttaacattaagcttggagcagagatggagagcctaggtggaaaatgcgatcccactcagcaaaaattctgtgatggaccactgaagccacacactgcctacagaatcagcattcgagcttttacacagctctttgatgaggacctgaaggaattcacaaagccactctattcagacacatttttttctttacccatcactactgaatcagagcccttgtttggagctattgaaggtgtgagtgctggtctgtttttaattggcatgctagtggctgttgttgccttattgatctgcagacagaaagtgagccatggtcgagaaagaccctctgcccgtctgagcattcgtagggatcgaccattatctgtccacttaaacctgggccagaaaggtaaccggaaaacttcttgtccaataaaaataaatcagtttgaagggcatttcatgaagctacaggctgactccaactaccttctatccaaggaatacgaggagttaaaagacgtgggccgaaaccagtcatgtgacattgcactcttgccggagaatagagggaaaaatcgatacaacaatatattgccctatgatgccacgcgagtgaagctctccaatgtagatgatgatccttgctctgactacatcaatgccagctacatccctggcaacaacttcagaagagaatacattgtcactcagggaccgcttcctggcaccaaggatgacttctggaaaatggtgtgggaacaaaacgttcacaacatcgtcatggtgacccagtgtgttgagaagggccgagtaaagtgtgatcattactggccagcggaccaggattccctctactatggggacctcatcctgcagatgctctcagagtccgtcctgcctgagtggaccatccgggagtttaagatatgcggtgaggaacagcttgatgcacacagactcatccgccactttcactatacggtgtggccagaccatggagtcccagaaaccacccagtctctgatccagtttgtgagaactgtcagggactacatcaacagaagcccgggtgctgggcccactgtggtgcactgcagtgctggtgtgggtaggactggaacctttattgcattggaccgaatcctccagcagttagactccaaagactctgtggacatttatggagcagtgcacgacctaagacttcacagggttcacatggtccagactgagtgtcagtatgtctacctacatcagtgtgtaagagatgtcctcagagcaagaaagctacggagtgaacaagaaaaccccttgtttccaatctatgaaaatgtgaatccagagtatcacagagatccagtctattcaaggcattgagaatgtacctgaagagctcctggataaaaattattcactgtgtgatttgtttttaaaaacttgcttcatgccctacagaggtgcca

SEQ ID NO: 171731 - DNA, 639 bp, Homo sapiens
  Payload ID: 13756
  Gene Symbol: PTPRB
  Gene Name: protein tyrosine phosphatase, receptor type, B
  ENST ID: ENST00000547715
  CDS Start-End: 1-310
cttgtggatcacactgagcctgctgcagactggactggcggagccagagagatgtaacttcaccctggcggagtccaaggcctccagccattctgtgtctatccagtggagaattttgggctcaccctgtaactttagcctcatctatagcagtgacaccctgggggccgcgttgtgccctacctttcggatagacaacaccacatacggatgtaaccttcaagatttacaagcaggaaccatctataacttcaggattatttctctggatgaagagagaacagtggtcttgcaaacaggtaaaggatgacaggtgcaattggatggccaagccacacggggttgggccctgccttttcaagctggtgtttcatttgagttccagggatacaaaaaatgaaggtaaaaatacctgtgaagataaatattgacagaaatgtctggtttcctcggatctagccagaagcagcttggtggactttcagagactcccttagtgctgaaaacagccaactagctactgaaagggtcggggtggggtgcagggcggtcagcaaagagaaactttgggctgcggtgggaattttttaaagtgatgtggtttacgcttccattgcattaaattgtcaaaccctggaa

SEQ ID NO: 171732 - DNA, 4237 bp, Homo sapiens
  Payload ID: 13756
  Gene Symbol: PTPRB
  Gene Name: protein tyrosine phosphatase, receptor type, B
  ENST ID: ENST00000548122
  CDS Start-End: 17-4237
agttgctaagtggaaaatggaggctgaattttacatggtgattcttacctgcttgatcttcaggaactcagaagggtttcagattgtccatgtccagaaacaacagtgtcttttcaaaaatgagaaagtggtcgtgggctcatgcaacaggaccatccagaaccagcagtggatgtggactgaggatgaaaagctccttcatgttaaatctgcactgtgcttggccttcatcagaaatgctgcagaaaactacagccaaaacagcagcgagaggcagcatcccaatctgcacatgactggaattacagacacatcatgggttttgtcgactactcagcccttctccagcaccactgaagagactggactggcggagccagagagatgtaacttcaccctggcggagtccaaggcctccagccattctgtgtctatccagtggagaattttgggctcaccctgtaactttagcctcatctatagcagtgacaccctgggggccgcgttgtgccctacctttcggatagacaacaccacatacggatgtaaccttcaagatttacaagcaggaaccatctataacttcaggattatttctctggatgaagagagaacagtggtcttgcaaacagatcctttacctcctgctaggtttggagtcagtaaagagaagacgacttcaaccagcttgcatgtttggtggactccttcttccggaaaagtcacctcatatgaggtgcaattatttgatgaaaataaccaaaagatacagggggttcaaattcaagaaagtacttcatggaatgaatacacttttttcaatctcactgctggtagtaaatacaatattgccatcacagctgtttctggaggaaaacgttctttttcagtttataccaatggatcaacagtgccatctccagtgaaagatattggtatttccacaaaagccaattctctcctgatttcctggtcccatggttctgggaatgtggaacgataccggctgatgctaatggataaagggatcctagttcatggcggtgttgtggacaaacatgctacttcctatgcttttcacgggctgacccctggctacctctacaacctcactgttatgactgaggctgcagggctgcaaaactacaggtggaaactagtcaggacagcccccatggaagtctcaaatctgaaggtgacaaatgatggcagtttgacctctctaaaagtcaaatggcaaagacctcctggaaatgtggattcttacaatatcaccctgtctcacaaagggaccatcaaggaatccagagtattagcaccttggattactgaaactcactttaaagagttagtccccggtcgactttatcaagttactgtcagctgtgtctctggtgaactgtctgctcagaagatggcagtgggcagaacatttccagacaaagttgcaaacctggaggcaaacaataatggcaggatgaggtctcttgtagtgagctggtcgccccctgctggagactgggagcagtatcggatcctactcttcaatgattctgtggtgctgctcaacatcactgtgggaaaggaagaaacacagtatgtcatggatgacacggggctcgtaccgggaagacagtatgaggtggaagtcattgttgagagtggaaatttgaagaattctgagcgttgccaaggcaggacagtccccctggctgtcctccagcttcgtgtcaaacatgccaatgaaacctcactgagtatcatgtggcagacccctgtagcagaatgggagaaatacatcatttccctagctgacagagacctcttactgatccacaagtcactctccaaagatgccaaagaattcacttttactgacctggtgcctggacgaaaatacatggctacagtcaccagtattagtggagacttaaaaaattcctcttcagtaaaaggaagaacagtgcctgcccaagtgactgacttgcatgtggccaaccaaggaatgaccagtagtctgtttactaactggacccaggcacaaggagacgtagaattttaccaagtcttactgatccatgaaaatgtggtcattaaaaatgaaagcatctccagtgagaccagcagatacagcttccactctctcaagtccggcagcctgtactccgtggtggtaacaacagtgagtggagggatctcttcccgacaagtggttgtggagggaagaacagtcccttccagtgtgagtggagtaacggtgaacaattccggtcgtaatgactacctcagcgtttcctggctgctggcgcccggagatgtggataactatgaggtaacattgtctcatgacggcaaggtggttcagtcccttgtcattgccaagtctgtcagagaatgttccttcagctccctcaccccaggccgcctctacaccgtgaccataactacaaggagtggcaagtatgaaaatcactccttcagccaagagcggacagtgcctgacaaagtccagggagtcagtgttagcaactcagccaggagtgactatttaagggtatcctgggtgcatgccactggagactttgatcactatgaagtcaccattaaaaacaaaaacaacttcattcaaactaaaagcattcccaagtcagaaaacgaatgtgtatttgttcagctagtccctggacggttgtacagtgtcactgttactacaaaaagtggacaatatgaagccaatgaacaagggaatgggagaacaattccagagcctgttaaggatctaacattgcgcaacaggagcactgaggacttgcatgtgacttggtcaggagctaatggggatgtcgaccaatatgagatccagctgctcttcaatgacatgaaagtatttcctccttttcaccttgtaaataccgcaaccgagtatcgatttacttccctaacaccaggccgccaatacaaaattcttgtcttgacgattagcggggatgtacagcagtcagccttcattgagggcttcacagttcctagtgctgtcaaaaatattcacatttctcccaatggagcaacagatagcctgacggtgaactggactcctggtgggggagacgttgattcctacacggtgtcggcattcaggcacagtcaaaaggttgactctcagactattcccaagcacgtctttgagcacacgttccacagactggaggccggggagcagtaccagatcatgattgcctcagtcagcgggtccctgaagaatcagataaatgtggttgggcggacagttccagcatctgtccaaggagtaattgcagacaatgcatacagcagttattccttaatagtaagttggcaaaaagctgctggtgtggcagaaagatatgatatcctgcttctaactgaaaatggaatccttctgcgcaacacatcagagccagccaccactaagcaacacaaatttgaagatctaacaccaggcaagaaatacaagatacagatcctaactgtcagtggaggcctctttagcaaggaagcccagactgaaggccgaacagtcccagcagctgtcaccgacctgaggatcacagagaactccaccaggcacctgtccttccgctggaccgcctcagagggggagctcagctggtacaacatctttttgtacaacccagatgggaatctccaggagagagctcaagttgacccactagtccagagcttctctttccagaacttgctacaaggcagaatgtacaagatggtgattgtaactcacagtggggagctgtctaatgagtctttcatatttggtagaacagtcccagcctctgtgagtcatctcagggggtccaatcggaacacgacagacagcctttggttcaactggagtccagcctctggggactttgacttttatgagctgattctctataatcccaatggcacaaagaaggaaaactggaaagacaaggacctgacggagtggcggtttcaaggccttgttcctggaaggaagtacgtgctgtgggtggtaactcacagtggagatctcagcaataaagtcacagcggagagcagaacagctccaagtcctcccagtcttatgtcatttgctgacattgcaaacacatccttggccatcacgtggaaagggcccccagactggacagactacaacgactttgagctgcagtggttgcccagagatgcacttactgtcttcaacccctacaac

SEQ ID NO: 171733 - DNA, 5839 bp, Homo sapiens
  Payload ID: 13756
  Gene Symbol: PTPRB
  Gene Name: protein tyrosine phosphatase, receptor type, B
  Uniprot ID: P23467
  ENST ID: ENST00000550857
  CDS Start-End: 30-5753
tctcctctggatcttaactactgagcgcaatgctgagccatggagccgggttggccttgtggatcacactgagcctgctgcagactggactggcggagccagagagatgtaacttcaccctggcggagtccaaggcctccagccattctgtgtctatccagtggagaattttgggctcaccctgtaactttagcctcatctatagcagtgacaccctgggggccgcgttgtgccctacctttcggatagacaacaccacatacggatgtaaccttcaagatttacaagcaggaaccatctataacttcaggattatttctctggatgaagagagaacagtggtcttgcaaacagatcctttacctcctgctaggtttggagtcagtaaagagaagacgacttcaaccagcttgcatgtttggtggactccttcttccggaaaagtcacctcatatgaggtgcaattatttgatgaaaataaccaaaagatacagggggttcaaattcaagaaagtacttcatggaatgaatacacttttttcaatctcactgctggtagtaaatacaatattgccatcacagctgtttctggaggaaaacgttctttttcagtttataccaatggatcaacagtgccatctccagtgaaagatattggtatttccacaaaagccaattctctcctgatttcctggtcccatggttctgggaatgtggaacgataccggctgatgctaatggataaagggatcctagttcatggcggtgttgtggacaaacatgctacttcctatgcttttcacgggctgacccctggctacctctacaacctcactgttatgactgaggctgcagggctgcaaaactacaggtggaaactagtcaggacagcccccatggaagtctcaaatctgaaggtgacaaatgatggcagtttgacctctctaaaagtcaaatggcaaagacctcctggaaatgtggattcttacaatatcaccctgtctcacaaagggaccatcaaggaatccagagtattagcaccttggattactgaaactcactttaaagagttagtccccggtcgactttatcaagttactgtcagctgtgtctctggtgaactgtctgctcagaagatggcagtgggcagaacattccccctggctgtcctccagcttcgtgtcaaacatgccaatgaaacctcactgagtatcatgtggcagacccctgtagcagaatgggagaaatacatcatttccctagctgacagagacctcttactgatccacaagtcactctccaaagatgccaaagaattcacttttactgacctggtgcctggacgaaaatacatggctacagtcaccagtattagtggagacttaaaaaattcctcttcagtaaaaggaagaacagtgcctgcccaagtgactgacttgcatgtggccaaccaaggaatgaccagtagtctgtttactaactggacccaggcacaaggagacgtagaattttaccaagtcttactgatccatgaaaatgtggtcattaaaaatgaaagcatctccagtgagaccagcagatacagcttccactctctcaagtccggcagcctgtactccgtggtggtaacaacagtgagtggagggatctcttcccgacaagtggttgtggagggaagaacagtcccttccagtgtgagtggagtaacggtgaacaattccggtcgtaatgactacctcagcgtttcctggctgctggcgcccggagatgtggataactatgaggtaacattgtctcatgacggcaaggtggttcagtcccttgtcattgccaagtctgtcagagaatgttccttcagctccctcaccccaggccgcctctacaccgtgaccataactacaaggagtggcaagtatgaaaatcactccttcagccaagagcggacagtgcctgacaaagtccagggagtcagtgttagcaactcagccaggagtgactatttaagggtatcctgggtgcatgccactggagactttgatcactatgaagtcaccattaaaaacaaaaacaacttcattcaaactaaaagcattcccaagtcagaaaacgaatgtgtatttgttcagctagtccctggacggttgtacagtgtcactgttactacaaaaagtggacaatatgaagccaatgaacaagggaatgggagaacaattccagagcctgttaaggatctaacattgcgcaacaggagcactgaggacttgcatgtgacttggtcaggagctaatggggatgtcgaccaatatgagatccagctgctcttcaatgacatgaaagtatttcctccttttcaccttgtaaataccgcaaccgagtatcgatttacttccctaacaccaggccgccaatacaaaattcttgtcttgacgattagcggggatgtacagcagtcagccttcattgagggcttcacagttcctagtgctgtcaaaaatattcacatttctcccaatggagcaacagatagcctgacggtgaactggactcctggtgggggagacgttgattcctacacggtgtcggcattcaggcacagtcaaaaggttgactctcagactattcccaagcacgtctttgagcacacgttccacagactggaggccggggagcagtaccagatcatgattgcctcagtcagcgggtccctgaagaatcagataaatgtggttgggcggacagttccagcatctgtccaaggagtaattgcagacaatgcatacagcagttattccttaatagtaagttggcaaaaagctgctggtgtggcagaaagatatgatatcctgcttctaactgaaaatggaatccttctgcgcaacacatcagagccagccaccactaagcaacacaaatttgaagatctaacaccaggcaagaaatacaagatacagatcctaactgtcagtggaggcctctttagcaaggaagcccagactgaaggccgaacagtcccagcagctgtcaccgacctgaggatcacagagaactccaccaggcacctgtccttccgctggaccgcctcagagggggagctcagctggtacaacatctttttgtacaacccagatgggaatctccaggagagagctcaagttgacccactagtccagagcttctctttccagaacttgctacaaggcagaatgtacaagatggtgattgtaactcacagtggggagctgtctaatgagtctttcatatttggtagaacagtcccagcctctgtgagtcatctcagggggtccaatcggaacacgacagacagcctttggttcaactggagtccagcctctggggactttgacttttatgagctgattctctataatcccaatggcacaaagaaggaaaactggaaagacaaggacctgacggagtggcggtttcaaggccttgttcctggaaggaagtacgtgctgtgggtggtaactcacagtggagatctcagcaataaagtcacagcggagagcagaacagctccaagtcctcccagtcttatgtcatttgctgacattgcaaacacatccttggccatcacgtggaaagggcccccagactggacagactacaacgactttgagctgcagtggttgcccagagatgcacttactgtcttcaacccctacaacaacagaaaatcagaaggacgcattgtgtatggtcttcgtccagggagatcctatcaattcaacgtcaagactgtcagtggtgattcctggaaaacttacagcaaaccaatttttggatctgtgaggacaaagcctgacaagatacaaaacctgcattgccggcctcagaactccacggccattgcctgttcttggatccctcctgattctgactttgatggttatagtattgaatgccggaaaatggacacccaagaagttgagttttccagaaagctggagaaagaaaaatctctgctcaacatcatgatgctagtgccccataagaggtacctggtgtccatcaaagtgcagtcggccggcatgaccagcgaggtggttgaagacagcactatcacaatgatagaccgcccccctcctccacccccacacattcgtgtgaatgaaaaggatgtgctaattagcaagtcttccatcaactttactgtcaactgcagctggttcagcgacaccaatggagctgtgaaatacttcacagtggtggtgagagaggctgatggcagtgatgagctgaagccagaacagcagcaccctctcccttcctacctggagtacaggcacaatgcctccattcgggtgtatcagactaattattttgccagcaaatgtgccgaaaatcctaacagcaactccaagagttttaacattaagcttggagcagagatggagagcctaggtggaaaatgcgatcccactcagcaaaaattctgtgatggaccactgaagccacacactgcctacagaatcagcattcgagcttttacacagctctttgatgaggacctgaaggaattcacaaagccactctattcagacacatttttttctttacccatcactactgaatcagagcccttgtttggagctattgaaggtgtgagtgctggtctgtttttaattggcatgctagtggctgttgttgccttattgatctgcagacagaaagtgagccatggtcgagaaagaccctctgcccgtctgagcattcgtagggatcgaccattatctgtccacttaaacctgggccagaaaggtaaccggaaaacttcttgtccaataaaaataaatcagtttgaagggcatttcatgaagctacaggctgactccaactaccttctatccaaggaatacgaggagttaaaagacgtgggccgaaaccagtcatgtgacattgcactcttgccggagaatagagggaaaaatcgatacaacaatatattgccctatgatgccacgcgagtgaagctctccaatgtagatgatgatccttgctctgactacatcaatgccagctacatccctggcaacaacttcagaagagaatacattgtcactcagggaccgcttcctggcaccaaggatgacttctggaaaatggtgtgggaacaaaacgttcacaacatcgtcatggtgacccagtgtgttgagaagggccgagtaaagtgtgatcattactggccagcggaccaggattccctctactatggggacctcatcctgcagatgctctcagagtccgtcctgcctgagtggaccatccgggagtttaagatatgcggtgaggaacagcttgatgcacacagactcatccgccactttcactatacggtgtggccagaccatggagtcccagaaaccacccagtctctgatccagtttgtgagaactgtcagggactacatcaacagaagcccgggtgctgggcccactgtggtgcactgcagtgctggtgtgggtaggactggaacctttattgcattggaccgaatcctccagcagttagactccaaagactctgtggacatttatggagcagtgcacgacctaagacttcacagggttcacatggtccagactgagtgtcagtatgtctacctacatcagtgtgtaagagatgtcctcagagcaagaaagctacggagtgaacaagaaaaccccttgtttccaatctatgaaaatgtgaatccagagtatcacagagatccagtctattcaaggcattgagaatgtacctgaagagctcctggataaaaattattcactgtgtgatttgtttttaaaaacttgcttcatgccctacagaggtgcca

SEQ ID NO: 171734 - DNA, 6583 bp, Homo sapiens
  Payload ID: 13756
  Gene Symbol: PTPRB
  Gene Name: protein tyrosine phosphatase, receptor type, B
  ENST ID: ENST00000550358
  CDS Start-End: 27-6410
aagcatgaacagttgctaagtggaaaatggaggctgaattttacatggtgattcttacctgcttgatcttcaggaactcagaagggtttcagattgtccatgtccagaaacaacagtgtcttttcaaaaatgagaaagtggtcgtgggctcatgcaacaggaccatccagaaccagcagtggatgtggactgaggatgaaaagctccttcatgttaaatctgcactgtgcttggccatctccaactcttcccgcggcccctcccgctcagccatcttggaccgctgttcccaggcaccccgatggacctgctatgatcaggaaggcttccttgaggtggaaaatgcctctctctttctccagaaacaaggctccagagtagtggtcaagaaggccaggaaatacctccatagctggatgaaaatagatgtcaacaaggagggaaaactggtcaatgaaagcctctgtttacaaaaagctggcctgggagcagaagtttcggtgaggagcactagaaacacggctccaccccagattctcactacctttaatgcagttccagatggcctggtattccttattaggaataccacagaggccttcatcagaaatgctgcagaaaactacagccaaaacagcagcgagaggcagcatcccaatctgcacatgactggaattacagacacatcatgggttttgtcgactactcagcccttctccagcaccactgaagagactggactggcggagccagagagatgtaacttcaccctggcggagtccaaggcctccagccattctgtgtctatccagtggagaattttgggctcaccctgtaactttagcctcatctatagcagtgacaccctgggggccgcgttgtgccctacctttcggatagacaacaccacatacggatgtaaccttcaagatttacaagcaggaaccatctataacttcaggattatttctctggatgaagagagaacagtggtcttgcaaacagatcctttacctcctgctaggtttggagtcagtaaagagaagacgacttcaaccagcttgcatgtttggtggactccttcttccggaaaagtcacctcatatgaggtgcaattatttgatgaaaataaccaaaagatacagggggttcaaattcaagaaagtacttcatggaatgaatacacttttttcaatctcactgctggtagtaaatacaatattgccatcacagctgtttctggaggaaaacgttctttttcagtttataccaatggatcaacagtgccatctccagtgaaagatattggtatttccacaaaagccaattctctcctgatttcctggtcccatggttctgggaatgtggaacgataccggctgatgctaatggataaagggatcctagttcatggcggtgttgtggacaaacatgctacttcctatgcttttcacgggctgacccctggctacctctacaacctcactgttatgactgaggctgcagggctgcaaaactacaggtggaaactagtcaggacagcccccatggaagtctcaaatctgaaggtgacaaatgatggcagtttgacctctctaaaagtcaaatggcaaagacctcctggaaatgtggattcttacaatatcaccctgtctcacaaagggaccatcaaggaatccagagtattagcaccttggattactgaaactcactttaaagagttagtccccggtcgactttatcaagttactgtcagctgtgtctctggtgaactgtctgctcagaagatggcagtgggcagaacatttccagacaaagttgcaaacctggaggcaaacaataatggcaggatgaggtctcttgtagtgagctggtcgccccctgctggagactgggagcagtatcggatcctactcttcaatgattctgtggtgctgctcaacatcactgtgggaaaggaagaaacacagtatgtcatggatgacacggggctcgtaccgggaagacagtatgaggtggaagtcattgttgagagtggaaatttgaagaattctgagcgttgccaaggcaggacagtccccctggctgtcctccagcttcgtgtcaaacatgccaatgaaacctcactgagtatcatgtggcagacccctgtagcagaatgggagaaatacatcatttccctagctgacagagacctcttactgatccacaagtcactctccaaagatgccaaagaattcacttttactgacctggtgcctggacgaaaatacatggctacagtcaccagtattagtggagacttaaaaaattcctcttcagtaaaaggaagaacagtgcctgcccaagtgactgacttgcatgtggccaaccaaggaatgaccagtagtctgtttactaactggacccaggcacaaggagacgtagaattttaccaagtcttactgatccatgaaaatgtggtcattaaaaatgaaagcatctccagtgagaccagcagatacagcttccactctctcaagtccggcagcctgtactccgtggtggtaacaacagtgagtggagggatctcttcccgacaagtggttgtggagggaagaacagtgcctgacaaagtccagggagtcagtgttagcaactcagccaggagtgactatttaagggtatcctgggtgcatgccactggagactttgatcactatgaagtcaccattaaaaacaaaaacaacttcattcaaactaaaagcattcccaagtcagaaaacgaatgtgtatttgttcagctagtccctggacggttgtacagtgtcactgttactacaaaaagtggacaatatgaagccaatgaacaagggaatgggagaacaattccagagcctgttaaggatctaacattgcgcaacaggagcactgaggacttgcatgtgacttggtcaggagctaatggggatgtcgaccaatatgagatccagctgctcttcaatgacatgaaagtatttcctccttttcaccttgtaaataccgcaaccgagtatcgatttacttccctaacaccaggccgccaatacaaaattcttgtcttgacgattagcggggatgtacagcagtcagccttcattgagggcttcacagttcctagtgctgtcaaaaatattcacatttctcccaatggagcaacagatagcctgacggtgaactggactcctggtgggggagacgttgattcctacacggtgtcggcattcaggcacagtcaaaaggttgactctcagactattcccaagcacgtctttgagcacacgttccacagactggaggccggggagcagtaccagatcatgattgcctcagtcagcgggtccctgaagaatcagataaatgtggttgggcggacagttccagcatctgtccaaggagtaattgcagacaatgcatacagcagttattccttaatagtaagttggcaaaaagctgctggtgtggcagaaagatatgatatcctgcttctaactgaaaatggaatccttctgcgcaacacatcagagccagccaccactaagcaacacaaatttgaagatctaacaccaggcaagaaatacaagatacagatcctaactgtcagtggaggcctctttagcaaggaagcccagactgaaggccgaacagtcccagcagctgtcaccgacctgaggatcacagagaactccaccaggcacctgtccttccgctggaccgcctcagagggggagctcagctggtacaacatctttttgtacaacccagatgggaatctccaggagagagctcaagttgacccactagtccagagcttctctttccagaacttgctacaaggcagaatgtacaagatggtgattgtaactcacagtggggagctgtctaatgagtctttcatatttggtagaacagtcccagcctctgtgagtcatctcagggggtccaatcggaacacgacagacagcctttggttcaactggagtccagcctctggggactttgacttttatgagctgattctctataatcccaatggcacaaagaaggaaaactggaaagacaaggacctgacggagtggcggtttcaaggccttgttcctggaaggaagtacgtgctgtgggtggtaactcacagtggagatctcagcaataaagtcacagcggagagcagaacagctccaagtcctcccagtcttatgtcatttgctgacattgcaaacacatccttggccatcacgtggaaagggcccccagactggacagactacaacgactttgagctgcagtggttgcccagagatgcacttactgtcttcaacccctacaacaacagaaaatcagaaggacgcattgtgtatggtcttcgtccagggagatcctatcaattcaacgtcaagactgtcagtggtgattcctggaaaacttacagcaaaccaatttttggatctgtgaggacaaagcctgacaagatacaaaacctgcattgccggcctcagaactccacggccattgcctgttcttggatccctcctgattctgactttgatggttatagtattgaatgccggaaaatggacacccaagaagttgagttttccagaaagctggagaaagaaaaatctctgctcaacatcatgatgctagtgccccataagaggtacctggtgtccatcaaagtgcagtcggccggcatgaccagcgaggtggttgaagacagcactatcacaatgatagaccgcccccctcctccacccccacacattcgtgtgaatgaaaaggatgtgctaattagcaagtcttccatcaactttactgtcaactgcagctggttcagcgacaccaatggagctgtgaaatacttcacagtggtggtgagagaggctgatggcagtgatgagctgaagccagaacagcagcaccctctcccttcctacctggagtacaggcacaatgcctccattcgggtgtatcagactaattattttgccagcaaatgtgccgaaaatcctaacagcaactccaagagttttaacattaagcttggagcagagatggagagcctaggtggaaaatgcgatcccactcagcaaaaattctgtgatggaccactgaagccacacactgcctacagaatcagcattcgagcttttacacagctctttgatgaggacctgaaggaattcacaaagccactctattcagacacatttttttctttacccatcactactgaatcagagcccttgtttggagctattgaaggtgtgagtgctggtctgtttttaattggcatgctagtggctgttgttgccttattgatctgcagacagaaagtgagccatggtcgagaaagaccctctgcccgtctgagcattcgtagggatcgaccattatctgtccacttaaacctgggccagaaaggtaaccggaaaacttcttgtccaataaaaataaatcagtttgaagggcatttcatgaagctacaggctgactccaactaccttctatccaaggaatacgaggagttaaaagacgtgggccgaaaccagtcatgtgacattgcactcttgccggagaatagagggaaaaatcgatacaacaatatattgccctatgatgccacgcgagtgaagctctccaatgtagatgatgatccttgctctgactacatcaatgccagctacatccctggcaacaacttcagaagagaatacattgtcactcagggaccgcttcctggcaccaaggatgacttctggaaaatggtgtgggaacaaaacgttcacaacatcgtcatggtgacccagtgtgttgagaagggccgagtaaagtgtgatcattactggccagcggaccaggattccctctactatggggacctcatcctgcagatgctctcagagtccgtcctgcctgagtggaccatccgggagtttaagatatgcggtgaggaacagcttgatgcacacagactcatccgccactttcactatacggtgtggccagaccatggagtcccagaaaccacccagtctctgatccagtttgtgagaactgtcagggactacatcaacagaagcccgggtgctgggcccactgtggtgcactgcagtgctggtgtgggtaggactggaacctttattgcattggaccgaatcctccagcagttagactccaaagactctgtggacatttatggagcagtgcacgacctaagacttcacagggttcacatggtccagactgagtgtcagtatgtctacctacatcagtgtgtaagagatgtcctcagagcaagaaagctacggagtgaacaagaaaaccccttgtttccaatctatgaaaatgtgaatccagagtatcacagagatccagtctattcaaggcattgagaatgtacctgaagagctcctggataaaaattattcactgtgtgatttgtttttaaaaacttgcttcatgccctacagaggtgccagctatttctgttgatactatgtataatttattaatctggagaatgtttaaaattttatataatttaaaggtaacagatattattgta

SEQ ID NO: 171735 - DNA, 5291 bp, Homo sapiens
  Payload ID: 13756
  Gene Symbol: PTPRB
  Gene Name: protein tyrosine phosphatase, receptor type, B
  ENST ID: ENST00000551525
  CDS Start-End: 26-4777
agcatgaacagttgctaagtggaaaatggaggctgaattttacatggtgattcttacctgcttgatcttcaggaactcagggtttcagattgtccatgtccagaaacaacagtgtcttttcaaaaatgagaaagtggtcgtgggctcatgcaacaggaccatccagaaccagcagtggatgtggactgaggatgaaaagctccttcatgttaaatctgcactgtgcttggccatctccaactcttcccgcggcccctcccgctcagccatcttggaccgctgttcccaggcaccccgatggacctgctatgatcaggaaggcttccttgaggtggaaaatgcctctctctttctccagaaacaaggctccagagtagtggtcaagaaggccaggaaatacctccatagctggatgaaaatagatgtcaacaaggagggaaaactggtcaatgaaagcctctgtttacaaaaagctggcctgggagcagaagtttcggtgaggagcactagaaacacggctccaccccagattctcactacctttaatgcagttccagatggcctggtattccttattaggaataccacagaggccttcatcagaaatgctgcagaaaactacagccaaaacagcagcgagaggcagcatcccaatctgcacatgactggaattacagacacatcatgggttttgtcgactactcagcccttctccagcaccactgaagagactggactggcggagccagagagatgtaacttcaccctggcggagtccaaggcctccagccattctgtgtctatccagtggagaattttgggctcaccctgtaactttagcctcatctatagcagtgacaccctgggggccgcgttgtgccctacctttcggatagacaacaccacatacggatgtaaccttcaagatttacaagcaggaaccatctataacttcaggattatttctctggatgaagagagaacagtggtcttgcaaacagatcctttacctcctgctaggtttggagtcagtaaagagaagacgacttcaaccagcttgcatgtttggtggactccttcttccggaaaagtcacctcatatgaggtgcaattatttgatgaaaataaccaaaagatacagggggttcaaattcaagaaagtacttcatggaatgaatacacttttttcaatctcactgctggtagtaaatacaatattgccatcacagctgtttctggaggaaaacgttctttttcagtttataccaatggatcaacagtgccatctccagtgaaagatattggtatttccacaaaagccaattctctcctgatttcctggtcccatggttctgggaatgtggaacgataccggctgatgctaatggataaagggatcctagttcatggcggtgttgtggacaaacatgctacttcctatgcttttcacgggctgacccctggctacctctacaacctcactgttatgactgaggctgcagggctgcaaaactacaggtggaaactagtcaggacagcccccatggaagtctcaaatctgaaggtgacaaatgatggcagtttgacctctctaaaagtcaaatggcaaagacctcctggaaatgtggattcttacaatatcaccctgtctcacaaagggaccatcaaggaatccagagtattagcaccttggattactgaaactcactttaaagagttagtccccggtcgactttatcaagttactgtcagctgtgtctctggtgaactgtctgctcagaagatggcagtgggcagaacatttccagacaaagttgcaaacctggaggcaaacaataatggcaggatgaggtctcttgtagtgagctggtcgccccctgctggagactgggagcagtatcggatcctactcttcaatgattctgtggtgctgctcaacatcactgtgggaaaggaagaaacacagtatgtcatggatgacacggggctcgtaccgggaagacagtatgaggtggaagtcattgttgagagtggaaatttgaagaattctgagcgttgccaaggcaggacagtccccctggctgtcctccagcttcgtgtcaaacatgccaatgaaacctcactgagtatcatgtggcagacccctgtagcagaatgggagaaatacatcatttccctagctgacagagacctcttactgatccacaagtcactctccaaagatgccaaagaattcacttttactgacctggtgcctggacgaaaatacatggctacagtcaccagtattagtggagacttaaaaaattcctcttcagtaaaaggaagaacagtgcctgcccaagtgactgacttgcatgtggccaaccaaggaatgaccagtagtctgtttactaactggacccaggcacaaggagacgtagaattttaccaagtcttactgatccatgaaaatgtggtcattaaaaatgaaagcatctccagtgagaccagcagatacagcttccactctctcaagtccggcagcctgtactccgtggtggtaacaacagtgagtggagggatctcttcccgacaagtggttgtggagggaagaacagtcccttccagtgtgagtggagtaacggtgaacaattccggtcgtaatgactacctcagcgtttcctggctgctggcgcccggagatgtggataactatgaggtaacattgtctcatgacggcaaggtggttcagtcccttgtcattgccaagtctgtcagagaatgttccttcagctccctcaccccaggccgcctctacaccgtgaccataactacaaggagtggcaagtatgaaaatcactccttcagccaagagcggacagtgcctgacaaagtccagggagtcagtgttagcaactcagccaggagtgactatttaagggtatcctgggtgcatgccactggagactttgatcactatgaagtcaccattaaaaacaaaaacaacttcattcaaactaaaagcattcccaagtcagaaaacgaatgtgtatttgttcagctagtccctggacggttgtacagtgtcactgttactacaaaaagtggacaatatgaagccaatgaacaagggaatgggagaacaattccagagcctgttaaggatctaacattgcgcaacaggagcactgaggacttgcatgtgacttggtcaggagctaatggggatgtcgaccaatatgagatccagctgctcttcaatgacatgaaagtatttcctccttttcaccttgtaaataccgcaaccgagtatcgatttacttccctaacaccaggccgccaatacaaaattcttgtcttgacgattagcggggatgtacagcagtcagccttcattgagggcttcacagttcctagtgctgtcaaaaatattcacatttctcccaatggagcaacagatagcctgacggtgaactggactcctggtgggggagacgttgattcctacacggtgtcggcattcaggcacagtcaaaaggttgactctcagactattcccaagcacgtctttgagcacacgttccacagactggaggccggggagcagtaccagatcatgattgcctcagtcagcgggtccctgaagaatcagataaatgtggttgggcggacagttccagcatctgtccaaggagtaattgcagacaatgcatacagcagttattccttaatagtaagttggcaaaaagctgctggtgtggcagaaagatatgatatcctgcttctaactgaaaatggaatccttctgcgcaacacatcagagccagccaccactaagcaacacaaatttgaagatctaacaccaggcaagaaatacaagatacagatcctaactgtcagtggaggcctctttagcaaggaagcccagactgaaggccgaacagtcccagcagctgtcaccgacctgaggatcacagagaactccaccaggcacctgtccttccgctggaccgcctcagagggggagctcagctggtacaacatctttttgtacaacccagatgggaatctccaggagagagctcaagttgacccactagtccagagcttctctttccagaacttgctacaaggcagaatgtacaagatggtgattgtaactcacagtggggagctgtctaatgagtctttcatatttggtagaacagtcccagcctctgtgagtcatctcagggggtccaatcggaacacgacagacagcctttggttcaactggagtccagcctctggggactttgacttttatgagctgattctctataatcccaatggcacaaagaaggaaaactggaaagacaaggacctgacggagtggcggtttcaaggccttgttcctggaaggaagtacgtgctgtgggtggtaactcacagtggagatctcagcaataaagtcacagcggagagcagaacagctccaagtcctcccagtcttatgtcatttgctgacattgcaaacacatccttggccatcacgtggaaagggcccccagactggacagactacaacgactttgagctgcagtggttgcccagagatgcacttactgtcttcaacccctacaacaacagaaaatcagaaggacgcattgtgtatggtcttcgtccagggagatcctatcaattcaacgtcaagactgtcagtggtgattcctggaaaacttacagcaaaccaatttttggatctgtgaggacaagtatgacatgttttgctactcttatttctcaaatggagtagaggaagtatatgttcaacatcttactcaaatagggcttggattaaatccatatttttacatgggattggtctggatttgaattcaggcagaagtctctgtagatttgttcgttcattcaacattaacaacaagggacaataaatctctctctgccctcatggggcttacaattaggtaggacgtactatttgtaaatagacattatattttgggtgtgatgagggaagtaaatggtactatggagacacttgttaggtaatctgacccaatacaagagaacttcttggaaaaggaaacatccaaatagaaacctaaagcaagagatttaccaggtagaggtaggggaagaagtggagaatattccaggtagagagaataaaatattccaagatgagagaggagggagagtacaagatctaccaataggggaacagaaagaagtttatttggccatagcataaaaggtgaggattaagggaatcagataataaaatattttgtattccatggtaa

SEQ ID NO: 171736 - DNA, 4626 bp, Homo sapiens
  Payload ID: 13757
  Gene Symbol: PTPRC
  Gene Name: protein tyrosine phosphatase, receptor type, C
  ENST ID: ENST00000348564
  CDS Start-End: 87-3524
agaggaggaaattgttcctcgtctgataagacaacagtggagaaaggacgcatgctgtttcttagggacacggctgacttccagatatgaccatgtatttgtggcttaaactcttggcatttggctttgcctttctggacacagaagtatttgtgacagggcaaagcccaacaccttcccccactgatgcctaccttaatgcctctgaaacaaccactctgagcccttctggaagcgctgtcatttcaaccacaacaatagctactactccatctaagccaacatgtgatgaaaaatatgcaaacatcactgtggattacttatataacaaggaaactaaattatttacagcaaagctaaatgttaatgagaatgtggaatgtggaaacaatacttgcacaaacaatgaggtgcataaccttacagaatgtaaaaatgcgtctgtttccatatctcataattcatgtactgctcctgataagacattaatattagatgtgccaccaggggttgaaaagtttcagttacatgattgtacacaagttgaaaaagcagatactactatttgtttaaaatggaaaaatattgaaacctttacttgtgatacacagaatattacctacagatttcagtgtggtaatatgatatttgataataaagaaattaaattagaaaaccttgaacccgaacatgagtataagtgtgactcagaaatactctataataaccacaagtttactaacgcaagtaaaattattaaaacagattttgggagtccaggagagcctcagattattttttgtagaagtgaagctgcacatcaaggagtaattacctggaatccccctcaaagatcatttcataattttaccctctgttatataaaagagacagaaaaagattgcctcaatctggataaaaacctgatcaaatatgatttgcaaaatttaaaaccttatacgaaatatgttttatcattacatgcctacatcattgcaaaagtgcaacgtaatggaagtgctgcaatgtgtcatttcacaactaaaagtgctcctccaagccaggtctggaacatgactgtctccatgacatcagataatagtatgcatgtcaagtgtaggcctcccagggaccgtaatggcccccatgaacgttaccatttggaagttgaagctggaaatactctggttagaaatgagtcgcataagaattgcgatttccgtgtaaaagatcttcaatattcaacagactacacttttaaggcctattttcacaatggagactatcctggagaaccctttattttacatcattcaacatcttataattctaaggcactgatagcatttctggcatttctgattattgtgacatcaatagccctgcttgttgttctctacaaaatctatgatctacataagaaaagatcctgcaatttagatgaacagcaggagcttgttgaaagggatgatgaaaaacaactgatgaatgtggagccaatccatgcagatattttgttggaaacttataagaggaagattgctgatgaaggaagactttttctggctgaatttcagagcatcccgcgggtgttcagcaagtttcctataaaggaagctcgaaagccctttaaccagaataaaaaccgttatgttgacattcttccttatgattataaccgtgttgaactctctgagataaacggagatgcagggtcaaactacataaatgccagctatattgatggtttcaaagaacccaggaaatacattgctgcacaaggtcccagggatgaaactgttgatgatttctggaggatgatttgggaacagaaagccacagttattgtcatggtcactcgatgtgaagaaggaaacaggaacaagtgtgcagaatactggccgtcaatggaagagggcactcgggcttttggagatgttgttgtaaagatcaaccagcacaaaagatgtccagattacatcattcagaaattgaacattgtaaataaaaaagaaaaagcaactggaagagaggtgactcacattcagttcaccagctggccagaccacggggtgcctgaggatcctcacttgctcctcaaactgagaaggagagtgaatgccttcagcaatttcttcagtggtcccattgtggtgcactgcagtgctggtgttgggcgcacaggaacctatatcggaattgatgccatgctagaaggcctggaagccgagaacaaagtggatgtttatggttatgttgtcaagctaaggcgacagagatgcctgatggttcaagtagaggcccagtacatcttgatccatcaggctttggtggaatacaatcagtttggagaaacagaagtgaatttgtctgaattacatccatatctacataacatgaagaaaagggatccacccagtgagccgtctccactagaggctgaattccagagacttccttcatataggagctggaggacacagcacattggaaatcaagaagaaaataaaagtaaaaacaggaattctaatgtcatcccatatgactataacagagtgccacttaaacatgagctggaaatgagtaaagagagtgagcatgattcagatgaatcctctgatgatgacagtgattcagaggaaccaagcaaatacatcaatgcatcttttataatgagctactggaaacctgaagtgatgattgctgctcagggaccactgaaggagaccattggtgacttttggcagatgatcttccaaagaaaagtcaaagttattgttatgctgacagaactgaaacatggagaccaggaaatctgtgctcagtactggggagaaggaaagcaaacatatggagatattgaagttgacctgaaagacacagacaaatcttcaacttatacccttcgtgtctttgaactgagacattccaagaggaaagactctcgaactgtgtaccagtaccaatatacaaactggagtgtggagcagcttcctgcagaacccaaggaattaatctctatgattcaggtcgtcaaacaaaaacttccccagaagaattcctctgaagggaacaagcatcacaagagtacacctctactcattcactgcagggatggatctcagcaaacgggaatattttgtgctttgttaaatctcttagaaagtgcggaaacagaagaggtagtggatatttttcaagtggtaaaagctctacgcaaagctaggccaggcatggtttccacattcgagcaatatcaattcctatatgacgtcattgccagcacctaccctgctcagaatggacaagtaaagaaaaacaaccatcaagaagataaaattgaatttgataatgaagtggacaaagtaaagcaggatgctaattgtgttaatccacttggtgccccagaaaagctccctgaagcaaaggaacaggctgaaggttctgaacccacgagtggcactgaggggccagaacattctgtcaatggtcctgcaagtccagctttaaatcaaggttcataggaaaagacataaatgaggaaactccaaacctcctgttagctgttatttctatttttgtagaagtaggaagtgaaaataggtatacagtggattaattaaatgcagcgaaccaatatttgtagaagggttatattttactactgtggaaaaatatttaagatagttttgccagaacagtttgtacagacgtatgcttattttaaaattttatctcttattcagtaaaaaacaacttctttgtaatcgttatgtgtgtatatgtatgtgtgtatgggtgtgtgtttgtgtgagagacagagaaagagagagaattctttcaagtgaatctaaaagcttttgcttttcctttgtttttatgaagaaaaaatacattttatattagaagtgttaacttagcttgaaggatctgtttttaaaaatcataaactgtgtgcagactcaataaaatcatgtacatttctgaaatgacctcaagatgtcctccttgttctactcatatatatctatcttatatagtttactattttacttctagagatagtacataaaggtggtatgtgtgtgtatgctactacaaaaaagttgttaactaaattaacattgggaaatcttatattccatatattagcatttagtccaatgtctttttaagcttatttaattaaaaaatttccagtgagcttatcatgctgtctttacatggggttttcaattttgcatgctcgattattccctgtacaatatttaaaatttattgcttgatacttttgacaacaaattaggttttgtacaattgaacttaaataaatgtcattaaaataaataaatgcaatatgtattaatattcattgtataaaaatagaagaatacaaacatatttgttaaatatttacatatgaaatttaatatagctatttttatggaatttttcattgatatgaaaaatatgatattgcatatgcatagttcccatgttaaatcccattcataactttcattaaagcatttactttgaatttctccaatgcttagaatgtttttaccaggaatggatgtcgctaatcataataaaattcaaccattatttttttcttgtttataa

SEQ ID NO: 171737 - DNA, 1017 bp, Homo sapiens
  Payload ID: 13757
  Gene Symbol: PTPRC
  Gene Name: protein tyrosine phosphatase, receptor type, C
  ENST ID: ENST00000367364
  CDS Start-End: 85-195
aggaggaaattgttcctcgtctgataagacaacagtggagaaaggacgcatgctgtttcttagggacacggctgacttccagatatgaccatgtatttgtggcttaaactcttggcatttggctttgcctttctggacacagaagtatttgtgacagggcaaagcccaacaccttcccccactggtaagaattaatatttatatttttactaattttattttcttgttgcaaagtttatatatttaactacaattttctattattaacactgaaattatttttaaggataaattttataatcatgagtgattcttgacattcacttgttcttaaactttctgcttatacgttatagagtttaataactacctaaacatgttattaaatttgtatatatattttgtgtataaatagtaacttttcccaaacttgacagtaaatcacacaacaggtttctactctcttttaatattttaagactataaaaaaatgcatttaaattagataacaaaattttatagtctgaaagcaggttaacagctgtctatgtatgttatagatatgtagataacagatttgcatatgtctatatttctttaagagtatgttgcttttttcaatggtatgcaaaacctttgagactattgagatatttttaaataataattttcaaattctactgaacacttcaatagtccttataaatgtcttaatcatgagataaatttaaaacacagagatgctgcaaataaattcatacatagtacatacaaaataagagaaaaaattaaattgcagatggttaaatatcacatcacttaactgatgttactgaaaatgtattttcctgcataatcatatggttgacagtatgcattaagaaggtaagtaaaacaatgaagacaattttgatttaatatggtaatgcacaattccaactaacgtacattcaacagatcatgaaattgggttattaaaatgaatatttttgtcattaaataaaaattccgtccaaa

SEQ ID NO: 171738 - DNA, 2291 bp, Homo sapiens
  Payload ID: 13757
  Gene Symbol: PTPRC
  Gene Name: protein tyrosine phosphatase, receptor type, C
  ENST ID: ENST00000367367
  CDS Start-End: 87-2291
agaggaggaaattgttcctcgtctgataagacaacagtggagaaaggacgcatgctgtttcttagggacacggctgacttccagatatgaccatgtatttgtggcttaaactcttggcatttggctttgcctttctggacacagaagtatttgtgacagggcaaagcccaacaccttcccccactggtgtttcatcagtacagacgcctcaccttcccacgcacgcagactcgcagacgccctctgctggaactgacacgcagacattcagcggctccgccgccaatgcaaaactcaaccctaccccaggcagcaatgctatctcagatgtcccaggagagaggagtacagccagcacctttcctacagacccagtttccccattgacaaccaccctcagccttgcacaccacagctctgctgccttacctgcacgcacctccaacaccaccatcacagcgaacacctcagatgcctaccttaatgcctctgaaacaaccactctgagcccttctggaagcgctgtcatttcaaccacaacaatagctactactccatctaagccaacatgtgatgaaaaatatgcaaacatcactgtggattacttatataacaaggaaactaaattatttacagcaaagctaaatgttaatgagaatgtggaatgtggaaacaatacttgcacaaacaatgaggtgcataaccttacagaatgtaaaaatgcgtctgtttccatatctcataattcatgtactgctcctgataagacattaatattagatgtgccaccaggggttgaaaagtttcagttacatgattgtacacaagttgaaaaagcagatactactatttgtttaaaatggaaaaatattgaaacctttacttgtgatacacagaatattacctacagatttcagtgtggtaatatgatatttgataataaagaaattaaattagaaaaccttgaacccgaacatgagtataagtgtgactcagaaatactctataataaccacaagtttactaacgcaagtaaaattattaaaacagattttgggagtccaggagagcctcagattattttttgtagaagtgaagctgcacatcaaggagtaattacctggaatccccctcaaagatcatttcataattttaccctctgttatataaaagagacagaaaaagattgcctcaatctggataaaaacctgatcaaatatgatttgcaaaatttaaaaccttatacgaaatatgttttatcattacatgcctacatcattgcaaaagtgcaacgtaatggaagtgctgcaatgtgtcatttcacaactaaaagtgctcctccaagccaggtctggaacatgactgtctccatgacatcagataatagtatgcatgtcaagtgtaggcctcccagggaccgtaatggcccccatgaacgttaccatttggaagttgaagctggaaatactctggttagaaatgagtcgcataagaattgcgatttccgtgtaaaagatcttcaatattcaacagactacacttttaaggcctattttcacaatggagactatcctggagaaccctttattttacatcattcaacatcttataattctaaggcactgatagcatttctggcatttctgattattgtgacatcaatagccctgcttgttgttctctacaaaatctatgatctacataagaaaagatcctgcaatttagatgaacagcaggagcttgttgaaagggatgatgaaaaacaactgatgaatgtggagccaatccatgcagatattttgttggaaacttataagaggaagattgctgatgaaggaagactttttctggctgaatttcagagcatcccgcgggtgttcagcaagtttcctataaaggaagctcgaaagccctttaaccagaataaaaaccgttatgttgacattcttccttatgattataaccgtgttgaactctctgagataaacggagatgcagggtcaaactacataaatgccagctatattgatggtttcaaagaacccaggaaatacattgctgcacaaggtcccagggatgaaactgttgatgatttctggaggatgatttgggaacagaaagccacagttattgtcatggtcactcgatgtgaagaaggaaacaggaacaagtgtgcagaatactggccgtcaatggaagagggcactcgggcttttggagatgttgttgtaaagatcaaccagcacaaaagatgtccagattacatcattcagaaattgaacattgtaaat

SEQ ID NO: 171739 - DNA, 517 bp, Homo sapiens
  Payload ID: 13757
  Gene Symbol: PTPRC
  Gene Name: protein tyrosine phosphatase, receptor type, C
  ENST ID: ENST00000367379
  CDS Start-End: 72-517
tagttttttcattcatttggccgtctcaaaggacgcatgctgtttcttagggacacggctgacttccagatatgaccatgtatttgtggcttaaactcttggcatttggctttgcctttctggacacagaagtatttgtgacagggcaaagcccaacaccttcccccactgatgcctaccttaatgcctctgaaacaaccactctgagcccttctggaagcgctgtcatttcaaccacaacaatagctactactccatctaagccaacatgtgatgaaaaatatgcaaacatcactgtggattacttatataacaaggaaactaaattatttacagcaaagctaaatgttaatgagaatgtggaatgtggaaacaatacttgcacaaacaatgaggtgcataaccttacagaatgtaaaaatgcgtctgtttccatatctcataattcatgtactgctcctgataagacattaatattagatgtgccaccaggggttgaaaagtttcagttacatga

SEQ ID NO: 171740 - DNA, 462 bp, Homo sapiens
  Payload ID: 13757
  Gene Symbol: PTPRC
  Gene Name: protein tyrosine phosphatase, receptor type, C
  ENST ID: ENST00000418674
  CDS Start-End: 108-462
acatttttgattcgtttttacagagaaaaacttctacagagataacaattattttgcttttcagaaggacgcatgctgtttcttagggacacggctgacttccagatatgaccatgtatttgtggcttaaactcttggcatttggctttgcctttctggacacagaagtatttgtgacagggcaaagcccaacaccttcccccactggattgactacagcaaagatgcccagtgttccactttcaagtgaccccttacctactcacaccactgcattctcacccgcaagcacctttgaaagagaaaatgacttctcagagaccacaacttctcttagtccagacaatacttccacccaagtatccccggactctttggataatgctagtgcttttaataccacaggtgtttcatcagtacagacgcctcaccttcccacgcacgcagactcgcagacgccct

SEQ ID NO: 171741 - DNA, 1338 bp, Homo sapiens
  Payload ID: 13757
  Gene Symbol: PTPRC
  Gene Name: protein tyrosine phosphatase, receptor type, C
  ENST ID: ENST00000413409
  CDS Start-End: 85-348
aggaggaaattgttcctcgtctgataagacaacagtggagaaaggacgcatgctgtttcttagggacacggctgacttccagatatgaccatgtatttgtggcttaaactcttggcatttggctttgcctttctggacacagaagtatttgtgacagggcaaagcccaacaccttcccccactggccatctgcaagctgaggagcaaggaagccaatccaagtcaccaaacctcaaaagtagggaagctgacagttcagccttcagttggtggccaaaggcccgagagcccctcacaaaccactggagtaagtccaagagtccaaaagctgaggaacttggagtctgatgttcaagagcaggaagcagccagcacgagagaaagatgaagaccagaagactcagcaagctcacttctcctaccttcttgtgcctgctttttctagccgtgctggcagttgcttggatgatgcccactcatattgggtgggggtgggggggttggggagggtctgcctcccccagtccactgactcaaatgttaatctcccttggcaatacgctcacaggcacacccaggaacaatactttgcatccttcaatccaatcaagttgacactcaatattaaccatcaaatactattataaggagaatgttgcatgattttccttctagtctgtttgtaattcacatctaatgaaagagtgagagtggacgataaagggaacttgttgaaacatttctctcaaagcaaaagggatcattggaagcaggcagacaccagaattggtttaacctaaaaataacaaattaataattatcaagtctataatgatgacagtgacttaatgtgaatagaaagaattctaaactctctccttccttcctccctcccttctttcctactttctttccactccctttctcccacccccttttcttttcctttcttttctcccaccctctctccctccctttcttttattcaatgcatagtagttgaaaaaatctaaagttagacctgattttacactgaagactagaggtagttactatcctattactgtacttagttggctatgctggcatgtcattatgggtaaaagtttgatggatttatttgtgagttatttggttatgaaaatctagagattgaagtttttcattagaaaataacacacataacaagtctatgatcattttgcatttctgtaatcacagaatagttctgcaatatttcatgtatattggaattgaagttcaattgaattttatctgtatttagtaaaaattaactttagctttgatactaatgaataaagctgggttttttattta

SEQ ID NO: 171742 - DNA, 5164 bp, Homo sapiens
  Payload ID: 13757
  Gene Symbol: PTPRC
  Gene Name: protein tyrosine phosphatase, receptor type, C
  ENST ID: ENST00000442510
  CDS Start-End: 142-4062
gacatcatcacctagcagttcatgcagctagcaagtggtttgttcttagggtaacagaggaggaaattgttcctcgtctgataagacaacagtggagaaaggacgcatgctgtttcttagggacacggctgacttccagatatgaccatgtatttgtggcttaaactcttggcatttggctttgcctttctggacacagaagtatttgtgacagggcaaagcccaacaccttcccccactggattgactacagcaaagatgcccagtgttccactttcaagtgaccccttacctactcacaccactgcattctcacccgcaagcacctttgaaagagaaaatgacttctcagagaccacaacttctcttagtccagacaatacttccacccaagtatccccggactctttggataatgctagtgcttttaataccacaggtgtttcatcagtacagacgcctcaccttcccacgcacgcagactcgcagacgccctctgctggaactgacacgcagacattcagcggctccgccgccaatgcaaaactcaaccctaccccaggcagcaatgctatctcagatgtcccaggagagaggagtacagccagcacctttcctacagacccagtttccccattgacaaccaccctcagccttgcacaccacagctctgctgccttacctgcacgcacctccaacaccaccatcacagcgaacacctcagatgcctaccttaatgcctctgaaacaaccactctgagcccttctggaagcgctgtcatttcaaccacaacaatagctactactccatctaagccaacatgtgatgaaaaatatgcaaacatcactgtggattacttatataacaaggaaactaaattatttacagcaaagctaaatgttaatgagaatgtggaatgtggaaacaatacttgcacaaacaatgaggtgcataaccttacagaatgtaaaaatgcgtctgtttccatatctcataattcatgtactgctcctgataagacattaatattagatgtgccaccaggggttgaaaagtttcagttacatgattgtacacaagttgaaaaagcagatactactatttgtttaaaatggaaaaatattgaaacctttacttgtgatacacagaatattacctacagatttcagtgtggtaatatgatatttgataataaagaaattaaattagaaaaccttgaacccgaacatgagtataagtgtgactcagaaatactctataataaccacaagtttactaacgcaagtaaaattattaaaacagattttgggagtccaggagagcctcagattattttttgtagaagtgaagctgcacatcaaggagtaattacctggaatccccctcaaagatcatttcataattttaccctctgttatataaaagagacagaaaaagattgcctcaatctggataaaaacctgatcaaatatgatttgcaaaatttaaaaccttatacgaaatatgttttatcattacatgcctacatcattgcaaaagtgcaacgtaatggaagtgctgcaatgtgtcatttcacaactaaaagtgctcctccaagccaggtctggaacatgactgtctccatgacatcagataatagtatgcatgtcaagtgtaggcctcccagggaccgtaatggcccccatgaacgttaccatttggaagttgaagctggaaatactctggttagaaatgagtcgcataagaattgcgatttccgtgtaaaagatcttcaatattcaacagactacacttttaaggcctattttcacaatggagactatcctggagaaccctttattttacatcattcaacatcttataattctaaggcactgatagcatttctggcatttctgattattgtgacatcaatagccctgcttgttgttctctacaaaatctatgatctacataagaaaagatcctgcaatttagatgaacagcaggagcttgttgaaagggatgatgaaaaacaactgatgaatgtggagccaatccatgcagatattttgttggaaacttataagaggaagattgctgatgaaggaagactttttctggctgaatttcagagcatcccgcgggtgttcagcaagtttcctataaaggaagctcgaaagccctttaaccagaataaaaaccgttatgttgacattcttccttatgattataaccgtgttgaactctctgagataaacggagatgcagggtcaaactacataaatgccagctatattgatggtttcaaagaacccaggaaatacattgctgcacaaggtcccagggatgaaactgttgatgatttctggaggatgatttgggaacagaaagccacagttattgtcatggtcactcgatgtgaagaaggaaacaggaacaagtgtgcagaatactggccgtcaatggaagagggcactcgggcttttggagatgttgttgtaaagatcaaccagcacaaaagatgtccagattacatcattcagaaattgaacattgtaaataaaaaagaaaaagcaactggaagagaggtgactcacattcagttcaccagctggccagaccacggggtgcctgaggatcctcacttgctcctcaaactgagaaggagagtgaatgccttcagcaatttcttcagtggtcccattgtggtgcactgcagtgctggtgttgggcgcacaggaacctatatcggaattgatgccatgctagaaggcctggaagccgagaacaaagtggatgtttatggttatgttgtcaagctaaggcgacagagatgcctgatggttcaagtagaggcccagtacatcttgatccatcaggctttggtggaatacaatcagtttggagaaacagaagtgaatttgtctgaattacatccatatctacataacatgaagaaaagggatccacccagtgagccgtctccactagaggctgaattccagagacttccttcatataggagctggaggacacagcacattggaaatcaagaagaaaataaaagtaaaaacaggaattctaatgtcatcccatatgactataacagagtgccacttaaacatgagctggaaatgagtaaagagagtgagcatgattcagatgaatcctctgatgatgacagtgattcagaggaaccaagcaaatacatcaatgcatcttttataatgagctactggaaacctgaagtgatgattgctgctcagggaccactgaaggagaccattggtgacttttggcagatgatcttccaaagaaaagtcaaagttattgttatgctgacagaactgaaacatggagaccaggaaatctgtgctcagtactggggagaaggaaagcaaacatatggagatattgaagttgacctgaaagacacagacaaatcttcaacttatacccttcgtgtctttgaactgagacattccaagaggaaagactctcgaactgtgtaccagtaccaatatacaaactggagtgtggagcagcttcctgcagaacccaaggaattaatctctatgattcaggtcgtcaaacaaaaacttccccagaagaattcctctgaagggaacaagcatcacaagagtacacctctactcattcactgcagggatggatctcagcaaacgggaatattttgtgctttgttaaatctcttagaaagtgcggaaacagaagaggtagtggatatttttcaagtggtaaaagctctacgcaaagctaggccaggcatggtttccacattcgagcaatatcaattcctatatgacgtcattgccagcacctaccctgctcagaatggacaagtaaagaaaaacaaccatcaagaagataaaattgaatttgataatgaagtggacaaagtaaagcaggatgctaattgtgttaatccacttggtgccccagaaaagctccctgaagcaaaggaacaggctgaaggttctgaacccacgagtggcactgaggggccagaacattctgtcaatggtcctgcaagtccagctttaaatcaaggttcataggaaaagacataaatgaggaaactccaaacctcctgttagctgttatttctatttttgtagaagtaggaagtgaaaataggtatacagtggattaattaaatgcagcgaaccaatatttgtagaagggttatattttactactgtggaaaaatatttaagatagttttgccagaacagtttgtacagacgtatgcttattttaaaattttatctcttattcagtaaaaaacaacttctttgtaatcgttatgtgtgtatatgtatgtgtgtatgggtgtgtgtttgtgtgagagacagagaaagagagagaattctttcaagtgaatctaaaagcttttgcttttcctttgtttttatgaagaaaaaatacattttatattagaagtgttaacttagcttgaaggatctgtttttaaaaatcataaactgtgtgcagactcaataaaatcatgtacatttctgaaatgacctcaagatgtcctccttgttctactcatatatatctatcttatatagtttactattttacttctagagatagtacataaaggtggtatgtgtgtgtatgctactacaaaaaagttgttaactaaattaacattgggaaatcttatattccatatattagcatttagtccaatgtctttttaagcttatttaattaaaaaatttccagtgagcttatcatgctgtctttacatggggttttcaattttgcatgctcgattattccctgtacaatatttaaaatttattgcttgatacttttgacaacaaattaggttttgtacaattgaacttaaataaatgtcattaaaataaataaatgcaatatgtattaatattcattgtataaaaatagaagaatacaaacatatttgttaaatatttacatatgaaatttaatatagctatttttatggaatttttcattgatatgaaaaatatgatattgcatatgcatagttcccatgttaaatcccattcataactttcattaaagcatttactttgaatttctccaatgcttagaatgtttttaccaggaatggatgtcgctaatcataataaaattcaaccattatttttttcttgtttataa

SEQ ID NO: 171743 - DNA, 1962 bp, Homo sapiens
  Payload ID: 13757
  Gene Symbol: PTPRC
  Gene Name: protein tyrosine phosphatase, receptor type, C
  ENST ID: ENST00000530727
  CDS Start-End: 163-1962
gaagttagtaaaaccgaatctgacatcatcacctagcagttcatgcagctagcaagtggtttgttcttagggtaacagaggaggaaattgttcctcgtctgataagacaacagtggagaaaggacgcatgctgtttcttagggacacggctgacttccagatatgaccatgtatttgtggcttaaactcttggcatttggctttgcctttctggacacagaagtatttgtgacagggcaaagcccaacaccttcccccactggtgtttcatcagtacagacgcctcaccttcccacgcacgcagactcgcagacgccctctgctggaactgacacgcagacattcagcggctccgccgccaatgcaaaactcaaccctaccccaggcagcaatgctatctcagatgcctaccttaatgcctctgaaacaaccactctgagcccttctggaagcgctgtcatttcaaccacaacaatagctactactccatctaagccaacatgtgatgaaaaatatgcaaacatcactgtggattacttatataacaaggaaactaaattatttacagcaaagctaaatgttaatgagaatgtggaatgtggaaacaatacttgcacaaacaatgaggtgcataaccttacagaatgtaaaaatgcgtctgtttccatatctcataattcatgtactgctcctgataagacattaatattagatgtgccaccaggggttgaaaagtttcagttacatgattgtacacaagttgaaaaagcagatactactatttgtttaaaatggaaaaatattgaaacctttacttgtgatacacagaatattacctacagatttcagtgtggtaatatgatatttgataataaagaaattaaattagaaaaccttgaacccgaacatgagtataagtgtgactcagaaatactctataataaccacaagtttactaacgcaagtaaaattattaaaacagattttgggagtccaggagagcctcagattattttttgtagaagtgaagctgcacatcaaggagtaattacctggaatccccctcaaagatcatttcataattttaccctctgttatataaaagagacagaaaaagattgcctcaatctggataaaaacctgatcaaatatgatttgcaaaatttaaaaccttatacgaaatatgttttatcattacatgcctacatcattgcaaaagtgcaacgtaatggaagtgctgcaatgtgtcatttcacaactaaaagtgctcctccaagccaggtctggaacatgactgtctccatgacatcagataatagtatgcatgtcaagtgtaggcctcccagggaccgtaatggcccccatgaacgttaccatttggaagttgaagctggaaatactctggttagaaatgagtcgcataagaattgcgatttccgtgtaaaagatcttcaatattcaacagactacacttttaaggcctattttcacaatggagactatcctggagaaccctttattttacatcattcaacatcttataattctaaggcactgatagcatttctggcatttctgattattgtgacatcaatagccctgcttgttgttctctacaaaatctatgatctacataagaaaagatcctgcaatttagatgaacagcaggagcttgttgaaagggatgatgaaaaacaactgatgaatgtggagccaatccatgcagatattttgttggaaacttataagaggaagattgctgatgaaggaagactttttctggctgaatttcagagcatcccgcgggtgttcagcaagtttcctataaaggaagctcgaaagccctttaaccagaataaaaaccgttatgttgacattcttccttatgattataaccgtgttgaactctctgagataaacggagatgcagggtcaaactacataaatgccagctatattgat

SEQ ID NO: 171744 - DNA, 1017 bp, Homo sapiens; identical to SEQ ID NO: 171737
  Payload ID: 13757
  Gene Symbol: PTPRC
  Gene Name: protein tyrosine phosphatase, receptor type, C
  ENST ID: ENST00000570609
  CDS Start-End: 91-195

SEQ ID NO: 171745 - DNA, 1861 bp, Homo sapiens
  Payload ID: 13757
  Gene Symbol: PTPRC
  Gene Name: protein tyrosine phosphatase, receptor type, C
  Uniprot ID: P08575
  ENST ID: ENST00000573679
  CDS Start-End: 148-1861
gacatcatcacctagcagttcatgcagctagcaagtggtttgttcttagggtaacagaggaggaaattgttcctcgtctgataagacaacagtggagaaaggacgcatgctgtttcttagggacacggctgacttccagatatgaccatgtatttgtggcttaaactcttggcatttggctttgcctttctggacacagaagtatttgtgacagggcaaagcccaacaccttcccccactggattgactacagcaaagatgcccagtgttccactttcaagtgaccccttacctactcacaccactgcattctcacccgcaagcacctttgaaagagaaaatgacttctcagagaccacaacttctcttagtccagacaatacttccacccaagtatccccggactctttggataatgctagtgcttttaataccacaggtgtttcatcagtacagacgcctcaccttcccacgcacgcagactcgcagacgccctctgctggaactgacacgcagacattcagcggctccgccgccaatgcaaaactcaaccctaccccaggcagcaatgctatctcagatgtcccaggagagaggagtacagccagcacctttcctacagacccagtttccccattgacaaccaccctcagccttgcacaccacagctctgctgccttacctgcacgcacctccaacaccaccatcacagcgaacacctcagatgcctaccttaatgcctctgaaacaaccactctgagcccttctggaagcgctgtcatttcaaccacaacaatagctactactccatctaagccaacatgtgatgaaaaatatgcaaacatcactgtggattacttatataacaaggaaactaaattatttacagcaaagctaaatgttaatgagaatgtggaatgtggaaacaatacttgcacaaacaatgaggtgcataaccttacagaatgtaaaaatgcgtctgtttccatatctcataattcatgtactgctcctgataagacattaatattagatgtgccaccaggggttgaaaagtttcagttacatgattgtacacaagttgaaaaagcagatactactatttgtttaaaatggaaaaatattgaaacctttacttgtgatacacagaatattacctacagatttcagtgtggtaatatgatatttgataataaagaaattaaattagaaaaccttgaacccgaacatgagtataagtgtgactcagaaatactctataataaccacaagtttactaacgcaagtaaaattattaaaacagattttgggagtccaggagagcctcagattattttttgtagaagtgaagctgcacatcaaggagtaattacctggaatccccctcaaagatcatttcataattttaccctctgttatataaaagagacagaaaaagattgcctcaatctggataaaaacctgatcaaatatgatttgcaaaatttaaaaccttatacgaaatatgttttatcattacatgcctacatcattgcaaaagtgcaacgtaatggaagtgctgcaatgtgtcatttcacaactaaaagtgctcctccaagccaggtctggaacatgactgtctccatgacatcagataatagtatgcatgtcaagtgtaggcctcccagggaccgtaatggcccccatgaacgttaccatttggaagttgaagctggaaatactctggttagaaatgagtcgcataagaattgcgatttccgtgtaaaagatcttcaatattcaacagactacacttttaaggcctattttcacaatggagactatcctggagaaccctttattttacatcattcaacatctt

SEQ ID NO: 171746 - DNA, 1338 bp, Homo sapiens; identical to SEQ ID NO: 171741
  Payload ID: 13757
  Gene Symbol: PTPRC
  Gene Name: protein tyrosine phosphatase, receptor type, C
  ENST ID: ENST00000571847
  CDS Start-End: 91-348

SEQ ID NO: 171747 - DNA, 1608 bp, Homo sapiens
  Payload ID: 13757
  Gene Symbol: PTPRC
  Gene Name: protein tyrosine phosphatase, receptor type, C
  ENST ID: ENST00000576833
  CDS Start-End: 93-1608
agaggaggaaattgttcctcgtctgataagacaacagtggagaaaggacgcatgctgtttcttagggacacggctgacttccagatatgaccatgtatttgtggcttaaactcttggcatttggctttgcctttctggacacagaagtatttgtgacagggcaaagcccaacaccttcccccactggtgtttcatcagtacagacgcctcaccttcccacgcacgcagactcgcagacgccctctgctggaactgacacgcagacattcagcggctccgccgccaatgcaaaactcaaccctaccccaggcagcaatgctatctcagatgtcccaggagagaggagtacagccagcacctttcctacagacccagtttccccattgacaaccaccctcagccttgcacaccacagctctgctgccttacctgcacgcacctccaacaccaccatcacagcgaacacctcagatgcctaccttaatgcctctgaaacaaccactctgagcccttctggaagcgctgtcatttcaaccacaacaatagctactactccatctaagccaacatgtgatgaaaaatatgcaaacatcactgtggattacttatataacaaggaaactaaattatttacagcaaagctaaatgttaatgagaatgtggaatgtggaaacaatacttgcacaaacaatgaggtgcataaccttacagaatgtaaaaatgcgtctgtttccatatctcataattcatgtactgctcctgataagacattaatattagatgtgccaccaggggttgaaaagtttcagttacatgattgtacacaagttgaaaaagcagatactactatttgtttaaaatggaaaaatattgaaacctttacttgtgatacacagaatattacctacagatttcagtgtggtaatatgatatttgataataaagaaattaaattagaaaaccttgaacccgaacatgagtataagtgtgactcagaaatactctataataaccacaagtttactaacgcaagtaaaattattaaaacagattttgggagtccaggagagcctcagattattttttgtagaagtgaagctgcacatcaaggagtaattacctggaatccccctcaaagatcatttcataattttaccctctgttatataaaagagacagaaaaagattgcctcaatctggataaaaacctgatcaaatatgatttgcaaaatttaaaaccttatacgaaatatgttttatcattacatgcctacatcattgcaaaagtgcaacgtaatggaagtgctgcaatgtgtcatttcacaactaaaagtgctcctccaagccaggtctggaacatgactgtctccatgacatcagataatagtatgcatgtcaagtgtaggcctcccagggaccgtaatggcccccatgaacgttaccatttggaagttgaagctggaaatactctggttagaaatgagtcgcataagaattgcgatttccgtgtaaaagatcttcaatattcaacagactacacttttaaggcctattttcacaatggagactatcctggagaaccctttattttacatcattcaacatctt

SEQ ID NO: 171748 - DNA, 517 bp, Homo sapiens; identical to SEQ ID NO: 171739
  Payload ID: 13757
  Gene Symbol: PTPRC
  Gene Name: protein tyrosine phosphatase, receptor type, C
  ENST ID: ENST00000573298
  CDS Start-End: 78-517

SEQ ID NO: 171749 - DNA, 1323 bp, Homo sapiens
  Payload ID: 13757
  Gene Symbol: PTPRC
  Gene Name: protein tyrosine phosphatase, receptor type, C
  Uniprot ID: P08575
  ENST ID: ENST00000573477
  CDS Start-End: 93-1323
agaggaggaaattgttcctcgtctgataagacaacagtggagaaaggacgcatgctgtttcttagggacacggctgacttccagatatgaccatgtatttgtggcttaaactcttggcatttggctttgcctttctggacacagaagtatttgtgacagggcaaagcccaacaccttcccccactgatgcctaccttaatgcctctgaaacaaccactctgagcccttctggaagcgctgtcatttcaaccacaacaatagctactactccatctaagccaacatgtgatgaaaaatatgcaaacatcactgtggattacttatataacaaggaaactaaattatttacagcaaagctaaatgttaatgagaatgtggaatgtggaaacaatacttgcacaaacaatgaggtgcataaccttacagaatgtaaaaatgcgtctgtttccatatctcataattcatgtactgctcctgataagacattaatattagatgtgccaccaggggttgaaaagtttcagttacatgattgtacacaagttgaaaaagcagatactactatttgtttaaaatggaaaaatattgaaacctttacttgtgatacacagaatattacctacagatttcagtgtggtaatatgatatttgataataaagaaattaaattagaaaaccttgaacccgaacatgagtataagtgtgactcagaaatactctataataaccacaagtttactaacgcaagtaaaattattaaaacagattttgggagtccaggagagcctcagattattttttgtagaagtgaagctgcacatcaaggagtaattacctggaatccccctcaaagatcatttcataattttaccctctgttatataaaagagacagaaaaagattgcctcaatctggataaaaacctgatcaaatatgatttgcaaaatttaaaaccttatacgaaatatgttttatcattacatgcctacatcattgcaaaagtgcaacgtaatggaagtgctgcaatgtgtcatttcacaactaaaagtgctcctccaagccaggtctggaacatgactgtctccatgacatcagataatagtatgcatgtcaagtgtaggcctcccagggaccgtaatggcccccatgaacgttaccatttggaagttgaagctggaaatactctggttagaaatgagtcgcataagaattgcgatttccgtgtaaaagatcttcaatattcaacagactacacttttaaggcctattttcacaatggagactatcctggagaaccctttattttacatcattcaacatctt

SEQ ID NO: 171750 - DNA, 1540 bp, Homo sapiens
  Payload ID: 13757
  Gene Symbol: PTPRC
  Gene Name: protein tyrosine phosphatase, receptor type, C
  ENST ID: ENST00000575923
  CDS Start-End: 169-1540
gaagttagtaaaaccgaatctgacatcatcacctagcagttcatgcagctagcaagtggtttgttcttagggtaacagaggaggaaattgttcctcgtctgataagacaacagtggagaaaggacgcatgctgtttcttagggacacggctgacttccagatatgaccatgtatttgtggcttaaactcttggcatttggctttgcctttctggacacagaagtatttgtgacagggcaaagcccaacaccttcccccactggtgtttcatcagtacagacgcctcaccttcccacgcacgcagactcgcagacgccctctgctggaactgacacgcagacattcagcggctccgccgccaatgcaaaactcaaccctaccccaggcagcaatgctatctcagatgcctaccttaatgcctctgaaacaaccactctgagcccttctggaagcgctgtcatttcaaccacaacaatagctactactccatctaagccaacatgtgatgaaaaatatgcaaacatcactgtggattacttatataacaaggaaactaaattatttacagcaaagctaaatgttaatgagaatgtggaatgtggaaacaatacttgcacaaacaatgaggtgcataaccttacagaatgtaaaaatgcgtctgtttccatatctcataattcatgtactgctcctgataagacattaatattagatgtgccaccaggggttgaaaagtttcagttacatgattgtacacaagttgaaaaagcagatactactatttgtttaaaatggaaaaatattgaaacctttacttgtgatacacagaatattacctacagatttcagtgtggtaatatgatatttgataataaagaaattaaattagaaaaccttgaacccgaacatgagtataagtgtgactcagaaatactctataataaccacaagtttactaacgcaagtaaaattattaaaacagattttgggagtccaggagagcctcagattattttttgtagaagtgaagctgcacatcaaggagtaattacctggaatccccctcaaagatcatttcataattttaccctctgttatataaaagagacagaaaaagattgcctcaatctggataaaaacctgatcaaatatgatttgcaaaatttaaaaccttatacgaaatatgttttatcattacatgcctacatcattgcaaaagtgcaacgtaatggaagtgctgcaatgtgtcatttcacaactaaaagtgctcctccaagccaggtctggaacatgactgtctccatgacatcagataatagtatgcatgtcaagtgtaggcctcccagggaccgtaatggcccccatgaacgttaccatttggaagttgaagctggaaatactctggttagaaatgagtcgcataagaattgcgatttccgtgtaaaagatcttcaatattcaacagactacacttttaaggcctattttcacaatggagactatcctggagaaccctttattttacatcattcaacatctt

SEQ ID NO: 171751 - DNA, 462 bp, Homo sapiens; identical to SEQ ID NO: 171740
  Payload ID: 13757
  Gene Symbol: PTPRC
  Gene Name: protein tyrosine phosphatase, receptor type, C
  ENST ID: ENST00000573971
  CDS Start-End: 114-462

SEQ ID NO: 171752 - DNA, 2336 bp, Homo sapiens
  Payload ID: 13757
  Gene Symbol: PTPRC
  Gene Name: protein tyrosine phosphatase, receptor type, C
  ENST ID: ENST00000529828
  CDS Start-End: 78-2336
aattgttcctcgtctgataagacaacagtggagaaaggacgcatgctgtttcttagggacacggctgacttccagatatgaccatgtatttgtggcttaaactcttggcatttggctttgcctttctggacacagaagtatttgtgacagggcaaagcccaacaccttcccccactggattgactacagcaaagatgcccagtgttccactttcaagtgaccccttacctactcacaccactgcattctcacccgcaagcacctttgaaagagaaaatgacttctcagagaccacaacttctcttagtccagacaatacttccacccaagtatccccggactctttggataatgctagtgcttttaataccacaggtgtttcatcagtacagacgcctcaccttcccacgcacgcagactcgcagacgccctctgctggaactgacacgcagacattcagcggctccgccgccaatgcaaaactcaaccctaccccaggcagcaatgctatctcagatgcctaccttaatgcctctgaaacaaccactctgagcccttctggaagcgctgtcatttcaaccacaacaatagctactactccatctaagccaacatgtgatgaaaaatatgcaaacatcactgtggattacttatataacaaggaaactaaattatttacagcaaagctaaatgttaatgagaatgtggaatgtggaaacaatacttgcacaaacaatgaggtgcataaccttacagaatgtaaaaatgcgtctgtttccatatctcataattcatgtactgctcctgataagacattaatattagatgtgccaccaggggttgaaaagtttcagttacatgattgtacacaagttgaaaaagcagatactactatttgtttaaaatggaaaaatattgaaacctttacttgtgatacacagaatattacctacagatttcagtgtggtaatatgatatttgataataaagaaattaaattagaaaaccttgaacccgaacatgagtataagtgtgactcagaaatactctataataaccacaagtttactaacgcaagtaaaattattaaaacagattttgggagtccaggagagcctcagattattttttgtagaagtgaagctgcacatcaaggagtaattacctggaatccccctcaaagatcatttcataattttaccctctgttatataaaagagacagaaaaagattgcctcaatctggataaaaacctgatcaaatatgatttgcaaaatttaaaaccttatacgaaatatgttttatcattacatgcctacatcattgcaaaagtgcaacgtaatggaagtgctgcaatgtgtcatttcacaactaaaagtgctcctccaagccaggtctggaacatgactgtctccatgacatcagataatagtatgcatgtcaagtgtaggcctcccagggaccgtaatggcccccatgaacgttaccatttggaagttgaagctggaaatactctggttagaaatgagtcgcataagaattgcgatttccgtgtaaaagatcttcaatattcaacagactacacttttaaggcctattttcacaatggagactatcctggagaaccctttattttacatcattcaacatcttataattctaaggcactgatagcatttctggcatttctgattattgtgacatcaatagccctgcttgttgttctctacaaaatctatgatctacataagaaaagatcctgcaatttagatgaacagcaggagcttgttgaaagggatgatgaaaaacaactgatgaatgtggagccaatccatgcagatattttgttggaaacttataagaggaagattgctgatgaaggaagactttttctggctgaatttcagagcatcccgcgggtgttcagcaagtttcctataaaggaagctcgaaagccctttaaccagaataaaaaccgttatgttgacattcttccttatgattataaccgtgttgaactctctgagataaacggagatgcagggtcaaactacataaatgccagctatattgatggtttcaaagaacccaggaaatacattgctgcacaaggtcccagggatgaaactgttgatgatttctggaggatgatttgggaacagaaagccacagttattgtcatggtcactcgatgtgaagaaggaaacaggaacaagtgtgcagaatactggccgtcaatggaagagggcactcgggcttttggagatgttgttgtaaagatcaaccagcacaaaagatgtccagattacatcattcagaaattgaacattgtaaat

SEQ ID NO: 171753 - DNA, 1653 bp, Homo sapiens
  Payload ID: 13757
  Gene Symbol: PTPRC
  Gene Name: protein tyrosine phosphatase, receptor type, C
  ENST ID: ENST00000574441
  CDS Start-End: 84-1653
aattgttcctcgtctgataagacaacagtggagaaaggacgcatgctgtttcttagggacacggctgacttccagatatgaccatgtatttgtggcttaaactcttggcatttggctttgcctttctggacacagaagtatttgtgacagggcaaagcccaacaccttcccccactggattgactacagcaaagatgcccagtgttccactttcaagtgaccccttacctactcacaccactgcattctcacccgcaagcacctttgaaagagaaaatgacttctcagagaccacaacttctcttagtccagacaatacttccacccaagtatccccggactctttggataatgctagtgcttttaataccacaggtgtttcatcagtacagacgcctcaccttcccacgcacgcagactcgcagacgccctctgctggaactgacacgcagacattcagcggctccgccgccaatgcaaaactcaaccctaccccaggcagcaatgctatctcagatgcctaccttaatgcctctgaaacaaccactctgagcccttctggaagcgctgtcatttcaaccacaacaatagctactactccatctaagccaacatgtgatgaaaaatatgcaaacatcactgtggattacttatataacaaggaaactaaattatttacagcaaagctaaatgttaatgagaatgtggaatgtggaaacaatacttgcacaaacaatgaggtgcataaccttacagaatgtaaaaatgcgtctgtttccatatctcataattcatgtactgctcctgataagacattaatattagatgtgccaccaggggttgaaaagtttcagttacatgattgtacacaagttgaaaaagcagatactactatttgtttaaaatggaaaaatattgaaacctttacttgtgatacacagaatattacctacagatttcagtgtggtaatatgatatttgataataaagaaattaaattagaaaaccttgaacccgaacatgagtataagtgtgactcagaaatactctataataaccacaagtttactaacgcaagtaaaattattaaaacagattttgggagtccaggagagcctcagattattttttgtagaagtgaagctgcacatcaaggagtaattacctggaatccccctcaaagatcatttcataattttaccctctgttatataaaagagacagaaaaagattgcctcaatctggataaaaacctgatcaaatatgatttgcaaaatttaaaaccttatacgaaatatgttttatcattacatgcctacatcattgcaaaagtgcaacgtaatggaagtgctgcaatgtgtcatttcacaactaaaagtgctcctccaagccaggtctggaacatgactgtctccatgacatcagataatagtatgcatgtcaagtgtaggcctcccagggaccgtaatggcccccatgaacgttaccatttggaagttgaagctggaaatactctggttagaaatgagtcgcataagaattgcgatttccgtgtaaaagatcttcaatattcaacagactacacttttaaggcctattttcacaatggagactatcctggagaaccctttattttacatcattcaacatctt

SEQ ID NO: 171754 - DNA, 408 bp, Homo sapiens
  Payload ID: 13757
  Gene Symbol: PTPRC
  Gene Name: protein tyrosine phosphatase, receptor type, C
  ENST ID: ENST00000574718
  CDS Start-End: 1-275
ttaaactcttggcatttggctttgcctttctggacacagaagtatttggcaaagcccaacaccttcccccactggtgtttcatcagtacagacgcctcaccttcccacgcacgcagactcgcagacgccctctgctggaactgacacgcagacattcagcggctccgccgccaatgcaaaactcaaccctaccccaggcagcaatgctatctcagatgtcccaggagagaggagtacagccagcacctttcctacagacccagtttccccattgacaaccaccctcagccttgcacaccacagctctgctgccttacctgcacgcacctccaacaccaccatcacagcgaacacctcagatgcctaccttaatgcctctgaaacaaccactctgagcccttctggaag

SEQ ID NO: 171755 - DNA, 1292 bp, Homo sapiens
  Payload ID: 13758
  Gene Symbol: PTPRCAP
  Gene Name: protein tyrosine phosphatase, receptor type, C-associated protein
  Uniprot ID: Q14761
  ENST ID: ENST00000326294
  CDS Start-End: 449-1069
aaattctctttctaaaagccaggctgacctgctgctgcaagggtggggctgagaagtctggaaacctggagacagaggatgtcacaggagtcacacatgtgcagaaggtctgggggcagtgagcagccccacaggcattgctcccctggattgtcaggcagggaaactgaggcagaagacctgagaacacatgcaaggctgcatccagcttcaagttggtgctgcttcttccttggaggacaggcccggcagcccagcctcctccagagagactggggagggtctggtgtggaccaggggtcctgcagcagggaggggcaggtggggtatgtgggcaggaagcggaagcctgggccacccttcactgcagacgagcactgagctcacttctcgctcgacacagccagagctggaggtgggtgcccggcacggaggggcctgcggaccaatggctctgccctgcaccttagggctcgggatgctgctggccctgccaggggccttgggctcgggtggcagcgcggaggacagcgtgggctccagctctgtcaccgttgtcctgctgctgctgctgctcctactgctggccactggcctagcactggcctggcgccgcctcagccgtgactcagggggctactaccacccggcccgcctaggtgccgcgctgtggggccgcacgcggcgcctgctctgggccagccccccaggtcgctggctgcaggcccgagctgagctggggtccacagacaatgaccttgagcgacaggaggatgagcaggacacagactatgaccacgtcgcggatggtggcctgcaggctgaccctggggaaggcgagcagcaatgtggagaggcgtccagcccagagcaggtccccgtgcgggctgaggaagccagagacagtgacacggagggcgacctggtcctcggctccccaggaccagcgagcgcagggggcagtgctgaggccctgctgagtgacctgcacgcctttgctggcagcgcagcctgggatgacagcgccagggcagctgggggccagggcctccatgtcaccgcactgtagaggccggtcttggtgtcccatccctgtcacagccgctcactccccgtgcctctgcttcccaagatgccatggctggactggacccccagcccacatgaccatgcctcagactgtcaccccctaccagttcccaagtccatgtgtaccccgctcaccacgggaacggccccccccaaccacaggcatcaggcaaccatttgaaataaaactccttcagcctgtg

SEQ ID NO: 171756 - DNA, 8251 bp, Homo sapiens
  Payload ID: 13759
  Gene Symbol: PTPRD
  Gene Name: protein tyrosine phosphatase, receptor type, D
  Uniprot ID: P23468
  ENST ID: ENST00000355233
  CDS Start-End: 104-4624
gctctgaaagtgttccagctgaaatttcagatcggacagactcgctgcggctccggaggcagtgattccaagctgctcgcgcacgctgctgccaagctgcaggatggtgcacgtagccaggctgctgctgctgctcctcactttcttcctccgcacggatgctgagacacctccaaggtttacacgaacacccgttgatcagacaggggtctctggcggagttgcctctttcatctgccaagctacgggagacccaagacctaaaattgtctggaacaaaaaaggaaagaaagtcagcaatcagagatttgaggtaatagagtttgacgatgggtctggatcagttctcagaatacaacccttacggactccgagggatgaggccatttatgaatgtgtggcctcaaataatgtgggagaaataagtgtatccaccagactcacagttttgcgggaagatcaaattcccaggggcttccctaccattgacatgggcccacagttgaaggtggttgagcgtactcgcacggccaccatgctttgtgcagccagtggtaatccggatccagaaatcacttggtttaaagatttcttacctgtggacacaagcaacaacaatggtcgtattaagcagttacgatcagaatctattggtggtacaccaataagaggagcccttcagattgagcagagtgaagagtctgaccaaggaaaatatgagtgtgttgccaccaacagcgcgggcactcgctattccgctcctgccaatttatatgtcagagagctgcgagaagttcgccgtgtcccaccaagattctctatcccacccactaatcatgaaatcatgccaggcggaagcgttaatatcacctgtgtggccgtggggtcaccaatgccttatgtaaagtggatgttgggggcagaagatctgacacctgaagatgatatgccaataggaagaaatgtgctagaactgaatgatgtaagacagtcagcaaattacacctgtgttgctatgtcaacactgggtgtcattgaagcaatagcacagatcactgtcaaagccttacccaaacctccaggaactcctgtagtgaccgagagcacagctacaagcatcacactgacgtgggactctgggaaccctgagcctgtttcttattacataattcagcataaacctaaaaactctgaggaactttacaaagaaattgatggggtggcgaccacacgctacagtgtcgctggactaagtccctactcggattatgaattcagggttgttgctgtcaataacattgggcgggggcctcccagcgaacctgtgctaacacaaacctcagagcaagcaccatccagtgccccgagggatgtccaggcacgaatgttgagttcgaccaccattttggtacagtggaaggaacctgaagagccaaatggacagatccaaggatatagagtttattatacaatggatcccactcaacatgtcaacaactggatgaaacacaatgtagctgacagccaaatcactactattggcaacttagtgccccagaaaacatattctgtcaaagtcctggcttttacctcaattggagatggtcccctttcaagtgacatacaagtcatcactcagacaggagtaccagggcagccactaaacttcaaagcagaacctgagtctgaaacaagtattttgctctcttggacacctccacgttcagataccattgccaactatgaactggtctacaaagatggggagcatggagaggagcaacgaattaccattgagccagggacatcatataggctgcaaggactgaaaccaaacagcttatactatttccgtctggctgcacgctcccctcaaggcctgggtgcttctactgcagaaatatcagctagaaccatgcagtcaatgtttgcaaaaaattttcatgtcaaagcagtaatgaagacttccgtgttgctgtcttgggagattccagagaattataactccgccatgcctttcaaaattctttatgatgatgggaaaatggtagaagaagtggatggccgagccacacagaagttaattgtcaacctgaagcctgagaaatcatattcatttgtgctgacaaatcgtggaaacagtgctggtgggctgcagcacagggtcacggcaaagactgcaccagatgtattacgtaccaagcctgccttcattgggaagaccaacttggatggcatgattactgtgcaactgcctgaagtacctgcaaatgagaatataaaaggttactacataataattgtgcctttgaagaaatctcgcgggaaatttatcaagccatgggagagtccagatgaaatggaattagatgagctgcttaaggagatatctaggaagcgcagaagcatccgttatgggagagaagttgaattaaagccatatattgccgctcactttgatgtccttcccactgagttcaccctgggggatgacaagcattatggtggatttacaaacaagcaactccaaagtggtcaagaatatgtcttctttgtgttagcagtaatggaacatgcagagtctaagatgtatgcaaccagcccttactccgaccccgtggtgtcaatggatctggatccgcagccaatcacggatgaagaagaaggcttgatctgggttgtaggtcctgtccttgcagtggtctttatcatctgcattgtcattgctattcttctttataaaagcagtaaacccgacaggaagagggcagagtccgactctagaaaaagcagcataccgaacaataaggagatcccttcacaccacccaacagaccctgtagaactgaggcgccttaactttcaaacaccgggtatggctagccatcctccaatacccatcttggaacttgcagaccacattgaaagattgaaagcaaatgacaacttgaagttttcccaggaatatgagtcaattgaccctggccagcagttcacttgggaacattcaaacttggaagtaaacaaaccaaagaatagatacgcgaatgtaatcgcatatgatcattcccgggttctcctatcagctatagaagggatcccaggaagtgactatgtgaatgccaactacatagatgggtataggaagcaaaatgcctatattgcaacacagggatctctccccgaaacatttggggacttttggagaatgatatgggaacaacggagtgccacagttgtcatgatgacaaaactagaagaaagatcaagggtgaagtgtgaccagtattggcctagcagaggcacagaaacccacggactcgttcaagtaacgctgcttgatactgtggagctggccacatattgtgttcgaacatttgcactttacaagaatggttcaagtgagaagagagaagtgagacaattccagttcaccgcctggcctgatcatggtgttccagaacaccctacaccttttctagctttcttacgtagagtcaaaacctgtaaccctcccgatgctggtccgatggttgtgcactgcagtgcgggagttggccggactggttgcttcatcgtcatagatgccatgttagaaagaataaagcatgaaaaaactgtagatatttatggccatgtaactttaatgagagcccagaggaactatatggttcaaacagaagaccaatacatctttatccatgatgcactgttagaagcagtgacttgtggaaataccgaagtgccagctagaaacttgtatgcctacattcagaagctgacacaaatagaaacgggagagaatgtcacaggaatggagctcgaatttaagcgtctagccagctcaaaagctcacacctcaaggtttatcagtgccaatcttccatgtaataaattcaaaaatcgccttgttaatattatgccatatgaatccacaagggtatgcctgcagcctatccgtggagtagaaggatctgattacatcaatgccagttttattgatggatacagacaacagaaagcctacatcgctacccaggggcccttggcagagaccactgaagacttctggcggatgctctgggaacacaattccaccatagttgtgatgctcaccaagctgcgtgaaatgggcagagagaaatgtcaccaatactggccagcagaacggtctgcaagataccagtactttgttgtagatcccatggctgagtacaacatgccacagtatatcctaagggaattcaaggtcacagatgccagggacggccagtcccgaacagtaaggcagttccagttcactgactggccagagcaaggagtgccaaagtccggagaaggatttattgacttcatcggccaagtccataaaacaaaagaacagtttggccaagatggacccatttcagtccattgcagcgcgggcgttggaagaactggagtcttcataacgctaagcattgttttggaaagaatgagatatgaaggagttgtagatatcttccagactgtcaaaatgttaagaacacaacgaccagctatggtacagacagaggatcaatatcagttttcctatcgtgccgcactagagtacctgggcagctttgaccactatgcaacgtagaaacccctgacccattctggatttttactacaggcccttcaatatccatggagtctcttctgagccatacagggcacttgagaagtccttcttaacttctagctaacaactacttagtgggactattacacacaaaacaaattaaaaacaaattattccaggtggaccaagaattcacagtttaataatctaacctgaaaaataatgaagagaatcctgactgatgaggcatctgaaggattttatttacagatacctcaaggattcaaaatcaagggaagaagaaatcacagcaaagaaccaccatcttattcaggattgcttgaaaggtgcaaggagaaattgccagaatgctgcagttcagcacaagatatgtgctggtgtggcttctcacaatgaaacggactctgctttgacatcgccccttcccaccatactgctcataataacattttagggggaaaggggagggaatgtttaaaaagaaagtccttgatttagttttttagtattgtaaagatactgctgacctgtgcttcatttctaactgtgtaaacttttttttaacaaaatgtatcattcgataaagtgaattttaaaaaagttacataactcttcatttttttatttccaaatcgtaggtttttttaagctgtagaactgttatctgtaatatcttgctgtagaaatatcaaatcatttgaaaatttgcacatttttgtgcaaaactcaatctacagtatcagtctcgtcagatatattaattttacacttcagttttgattggtgagaaagtacccattctcttcaaataatcaaagataattattattttgttttgtttttggaatcaacagggaggcgcaaagtataaagttgctgctaacatatatacatatatatccatattttataagggtgtctatgtatatatagacagtgtgtccacacaaaaaatagatacagttatcagtcagtcagttcttccatgatttagtttttttaaacgtagaaaagctattgtaaacatctctttccatttattcttaattttttgacatattggtatttctttaaagggaaatgaggaatgcacatcagtgattgattgtcaaacctcaccccctgatttcctacctaatctacccccacctaaccaatcaatcacatccacaaattgttttgtttgtttgttagtcaggcttccaacaaagttcaatatttctaacactctagtgcaataaaaattattattaaatagctaagaggtgtgcatgtgggaaaggtcagtgcatatccctttaggaggggagaatgttgtaatatatcagctatcgagttgtttaaaaaaagtgtattcaatcgtatattgtctatagtatgtgctatgaaatttgcatttatgatatgtaacaggggcaaagccaaattcatgttactctgttcagtcagaaacattttgtggcatacagcattcctgggaagtgctgtactttgtttcgttttggttttagttttgcatttagagtgccttataattgatgcctattttaatagcatttctttttagcttttggttcgtatttccattcactgttcgtatctgttactttctattaaagcattatctgtttaccacatgtacaaaaactctttgaataatatgcattcctagttttcagccaagtcggggatgttagtgattgtaccagcccaaagcacttggataatcagggcccttcttccttttataatcaatcatcaacatcagaaaaagctacttgttttatttatattcccttccaaatccgctctggaacatgcagtaactgcaccaaacttattttagtaacaaatatcattggcaactttggaatatatttgatattccattaggatttttctaaaaggggaaataaactatatatatatatgtatcttacccccaattcttccaacagaatttctataggaagccatggatgatggcataagtttgccacatattacatgattttaaataatcctcaaaatacccaaggaactcttaaagagttttggtatgagtatactactttggtttaattttagcttcatggatgttctgcatggaaggatttttgttttccacattttcccattgctagcagagtgaaatccaagagaccaaacatttgcaagcattgtatttgagcacttttgtaaaaaacaaagaaaaagaaaaaaaagaaaatatatataatactaaaaaaaagtatctagaaggctacctcagaatgagactctctaacctacatcagaaccagagaagaatgtgcactatgtgggtctgttatcattattttcttttagtttgtatctttttggagatttatccaagtgccagattactcagtgctataattttcttttagttaaacaaagggggtcagacagacattgcatcatccagacatgccttgttggacatgtagaatccgatggagcactgcacaccagaatgattggccaatgagcagcttctctccctgaaacaataactgcccatttggcaaagggaaagatgacaataatcagaagaagaaaatgaatgggatgcataccatagacgaacgaggcggagactattgcgggaatcttactgttcaggagctgttcctagaactaactcccttactgtcattgatgtgcattccactctgtgcttttctgtacaaccattcaagttttaatttcccaggtgaaccatctttatctgccattaccacaagctttcaagtttccagttattttcatcatcataaccagtacggtgctattatttacctatgtacgtgtagttatgtataattttgtaattagttacaatggtaaaaaaaatcaaaatatataaaaagtgatttgtacagaactttattttagctcttttttaaaaatgatttgcatggttagaaaacggcgaggacagccaggggagggaagggcctctagggaactttgcactttctatacctttgtactatgcactgccctattgattctacacccaataatgatattacttgaacccatctgtaagaaactgcttcggaaattcatttgtgtgtatgtaaataacacaacatagaaacaggaagggaaaaaagtctgcagtaatgcacgtattttttttctttcctgtttattttcggttttgctttaagtccttttatttttaattccctttttgtttttctttttgggttttggttccttttgggtttatgggtgccctgatactccagcagagatcagaaggctacagatccattctatccatccgttatgtggctttgccatcccagcttggagtgtctttacaaagataataacagttgtgttctttgctctcgttttggatgcatagactgaaaaattaaaacaaataacttgtaaaatggcttgttaaaaaatacaattacctctaattagtagtacgcgtaaatgttttacagaatgaaaggcgtgctttttattttcttacttcgttacattggtggcgaaagaagtctgtatgaaaatcagttctttgctgacacaagttccatttgttacaaatgaattctaataaaaatgtcagtgttatgc

SEQ ID NO: 171757 - DNA, 9472 bp, Homo sapiens
  Payload ID: 13759
  Gene Symbol: PTPRD
  Gene Name: protein tyrosine phosphatase, receptor type, D
  Uniprot ID: P23468
  ENST ID: ENST00000356435
  CDS Start-End: 107-5845
caggctctgaaagtgttccagctgaaatttcagatcggacagactcgctgcggctccggaggcagtgattccaagctgctcgcgcacgctgctgccaagctgcaggatggtgcacgtagccaggctgctgctgctgctcctcactttcttcctccgcacggatgctgagacacctccaaggtttacacgaacacccgttgatcagacaggggtctctggcggagttgcctctttcatctgccaagctacgggagacccaagacctaaaattgtctggaacaaaaaaggaaagaaagtcagcaatcagagatttgaggtaatagagtttgacgatgggtctggatcagttctcagaatacaacccttacggactccgagggatgaggccatttatgaatgtgtggcctcaaataatgtgggagaaataagtgtatccaccagactcacagttttgcgggaagatcaaattcccaggggcttccctaccattgacatgggcccacagttgaaggtggttgagcgtactcgcacggccaccatgctttgtgcagccagtggtaatccggatccagaaatcacttggtttaaagatttcttacctgtggacacaagcaacaacaatggtcgtattaagcagttacgatcagaatctattggtggtacaccaataagaggagcccttcagattgagcagagtgaagagtctgaccaaggaaaatatgagtgtgttgccaccaacagcgcgggcactcgctattccgctcctgccaatttatatgtcagagagctgcgagaagttcgccgtgtcccaccaagattctctatcccacccactaatcatgaaatcatgccaggcggaagcgttaatatcacctgtgtggccgtggggtcaccaatgccttatgtaaagtggatgttgggggcagaagatctgacacctgaagatgatatgccaataggaagaaatgtgctagaactgaatgatgtaagacagtcagcaaattacacctgtgttgctatgtcaacactgggtgtcattgaagcaatagcacagatcactgtcaaagccttacccaaacctccaggaactcctgtagtgaccgagagcacagctacaagcatcacactgacgtgggactctgggaaccctgagcctgtttcttattacataattcagcataaacctaaaaactctgaggaactttacaaagaaattgatggggtggcgaccacacgctacagtgtcgctggactaagtccctactcggattatgaattcagggttgttgctgtcaataacattgggcgggggcctcccagcgaacctgtgctaacacaaacctcagagcaagcaccatccagtgccccgagggatgtccaggcacgaatgttgagttcgaccaccattttggtacagtggaaggaacctgaagagccaaatggacagatccaaggatatagagtttattatacaatggatcccactcaacatgtcaacaactggatgaaacacaatgtagctgacagccaaatcactactattggcaacttagtgccccagaaaacatattctgtcaaagtcctggcttttacctcaattggagatggtcccctttcaagtgacatacaagtcatcactcagacaggagtaccagggcagccactaaacttcaaagcagaacctgagtctgaaacaagtattttgctctcttggacacctccacgttcagataccattgccaactatgaactggtctacaaagatggggagcatggagaggagcaacgaattaccattgagccagggacatcatataggctgcaaggactgaaaccaaacagcttatactatttccgtctggctgcacgctcccctcaaggcctgggtgcttctactgcagaaatatcagctagaaccatgcagtcaaagccgtcagctcctcctcaagacattagttgcaccagcccaagttccactagtattttggtaagttggcaacctccaccagtggaaaaacagaatggcattatcactgaatactccatcaagtacactgcagtggatggggaagatgacaagcctcacgagattttgggaattccttcggacactaccaaataccttttggaacagctggaaaaatggactgaataccggatcactgtgacagcccatacagatgtcggccctggccctgagagcttgtccgtgttgattcgaaccaatgaagatgttcctagtggtcctcctcgcaaagtcgaggtagaggctgtcaactcaacatctgttaaagtctcatggcgctcacccgtgcccaataaacagcatggccagataagaggatatcaggtgcattatgtgaggatggaaaatggtgagcccaagggccagcccatgctgaaagatgtcatgctggctgatgcacagtgggaatttgatgatactactgaacatgacatgatcatttctgggctccagcctgaaacttcctactccctcaccgtcacagcctacacaaccaaaggagatggtgctcgcagcaagcccaaactggtgtccaccactggggcagttccagggaaacctcggcttgtgattaaccacactcagatgaatactgctcttattcagtggcaccctccggtggacacatttggacctcttcagggctaccgtctaaaatttggccgcaaggatatggagccacttactactcttgagttctctgaaaaagaagatcactttacagctacagacatccacaagggagcatcatacgtcttcaggctctcagccagaaacaaagtgggctttggggaggagatggtgaaggagatttccattccagaagaagtaccaactggattccctcaaaaccttcactcagaaggcaccacttcaacctccgtccagttatcttggcaaccacctgtcctggcagagagaaatggcattatcaccaagtatacccttctttatagggatatcaacatcccccttctcccgatggagcagcttattgttccagctgacaccactatgacactcactggcttaaaaccagataccacatacgatgtaaaagtacgtgctcatacgagcaaagggcccgggccatatagtcccagtgtccagttcaggacactgcctgtggatcaagtgtttgcaaaaaattttcatgtcaaagcagtaatgaagacttccgtgttgctgtcttgggagattccagagaattataactccgccatgcctttcaaaattctttatgatgatgggaaaatggtagaagaagtggatggccgagccacacagaagttaattgtcaacctgaagcctgagaaatcatattcatttgtgctgacaaatcgtggaaacagtgctggtgggctgcagcacagggtcacggcaaagactgcaccagatgtattacgtaccaagcctgccttcattgggaagaccaacttggatggcatgattactgtgcaactgcctgaagtacctgcaaatgagaatataaaaggttactacataataattgtgcctttgaagaaatctcgcgggaaatttatcaagccatgggagagtccagatgaaatggaattagatgagctgcttaaggagatatctaggaagcgcagaagcatccgttatgggagagaagttgaattaaagccatatattgccgctcactttgatgtccttcccactgagttcaccctgggggatgacaagcattatggtggatttacaaacaagcaactccaaagtggtcaagaatatgtcttctttgtgttagcagtaatggaacatgcagagtctaagatgtatgcaaccagcccttactccgaccccgtggtgtcaatggatctggatccgcagccaatcacggatgaagaagaaggcttgatctgggttgtaggtcctgtccttgcagtggtctttatcatctgcattgtcattgctattcttctttataaaaggaagagggcagagtccgactctagaaaaagcagcataccgaacaataaggagatcccttcacaccacccaacagaccctgtagaactgaggcgccttaactttcaaacaccgggtatggctagccatcctccaatacccatcttggaacttgcagaccacattgaaagattgaaagcaaatgacaacttgaagttttcccaggaatatgagtcaattgaccctggccagcagttcacttgggaacattcaaacttggaagtaaacaaaccaaagaatagatacgcgaatgtaatcgcatatgatcattcccgggttctcctatcagctatagaagggatcccaggaagtgactatgtgaatgccaactacatagatgggtataggaagcaaaatgcctatattgcaacacagggatctctccccgaaacatttggggacttttggagaatgatatgggaacaacggagtgccacagttgtcatgatgacaaaactagaagaaagatcaagggtgaagtgtgaccagtattggcctagcagaggcacagaaacccacggactcgttcaagtaacgctgcttgatactgtggagctggccacatattgtgttcgaacatttgcactttacaagaatggttcaagtgagaagagagaagtgagacaattccagttcaccgcctggcctgatcatggtgttccagaacaccctacaccttttctagctttcttacgtagagtcaaaacctgtaaccctcccgatgctggtccgatggttgtgcactgcagtgcgggagttggccggactggttgcttcatcgtcatagatgccatgttagaaagaataaagcatgaaaaaactgtagatatttatggccatgtaactttaatgagagcccagaggaactatatggttcaaacagaagaccaatacatctttatccatgatgcactgttagaagcagtgacttgtggaaataccgaagtgccagctagaaacttgtatgcctacattcagaagctgacacaaatagaaacgggagagaatgtcacaggaatggagctcgaatttaagcgtctagccagctcaaaagctcacacctcaaggtttatcagtgccaatcttccatgtaataaattcaaaaatcgccttgttaatattatgccatatgaatccacaagggtatgcctgcagcctatccgtggagtagaaggatctgattacatcaatgccagttttattgatggatacagacaacagaaagcctacatcgctacccaggggcccttggcagagaccactgaagacttctggcggatgctctgggaacacaattccaccatagttgtgatgctcaccaagctgcgtgaaatgggcagagagaaatgtcaccaatactggccagcagaacggtctgcaagataccagtactttgttgtagatcccatggctgagtacaacatgccacagtatatcctaagggaattcaaggtcacagatgccagggacggccagtcccgaacagtaaggcagttccagttcactgactggccagagcaaggagtgccaaagtccggagaaggatttattgacttcatcggccaagtccataaaacaaaagaacagtttggccaagatggacccatttcagtccattgcagcgcgggcgttggaagaactggagtcttcataacgctaagcattgttttggaaagaatgagatatgaaggagttgtagatatcttccagactgtcaaaatgttaagaacacaacgaccagctatggtacagacagaggatcaatatcagttttcctatcgtgccgcactagagtacctgggcagctttgaccactatgcaacgtagaaacccctgacccattctggatttttactacaggcccttcaatatccatggagtctcttctgagccatacagggcacttgagaagtccttcttaacttctagctaacaactacttagtgggactattacacacaaaacaaattaaaaacaaattattccaggtggaccaagaattcacagtttaataatctaacctgaaaaataatgaagagaatcctgactgatgaggcatctgaaggattttatttacagatacctcaaggattcaaaatcaagggaagaagaaatcacagcaaagaaccaccatcttattcaggattgcttgaaaggtgcaaggagaaattgccagaatgctgcagttcagcacaagatatgtgctggtgtggcttctcacaatgaaacggactctgctttgacatcgccccttcccaccatactgctcataataacattttagggggaaaggggagggaatgtttaaaaagaaagtccttgatttagttttttagtattgtaaagatactgctgacctgtgcttcatttctaactgtgtaaacttttttttaacaaaatgtatcattcgataaagtgaattttaaaaaagttacataactcttcatttttttatttccaaatcgtaggtttttttaagctgtagaactgttatctgtaatatcttgctgtagaaatatcaaatcatttgaaaatttgcacatttttgtgcaaaactcaatctacagtatcagtctcgtcagatatattaattttacacttcagttttgattggtgagaaagtacccattctcttcaaataatcaaagataattattattttgttttgtttttggaatcaacagggaggcgcaaagtataaagttgctgctaacatatatacatatatatccatattttataagggtgtctatgtatatatagacagtgtgtccacacaaaaaatagatacagttatcagtcagtcagttcttccatgatttagtttttttaaacgtagaaaagctattgtaaacatctctttccatttattcttaattttttgacatattggtatttctttaaagggaaatgaggaatgcacatcagtgattgattgtcaaacctcaccccctgatttcctacctaatctacccccacctaaccaatcaatcacatccacaaattgttttgtttgtttgttagtcaggcttccaacaaagttcaatatttctaacactctagtgcaataaaaattattattaaatagctaagaggtgtgcatgtgggaaaggtcagtgcatatccctttaggaggggagaatgttgtaatatatcagctatcgagttgtttaaaaaaagtgtattcaatcgtatattgtctatagtatgtgctatgaaatttgcatttatgatatgtaacaggggcaaagccaaattcatgttactctgttcagtcagaaacattttgtggcatacagcattcctgggaagtgctgtactttgtttcgttttggttttagttttgcatttagagtgccttataattgatgcctattttaatagcatttctttttagcttttggttcgtatttccattcactgttcgtatctgttactttctattaaagcattatctgtttaccacatgtacaaaaactctttgaataatatgcattcctagttttcagccaagtcggggatgttagtgattgtaccagcccaaagcacttggataatcagggcccttcttccttttataatcaatcatcaacatcagaaaaagctacttgttttatttatattcccttccaaatccgctctggaacatgcagtaactgcaccaaacttattttagtaacaaatatcattggcaactttggaatatatttgatattccattaggatttttctaaaaggggaaataaactatatatatatatgtatcttacccccaattcttccaacagaatttctataggaagccatggatgatggcataagtttgccacatattacatgattttaaataatcctcaaaatacccaaggaactcttaaagagttttggtatgagtatactactttggtttaattttagcttcatggatgttctgcatggaaggatttttgttttccacattttcccattgctagcagagtgaaatccaagagaccaaacatttgcaagcattgtatttgagcacttttgtaaaaaacaaagaaaaagaaaaaaaagaaaatatatataatactaaaaaaaagtatctagaaggctacctcagaatgagactctctaacctacatcagaaccagagaagaatgtgcactatgtgggtctgttatcattattttcttttagtttgtatctttttggagatttatccaagtgccagattactcagtgctataattttcttttagttaaacaaagggggtcagacagacattgcatcatccagacatgccttgttggacatgtagaatccgatggagcactgcacaccagaatgattggccaatgagcagcttctctccctgaaacaataactgcccatttggcaaagggaaagatgacaataatcagaagaagaaaatgaatgggatgcataccatagacgaacgaggcggagactattgcgggaatcttactgttcaggagctgttcctagaactaactcccttactgtcattgatgtgcattccactctgtgcttttctgtacaaccattcaagttttaatttcccaggtgaaccatctttatctgccattaccacaagctttcaagtttccagttattttcatcatcataaccagtacggtgctattatttacctatgtacgtgtagttatgtataattttgtaattagttacaatggtaaaaaaaatcaaaatatataaaaagtgatttgtacagaactttattttagctcttttttaaaaatgatttgcatggttagaaaacggcgaggacagccaggggagggaagggcctctagggaactttgcactttctatacctttgtactatgcactgccctattgattctacacccaataatgatattacttgaacccatctgtaagaaactgcttcggaaattcatttgtgtgtatgtaaataacacaacatagaaacaggaagggaaaaaagtctgcagtaatgcacgtattttttttctttcctgtttattttcggttttgctttaagtccttttatttttaattccctttttgtttttctttttgggttttggttccttttgggtttatgggtgccctgatactccagcagagatcagaaggctacagatccattctatccatccgttatgtggctttgccatcccagcttggagtgtctttacaaagataataacagttgtgttctttgctctcgttttggatgcatagactgaaaaattaaaacaaataacttgtaaaatggcttgttaaaaaatacaattacctctaattagtagtacgcgtaaatgttttacagaatgaaaggcgtgctttttattttcttacttcgttacattggtggcgaaagaagtctgtatgaaaatcagttctttgctgacacaagttccatttgttacaaatgaattctaataaaaatgtcagtgttatgc

SEQ ID NO: 171758 - DNA, 9911 bp, Homo sapiens
  Payload ID: 13759
  Gene Symbol: PTPRD
  Gene Name: protein tyrosine phosphatase, receptor type, D
  Uniprot ID: P23468
  ENST ID: ENST00000381196
  CDS Start-End: 545-6283
ggaaatcttgaggagtctgatacttttcatcctccagctataaaatcatcttgtagggggaagctgtacattggtggaaaataaaaggcaagcagttcctggcccgtgatattccagttagaggtgtctgactgacagcatgttggcaccgagggaagcgatgggcttcggctccaggtttctgtcctgagaccacagcagaatgtgccttggacaaaggcttggactccttgatcttctggtaacttcaaaaatctggtctcagggtggtgaactttttcttcgaattcctaacctgtgagcttacgatgatggtgcctgtccattaactgaacaactgtggttttgaacttcttgaggccagggactgtgtctgaaaacaccgacggtggctaactcaagggagacgtctggtgaacacccgtgggatctaaagaacaagctctgaaagtgttccagctgaaatttcagatcggacagactcgctgcggctccggaggcagtgattccaagctgctcgcgcacgctgctgccaagctgcaggatggtgcacgtagccaggctgctgctgctgctcctcactttcttcctccgcacggatgctgagacacctccaaggtttacacgaacacccgttgatcagacaggggtctctggcggagttgcctctttcatctgccaagctacgggagacccaagacctaaaattgtctggaacaaaaaaggaaagaaagtcagcaatcagagatttgaggtaatagagtttgacgatgggtctggatcagttctcagaatacaacccttacggactccgagggatgaggccatttatgaatgtgtggcctcaaataatgtgggagaaataagtgtatccaccagactcacagttttgcgggaagatcaaattcccaggggcttccctaccattgacatgggcccacagttgaaggtggttgagcgtactcgcacggccaccatgctttgtgcagccagtggtaatccggatccagaaatcacttggtttaaagatttcttacctgtggacacaagcaacaacaatggtcgtattaagcagttacgatcagaatctattggtggtacaccaataagaggagcccttcagattgagcagagtgaagagtctgaccaaggaaaatatgagtgtgttgccaccaacagcgcgggcactcgctattccgctcctgccaatttatatgtcagagagctgcgagaagttcgccgtgtcccaccaagattctctatcccacccactaatcatgaaatcatgccaggcggaagcgttaatatcacctgtgtggccgtggggtcaccaatgccttatgtaaagtggatgttgggggcagaagatctgacacctgaagatgatatgccaataggaagaaatgtgctagaactgaatgatgtaagacagtcagcaaattacacctgtgttgctatgtcaacactgggtgtcattgaagcaatagcacagatcactgtcaaagccttacccaaacctccaggaactcctgtagtgaccgagagcacagctacaagcatcacactgacgtgggactctgggaaccctgagcctgtttcttattacataattcagcataaacctaaaaactctgaggaactttacaaagaaattgatggggtggcgaccacacgctacagtgtcgctggactaagtccctactcggattatgaattcagggttgttgctgtcaataacattgggcgggggcctcccagcgaacctgtgctaacacaaacctcagagcaagcaccatccagtgccccgagggatgtccaggcacgaatgttgagttcgaccaccattttggtacagtggaaggaacctgaagagccaaatggacagatccaaggatatagagtttattatacaatggatcccactcaacatgtcaacaactggatgaaacacaatgtagctgacagccaaatcactactattggcaacttagtgccccagaaaacatattctgtcaaagtcctggcttttacctcaattggagatggtcccctttcaagtgacatacaagtcatcactcagacaggagtaccagggcagccactaaacttcaaagcagaacctgagtctgaaacaagtattttgctctcttggacacctccacgttcagataccattgccaactatgaactggtctacaaagatggggagcatggagaggagcaacgaattaccattgagccagggacatcatataggctgcaaggactgaaaccaaacagcttatactatttccgtctggctgcacgctcccctcaaggcctgggtgcttctactgcagaaatatcagctagaaccatgcagtcaaagccgtcagctcctcctcaagacattagttgcaccagcccaagttccactagtattttggtaagttggcaacctccaccagtggaaaaacagaatggcattatcactgaatactccatcaagtacactgcagtggatggggaagatgacaagcctcacgagattttgggaattccttcggacactaccaaataccttttggaacagctggaaaaatggactgaataccggatcactgtgacagcccatacagatgtcggccctggccctgagagcttgtccgtgttgattcgaaccaatgaagatgttcctagtggtcctcctcgcaaagtcgaggtagaggctgtcaactcaacatctgttaaagtctcatggcgctcacccgtgcccaataaacagcatggccagataagaggatatcaggtgcattatgtgaggatggaaaatggtgagcccaagggccagcccatgctgaaagatgtcatgctggctgatgcacagtgggaatttgatgatactactgaacatgacatgatcatttctgggctccagcctgaaacttcctactccctcaccgtcacagcctacacaaccaaaggagatggtgctcgcagcaagcccaaactggtgtccaccactggggcagttccagggaaacctcggcttgtgattaaccacactcagatgaatactgctcttattcagtggcaccctccggtggacacatttggacctcttcagggctaccgtctaaaatttggccgcaaggatatggagccacttactactcttgagttctctgaaaaagaagatcactttacagctacagacatccacaagggagcatcatacgtcttcaggctctcagccagaaacaaagtgggctttggggaggagatggtgaaggagatttccattccagaagaagtaccaactggattccctcaaaaccttcactcagaaggcaccacttcaacctccgtccagttatcttggcaaccacctgtcctggcagagagaaatggcattatcaccaagtatacccttctttatagggatatcaacatcccccttctcccgatggagcagcttattgttccagctgacaccactatgacactcactggcttaaaaccagataccacatacgatgtaaaagtacgtgctcatacgagcaaagggcccgggccatatagtcccagtgtccagttcaggacactgcctgtggatcaagtgtttgcaaaaaattttcatgtcaaagcagtaatgaagacttccgtgttgctgtcttgggagattccagagaattataactccgccatgcctttcaaaattctttatgatgatgggaaaatggtagaagaagtggatggccgagccacacagaagttaattgtcaacctgaagcctgagaaatcatattcatttgtgctgacaaatcgtggaaacagtgctggtgggctgcagcacagggtcacggcaaagactgcaccagatgtattacgtaccaagcctgccttcattgggaagaccaacttggatggcatgattactgtgcaactgcctgaagtacctgcaaatgagaatataaaaggttactacataataattgtgcctttgaagaaatctcgcgggaaatttatcaagccatgggagagtccagatgaaatggaattagatgagctgcttaaggagatatctaggaagcgcagaagcatccgttatgggagagaagttgaattaaagccatatattgccgctcactttgatgtccttcccactgagttcaccctgggggatgacaagcattatggtggatttacaaacaagcaactccaaagtggtcaagaatatgtcttctttgtgttagcagtaatggaacatgcagagtctaagatgtatgcaaccagcccttactccgaccccgtggtgtcaatggatctggatccgcagccaatcacggatgaagaagaaggcttgatctgggttgtaggtcctgtccttgcagtggtctttatcatctgcattgtcattgctattcttctttataaaaggaagagggcagagtccgactctagaaaaagcagcataccgaacaataaggagatcccttcacaccacccaacagaccctgtagaactgaggcgccttaactttcaaacaccgggtatggctagccatcctccaatacccatcttggaacttgcagaccacattgaaagattgaaagcaaatgacaacttgaagttttcccaggaatatgagtcaattgaccctggccagcagttcacttgggaacattcaaacttggaagtaaacaaaccaaagaatagatacgcgaatgtaatcgcatatgatcattcccgggttctcctatcagctatagaagggatcccaggaagtgactatgtgaatgccaactacatagatgggtataggaagcaaaatgcctatattgcaacacagggatctctccccgaaacatttggggacttttggagaatgatatgggaacaacggagtgccacagttgtcatgatgacaaaactagaagaaagatcaagggtgaagtgtgaccagtattggcctagcagaggcacagaaacccacggactcgttcaagtaacgctgcttgatactgtggagctggccacatattgtgttcgaacatttgcactttacaagaatggttcaagtgagaagagagaagtgagacaattccagttcaccgcctggcctgatcatggtgttccagaacaccctacaccttttctagctttcttacgtagagtcaaaacctgtaaccctcccgatgctggtccgatggttgtgcactgcagtgcgggagttggccggactggttgcttcatcgtcatagatgccatgttagaaagaataaagcatgaaaaaactgtagatatttatggccatgtaactttaatgagagcccagaggaactatatggttcaaacagaagaccaatacatctttatccatgatgcactgttagaagcagtgacttgtggaaataccgaagtgccagctagaaacttgtatgcctacattcagaagctgacacaaatagaaacgggagagaatgtcacaggaatggagctcgaatttaagcgtctagccagctcaaaagctcacacctcaaggtttatcagtgccaatcttccatgtaataaattcaaaaatcgccttgttaatattatgccatatgaatccacaagggtatgcctgcagcctatccgtggagtagaaggatctgattacatcaatgccagttttattgatggatacagacaacagaaagcctacatcgctacccaggggcccttggcagagaccactgaagacttctggcggatgctctgggaacacaattccaccatagttgtgatgctcaccaagctgcgtgaaatgggcagagagaaatgtcaccaatactggccagcagaacggtctgcaagataccagtactttgttgtagatcccatggctgagtacaacatgccacagtatatcctaagggaattcaaggtcacagatgccagggacggccagtcccgaacagtaaggcagttccagttcactgactggccagagcaaggagtgccaaagtccggagaaggatttattgacttcatcggccaagtccataaaacaaaagaacagtttggccaagatggacccatttcagtccattgcagcgcgggcgttggaagaactggagtcttcataacgctaagcattgttttggaaagaatgagatatgaaggagttgtagatatcttccagactgtcaaaatgttaagaacacaacgaccagctatggtacagacagaggatcaatatcagttttcctatcgtgccgcactagagtacctgggcagctttgaccactatgcaacgtagaaacccctgacccattctggatttttactacaggcccttcaatatccatggagtctcttctgagccatacagggcacttgagaagtccttcttaacttctagctaacaactacttagtgggactattacacacaaaacaaattaaaaacaaattattccaggtggaccaagaattcacagtttaataatctaacctgaaaaataatgaagagaatcctgactgatgaggcatctgaaggattttatttacagatacctcaaggattcaaaatcaagggaagaagaaatcacagcaaagaaccaccatcttattcaggattgcttgaaaggtgcaaggagaaattgccagaatgctgcagttcagcacaagatatgtgctggtgtggcttctcacaatgaaacggactctgctttgacatcgccccttcccaccatactgctcataataacattttagggggaaaggggagggaatgtttaaaaagaaagtccttgatttagttttttagtattgtaaagatactgctgacctgtgcttcatttctaactgtgtaaacttttttttaacaaaatgtatcattcgataaagtgaattttaaaaaagttacataactcttcatttttttatttccaaatcgtaggtttttttaagctgtagaactgttatctgtaatatcttgctgtagaaatatcaaatcatttgaaaatttgcacatttttgtgcaaaactcaatctacagtatcagtctcgtcagatatattaattttacacttcagttttgattggtgagaaagtacccattctcttcaaataatcaaagataattattattttgttttgtttttggaatcaacagggaggcgcaaagtataaagttgctgctaacatatatacatatatatccatattttataagggtgtctatgtatatatagacagtgtgtccacacaaaaaatagatacagttatcagtcagtcagttcttccatgatttagtttttttaaacgtagaaaagctattgtaaacatctctttccatttattcttaattttttgacatattggtatttctttaaagggaaatgaggaatgcacatcagtgattgattgtcaaacctcaccccctgatttcctacctaatctacccccacctaaccaatcaatcacatccacaaattgttttgtttgtttgttagtcaggcttccaacaaagttcaatatttctaacactctagtgcaataaaaattattattaaatagctaagaggtgtgcatgtgggaaaggtcagtgcatatccctttaggaggggagaatgttgtaatatatcagctatcgagttgtttaaaaaaagtgtattcaatcgtatattgtctatagtatgtgctatgaaatttgcatttatgatatgtaacaggggcaaagccaaattcatgttactctgttcagtcagaaacattttgtggcatacagcattcctgggaagtgctgtactttgtttcgttttggttttagttttgcatttagagtgccttataattgatgcctattttaatagcatttctttttagcttttggttcgtatttccattcactgttcgtatctgttactttctattaaagcattatctgtttaccacatgtacaaaaactctttgaataatatgcattcctagttttcagccaagtcggggatgttagtgattgtaccagcccaaagcacttggataatcagggcccttcttccttttataatcaatcatcaacatcagaaaaagctacttgttttatttatattcccttccaaatccgctctggaacatgcagtaactgcaccaaacttattttagtaacaaatatcattggcaactttggaatatatttgatattccattaggatttttctaaaaggggaaataaactatatatatatatgtatcttacccccaattcttccaacagaatttctataggaagccatggatgatggcataagtttgccacatattacatgattttaaataatcctcaaaatacccaaggaactcttaaagagttttggtatgagtatactactttggtttaattttagcttcatggatgttctgcatggaaggatttttgttttccacattttcccattgctagcagagtgaaatccaagagaccaaacatttgcaagcattgtatttgagcacttttgtaaaaaacaaagaaaaagaaaaaaaagaaaatatatataatactaaaaaaaagtatctagaaggctacctcagaatgagactctctaacctacatcagaaccagagaagaatgtgcactatgtgggtctgttatcattattttcttttagtttgtatctttttggagatttatccaagtgccagattactcagtgctataattttcttttagttaaacaaagggggtcagacagacattgcatcatccagacatgccttgttggacatgtagaatccgatggagcactgcacaccagaatgattggccaatgagcagcttctctccctgaaacaataactgcccatttggcaaagggaaagatgacaataatcagaagaagaaaatgaatgggatgcataccatagacgaacgaggcggagactattgcgggaatcttactgttcaggagctgttcctagaactaactcccttactgtcattgatgtgcattccactctgtgcttttctgtacaaccattcaagttttaatttcccaggtgaaccatctttatctgccattaccacaagctttcaagtttccagttattttcatcatcataaccagtacggtgctattatttacctatgtacgtgtagttatgtataattttgtaattagttacaatggtaaaaaaaatcaaaatatataaaaagtgatttgtacagaactttattttagctcttttttaaaaatgatttgcatggttagaaaacggcgaggacagccaggggagggaagggcctctagggaactttgcactttctatacctttgtactatgcactgccctattgattctacacccaataatgatattacttgaacccatctgtaagaaactgcttcggaaattcatttgtgtgtatgtaaataacacaacatagaaacaggaagggaaaaaagtctgcagtaatgcacgtattttttttctttcctgtttattttcggttttgctttaagtccttttatttttaattccctttttgtttttctttttgggttttggttccttttgggtttatgggtgccctgatactccagcagagatcagaaggctacagatccattctatccatccgttatgtggctttgccatcccagcttggagtgtctttacaaagataataacagttgtgttctttgctctcgttttggatgcatagactgaaaaattaaaacaaataacttgtaaaatggcttgttaaaaaatacaattacctctaattagtagtacgcgtaaatgttttacagaatgaaaggcgtgctttttattttcttacttcgttacattggtggcgaaagaagtctgtatgaaaatcagttctttgctgacacaagttccatttgttacaaatgaattctaataaaaatgtcagtgttatgca

SEQ ID NO: 171759 - DNA, 5038 bp, Homo sapiens
  Payload ID: 13759
  Gene Symbol: PTPRD
  Gene Name: protein tyrosine phosphatase, receptor type, D
  Uniprot ID: P23468
  ENST ID: ENST00000397606
  CDS Start-End: 52-4569
ccggaggcagtgattccaagctgctcgcgcacgctgctgccaagctgcaggatggtgcacgtagccaggctgctgctgctgctcctcactttcttcctccgcacggatgctgagacacctccaaggtttacacgaacacccgttgatcagacaggggtctctggcggagttgcctctttcatctgccaagctacgggagacccaagacctaaaattgtctggaacaaaaaaggaaagaaagtcagcaatcagagatttgaggtaatagagtttgacgatgggtctggatcagttctcagaatacaacccttacggactccgagggatgaggccatttatgaatgtgtggcctcaaataatgtgggagaaataagtgtatccaccagactcacagttttgcgggaagatcaaattcccaggggcttccctaccattgacatgggcccacagttgaaggtggttgagcgtactcgcacggccaccatgctttgtgcagccagtggtaatccggatccagaaatcacttggtttaaagatttcttacctgtggacacaagcaacaacaatggtcgtattaagcagttacgatcagaatctattggagcccttcagattgagcagagtgaagagtctgaccaaggaaaatatgagtgtgttgccaccaacagcgcgggcactcgctattccgctcctgccaatttatatgtcagagttcgccgtgtcccaccaagattctctatcccacccactaatcatgaaatcatgccaggcggaagcgttaatatcacctgtgtggccgtggggtcaccaatgccttatgtaaagtggatgttgggggcagaagatctgacacctgaagatgatatgccaataggaagaaatgtgctagaactgaatgatgtaagacagtcagcaaattacacctgtgttgctatgtcaacactgggtgtcattgaagcaatagcacagatcactgtcaaagccttacccaaacctccaggaactcctgtagtgaccgagagcacagctacaagcatcacactgacgtgggactctgggaaccctgagcctgtttcttattacataattcagcataaacctaaaaactctgaggaactttacaaagaaattgatggggtggcgaccacacgctacagtgtcgctggactaagtccctactcggattatgaattcagggttgttgctgtcaataacattgggcgggggcctcccagcgaacctgtgctaacacaaacctcagagcaagcaccatccagtgccccgagggatgtccaggcacgaatgttgagttcgaccaccattttggtacagtggaaggaacctgaagagccaaatggacagatccaaggatatagagtttattatacaatggatcccactcaacatgtcaacaactggatgaaacacaatgtagctgacagccaaatcactactattggcaacttagtgccccagaaaacatattctgtcaaagtcctggcttttacctcaattggagatggtcccctttcaagtgacatacaagtcatcactcagacaggagtaccagggcagccactaaacttcaaagcagaacctgagtctgaaacaagtattttgctctcttggacacctccacgttcagataccattgccaactatgaactggtctacaaagatggggagcatggagaggagcaacgaattaccattgagccagggacatcatataggctgcaaggactgaaaccaaacagcttatactatttccgtctggctgcacgctcccctcaaggcctgggtgcttctactgcagaaatatcagctagaaccatgcagtcaatgtttgcaaaaaattttcatgtcaaagcagtaatgaagacttccgtgttgctgtcttgggagattccagagaattataactccgccatgcctttcaaaattctttatgatgatgggaaaatggtagaagaagtggatggccgagccacacagaagttaattgtcaacctgaagcctgagaaatcatattcatttgtgctgacaaatcgtggaaacagtgctggtgggctgcagcacagggtcacggcaaagactgcaccagatgtattacgtaccaagcctgccttcattgggaagaccaacttggatggcatgattactgtgcaactgcctgaagtacctgcaaatgagaatataaaaggttactacataataattgtgcctttgaagaaatctcgcgggaaatttatcaagccatgggagagtccagatgaaatggaattagatgagctgcttaaggagatatctaggaagcgcagaagcatccgttatgggagagaagttgaattaaagccatatattgccgctcactttgatgtccttcccactgagttcaccctgggggatgacaagcattatggtggatttacaaacaagcaactccaaagtggtcaagaatatgtcttctttgtgttagcagtaatggaacatgcagagtctaagatgtatgcaaccagcccttactccgaccccgtggtgtcaatggatctggatccgcagccaatcacggatgaagaagaaggcttgatctgggttgtaggtcctgtccttgcagtggtctttatcatctgcattgtcattgctattcttctttataaaaggaagagggcagagtccgactctagaaaaagcagcataccgaacaataaggagatcccttcacaccacccaacagaccctgtagaactgaggcgccttaactttcaaacaccgggttcagatgattccggttaccctggtaaccttcattcttcaagtatggctagccatcctccaatacccatcttggaacttgcagaccacattgaaagattgaaagcaaatgacaacttgaagttttcccaggaatatgagtcaattgaccctggccagcagttcacttgggaacattcaaacttggaagtaaacaaaccaaagaatagatacgcgaatgtaatcgcatatgatcattcccgggttctcctatcagctatagaagggatcccaggaagtgactatgtgaatgccaactacatagatgggtataggaagcaaaatgcctatattgcaacacagggatctctccccgaaacatttggggacttttggagaatgatatgggaacaacggagtgccacagttgtcatgatgacaaaactagaagaaagatcaagggtgaagtgtgaccagtattggcctagcagaggcacagaaacccacggactcgttcaagtaacgctgcttgatactgtggagctggccacatattgtgttcgaacatttgcactttacaagaatggttcaagtgagaagagagaagtgagacaattccagttcaccgcctggcctgatcatggtgttccagaacaccctacaccttttctagctttcttacgtagagtcaaaacctgtaaccctcccgatgctggtccgatggttgtgcactgcagtgcgggagttggccggactggttgcttcatcgtcatagatgccatgttagaaagaataaagcatgaaaaaactgtagatatttatggccatgtaactttaatgagagcccagaggaactatatggttcaaacagaagaccaatacatctttatccatgatgcactgttagaagcagtgacttgtggaaataccgaagtgccagctagaaacttgtatgcctacattcagaagctgacacaaatagaaacgggagagaatgtcacaggaatggagctcgaatttaagcgtctagccagctcaaaagctcacacctcaaggtttatcagtgccaatcttccatgtaataaattcaaaaatcgccttgttaatattatgccatatgaatccacaagggtatgcctgcagcctatccgtggagtagaaggatctgattacatcaatgccagttttattgatggatacagacaacagaaagcctacatcgctacccaggggcccttggcagagaccactgaagacttctggcggatgctctgggaacacaattccaccatagttgtgatgctcaccaagctgcgtgaaatgggcagagagaaatgtcaccaatactggccagcagaacggtctgcaagataccagtactttgttgtagatcccatggctgagtacaacatgccacagtatatcctaagggaattcaaggtcacagatgccagggacggccagtcccgaacagtaaggcagttccagttcactgactggccagagcaaggagtgccaaagtccggagaaggatttattgacttcatcggccaagtccataaaacaaaagaacagtttggccaagatggacccatttcagtccattgcagcgcgggcgttggaagaactggagtcttcataacgctaagcattgttttggaaagaatgagatatgaaggagttgtagatatcttccagactgtcaaaatgttaagaacacaacgaccagctatggtacagacagaggatcaatatcagttttcctatcgtgccgcactagagtacctgggcagctttgaccactatgcaacgtagaaacccctgacccattctggatttttactacaggcccttcaatatccatggagtctcttctgagccatacagggcacttgagaagtccttcttaacttctagctaacaactacttagtgggactattacacacaaaacaaattaaaaacaaattattccaggtggaccaagaattcacagtttaataatctaacctgaaaaataatgaagagaatcctgactgatgaggcatctgaaggattttatttacagatacctcaaggattcaaaatcaagggaagaagaaatcacagcaaagaaccaccatcttattcaggattgcttgaaaggtgcaaggagaaattgccagaatgctgcagttcagcacaagatatgtgctggtgtggcttctcacaatgaaacggactctgctttgacatcgccccttcccaccatactgctcataataacattttagggggaaagggga

SEQ ID NO: 171760 - DNA, 8242 bp, Homo sapiens
  Payload ID: 13759
  Gene Symbol: PTPRD
  Gene Name: protein tyrosine phosphatase, receptor type, D
  Uniprot ID: P23468
  ENST ID: ENST00000397611
  CDS Start-End: 107-4615
caggctctgaaagtgttccagctgaaatttcagatcggacagactcgctgcggctccggaggcagtgattccaagctgctcgcgcacgctgctgccaagctgcaggatggtgcacgtagccaggctgctgctgctgctcctcactttcttcctccgcacggatgctgagacacctccaaggtttacacgaacacccgttgatcagacaggggtctctggcggagttgcctctttcatctgccaagctacgggagacccaagacctaaaattgtctggaacaaaaaaggaaagaaagtcagcaatcagagatttgaggtaatagagtttgacgatgggtctggatcagttctcagaatacaacccttacggactccgagggatgaggccatttatgaatgtgtggcctcaaataatgtgggagaaataagtgtatccaccagactcacagttttgcgggaagatcaaattcccaggggcttccctaccattgacatgggcccacagttgaaggtggttgagcgtactcgcacggccaccatgctttgtgcagccagtggtaatccggatccagaaatcacttggtttaaagatttcttacctgtggacacaagcaacaacaatggtcgtattaagcagttacgatcaggtggtacaccaataagaggagcccttcagattgagcagagtgaagagtctgaccaaggaaaatatgagtgtgttgccaccaacagcgcgggcactcgctattccgctcctgccaatttatatgtcagagagctgcgagaagttcgccgtgtcccaccaagattctctatcccacccactaatcatgaaatcatgccaggcggaagcgttaatatcacctgtgtggccgtggggtcaccaatgccttatgtaaagtggatgttgggggcagaagatctgacacctgaagatgatatgccaataggaagaaatgtgctagaactgaatgatgtaagacagtcagcaaattacacctgtgttgctatgtcaacactgggtgtcattgaagcaatagcacagatcactgtcaaagccttacccaaacctccaggaactcctgtagtgaccgagagcacagctacaagcatcacactgacgtgggactctgggaaccctgagcctgtttcttattacataattcagcataaacctaaaaactctgaggaactttacaaagaaattgatggggtggcgaccacacgctacagtgtcgctggactaagtccctactcggattatgaattcagggttgttgctgtcaataacattgggcgggggcctcccagcgaacctgtgctaacacaaacctcagagcaagcaccatccagtgccccgagggatgtccaggcacgaatgttgagttcgaccaccattttggtacagtggaaggaacctgaagagccaaatggacagatccaaggatatagagtttattatacaatggatcccactcaacatgtcaacaactggatgaaacacaatgtagctgacagccaaatcactactattggcaacttagtgccccagaaaacatattctgtcaaagtcctggcttttacctcaattggagatggtcccctttcaagtgacatacaagtcatcactcagacaggagtaccagggcagccactaaacttcaaagcagaacctgagtctgaaacaagtattttgctctcttggacacctccacgttcagataccattgccaactatgaactggtctacaaagatggggagcatggagaggagcaacgaattaccattgagccagggacatcatataggctgcaaggactgaaaccaaacagcttatactatttccgtctggctgcacgctcccctcaaggcctgggtgcttctactgcagaaatatcagctagaaccatgcagtcaatgtttgcaaaaaattttcatgtcaaagcagtaatgaagacttccgtgttgctgtcttgggagattccagagaattataactccgccatgcctttcaaaattctttatgatgatgggaaaatggtagaagaagtggatggccgagccacacagaagttaattgtcaacctgaagcctgagaaatcatattcatttgtgctgacaaatcgtggaaacagtgctggtgggctgcagcacagggtcacggcaaagactgcaccagatgtattacgtaccaagcctgccttcattgggaagaccaacttggatggcatgattactgtgcaactgcctgaagtacctgcaaatgagaatataaaaggttactacataataattgtgcctttgaagaaatctcgcgggaaatttatcaagccatgggagagtccagatgaaatggaattagatgagctgcttaaggagatatctaggaagcgcagaagcatccgttatgggagagaagttgaattaaagccatatattgccgctcactttgatgtccttcccactgagttcaccctgggggatgacaagcattatggtggatttacaaacaagcaactccaaagtggtcaagaatatgtcttctttgtgttagcagtaatggaacatgcagagtctaagatgtatgcaaccagcccttactccgaccccgtggtgtcaatggatctggatccgcagccaatcacggatgaagaagaaggcttgatctgggttgtaggtcctgtccttgcagtggtctttatcatctgcattgtcattgctattcttctttataaaagtaaacccgacaggaagagggcagagtccgactctagaaaaagcagcataccgaacaataaggagatcccttcacaccacccaacagaccctgtagaactgaggcgccttaactttcaaacaccgggtatggctagccatcctccaatacccatcttggaacttgcagaccacattgaaagattgaaagcaaatgacaacttgaagttttcccaggaatatgagtcaattgaccctggccagcagttcacttgggaacattcaaacttggaagtaaacaaaccaaagaatagatacgcgaatgtaatcgcatatgatcattcccgggttctcctatcagctatagaagggatcccaggaagtgactatgtgaatgccaactacatagatgggtataggaagcaaaatgcctatattgcaacacagggatctctccccgaaacatttggggacttttggagaatgatatgggaacaacggagtgccacagttgtcatgatgacaaaactagaagaaagatcaagggtgaagtgtgaccagtattggcctagcagaggcacagaaacccacggactcgttcaagtaacgctgcttgatactgtggagctggccacatattgtgttcgaacatttgcactttacaagaatggttcaagtgagaagagagaagtgagacaattccagttcaccgcctggcctgatcatggtgttccagaacaccctacaccttttctagctttcttacgtagagtcaaaacctgtaaccctcccgatgctggtccgatggttgtgcactgcagtgcgggagttggccggactggttgcttcatcgtcatagatgccatgttagaaagaataaagcatgaaaaaactgtagatatttatggccatgtaactttaatgagagcccagaggaactatatggttcaaacagaagaccaatacatctttatccatgatgcactgttagaagcagtgacttgtggaaataccgaagtgccagctagaaacttgtatgcctacattcagaagctgacacaaatagaaacgggagagaatgtcacaggaatggagctcgaatttaagcgtctagccagctcaaaagctcacacctcaaggtttatcagtgccaatcttccatgtaataaattcaaaaatcgccttgttaatattatgccatatgaatccacaagggtatgcctgcagcctatccgtggagtagaaggatctgattacatcaatgccagttttattgatggatacagacaacagaaagcctacatcgctacccaggggcccttggcagagaccactgaagacttctggcggatgctctgggaacacaattccaccatagttgtgatgctcaccaagctgcgtgaaatgggcagagagaaatgtcaccaatactggccagcagaacggtctgcaagataccagtactttgttgtagatcccatggctgagtacaacatgccacagtatatcctaagggaattcaaggtcacagatgccagggacggccagtcccgaacagtaaggcagttccagttcactgactggccagagcaaggagtgccaaagtccggagaaggatttattgacttcatcggccaagtccataaaacaaaagaacagtttggccaagatggacccatttcagtccattgcagcgcgggcgttggaagaactggagtcttcataacgctaagcattgttttggaaagaatgagatatgaaggagttgtagatatcttccagactgtcaaaatgttaagaacacaacgaccagctatggtacagacagaggatcaatatcagttttcctatcgtgccgcactagagtacctgggcagctttgaccactatgcaacgtagaaacccctgacccattctggatttttactacaggcccttcaatatccatggagtctcttctgagccatacagggcacttgagaagtccttcttaacttctagctaacaactacttagtgggactattacacacaaaacaaattaaaaacaaattattccaggtggaccaagaattcacagtttaataatctaacctgaaaaataatgaagagaatcctgactgatgaggcatctgaaggattttatttacagatacctcaaggattcaaaatcaagggaagaagaaatcacagcaaagaaccaccatcttattcaggattgcttgaaaggtgcaaggagaaattgccagaatgctgcagttcagcacaagatatgtgctggtgtggcttctcacaatgaaacggactctgctttgacatcgccccttcccaccatactgctcataataacattttagggggaaaggggagggaatgtttaaaaagaaagtccttgatttagttttttagtattgtaaagatactgctgacctgtgcttcatttctaactgtgtaaacttttttttaacaaaatgtatcattcgataaagtgaattttaaaaaagttacataactcttcatttttttatttccaaatcgtaggtttttttaagctgtagaactgttatctgtaatatcttgctgtagaaatatcaaatcatttgaaaatttgcacatttttgtgcaaaactcaatctacagtatcagtctcgtcagatatattaattttacacttcagttttgattggtgagaaagtacccattctcttcaaataatcaaagataattattattttgttttgtttttggaatcaacagggaggcgcaaagtataaagttgctgctaacatatatacatatatatccatattttataagggtgtctatgtatatatagacagtgtgtccacacaaaaaatagatacagttatcagtcagtcagttcttccatgatttagtttttttaaacgtagaaaagctattgtaaacatctctttccatttattcttaattttttgacatattggtatttctttaaagggaaatgaggaatgcacatcagtgattgattgtcaaacctcaccccctgatttcctacctaatctacccccacctaaccaatcaatcacatccacaaattgttttgtttgtttgttagtcaggcttccaacaaagttcaatatttctaacactctagtgcaataaaaattattattaaatagctaagaggtgtgcatgtgggaaaggtcagtgcatatccctttaggaggggagaatgttgtaatatatcagctatcgagttgtttaaaaaaagtgtattcaatcgtatattgtctatagtatgtgctatgaaatttgcatttatgatatgtaacaggggcaaagccaaattcatgttactctgttcagtcagaaacattttgtggcatacagcattcctgggaagtgctgtactttgtttcgttttggttttagttttgcatttagagtgccttataattgatgcctattttaatagcatttctttttagcttttggttcgtatttccattcactgttcgtatctgttactttctattaaagcattatctgtttaccacatgtacaaaaactctttgaataatatgcattcctagttttcagccaagtcggggatgttagtgattgtaccagcccaaagcacttggataatcagggcccttcttccttttataatcaatcatcaacatcagaaaaagctacttgttttatttatattcccttccaaatccgctctggaacatgcagtaactgcaccaaacttattttagtaacaaatatcattggcaactttggaatatatttgatattccattaggatttttctaaaaggggaaataaactatatatatatatgtatcttacccccaattcttccaacagaatttctataggaagccatggatgatggcataagtttgccacatattacatgattttaaataatcctcaaaatacccaaggaactcttaaagagttttggtatgagtatactactttggtttaattttagcttcatggatgttctgcatggaaggatttttgttttccacattttcccattgctagcagagtgaaatccaagagaccaaacatttgcaagcattgtatttgagcacttttgtaaaaaacaaagaaaaagaaaaaaaagaaaatatatataatactaaaaaaaagtatctagaaggctacctcagaatgagactctctaacctacatcagaaccagagaagaatgtgcactatgtgggtctgttatcattattttcttttagtttgtatctttttggagatttatccaagtgccagattactcagtgctataattttcttttagttaaacaaagggggtcagacagacattgcatcatccagacatgccttgttggacatgtagaatccgatggagcactgcacaccagaatgattggccaatgagcagcttctctccctgaaacaataactgcccatttggcaaagggaaagatgacaataatcagaagaagaaaatgaatgggatgcataccatagacgaacgaggcggagactattgcgggaatcttactgttcaggagctgttcctagaactaactcccttactgtcattgatgtgcattccactctgtgcttttctgtacaaccattcaagttttaatttcccaggtgaaccatctttatctgccattaccacaagctttcaagtttccagttattttcatcatcataaccagtacggtgctattatttacctatgtacgtgtagttatgtataattttgtaattagttacaatggtaaaaaaaatcaaaatatataaaaagtgatttgtacagaactttattttagctcttttttaaaaatgatttgcatggttagaaaacggcgaggacagccaggggagggaagggcctctagggaactttgcactttctatacctttgtactatgcactgccctattgattctacacccaataatgatattacttgaacccatctgtaagaaactgcttcggaaattcatttgtgtgtatgtaaataacacaacatagaaacaggaagggaaaaaagtctgcagtaatgcacgtattttttttctttcctgtttattttcggttttgctttaagtccttttatttttaattccctttttgtttttctttttgggttttggttccttttgggtttatgggtgccctgatactccagcagagatcagaaggctacagatccattctatccatccgttatgtggctttgccatcccagcttggagtgtctttacaaagataataacagttgtgttctttgctctcgttttggatgcatagactgaaaaattaaaacaaataacttgtaaaatggcttgttaaaaaatacaattacctctaattagtagtacgcgtaaatgttttacagaatgaaaggcgtgctttttattttcttacttcgttacattggtggcgaaagaagtctgtatgaaaatcagttctttgctgacacaagttccatttgttacaaatgaattctaataaaaatgtcagtgttatgc

SEQ ID NO: 171761 - DNA, 8248 bp, Homo sapiens
  Payload ID: 13759
  Gene Symbol: PTPRD
  Gene Name: protein tyrosine phosphatase, receptor type, D
  ENST ID: ENST00000397617
  CDS Start-End: 104-4621
gctctgaaagtgttccagctgaaatttcagatcggacagactcgctgcggctccggaggcagtgattccaagctgctcgcgcacgctgctgccaagctgcaggatggtgcacgtagccaggctgctgctgctgctcctcactttcttcctccgcacggatgctgagacacctccaaggtttacacgaacacccgttgatcagacaggggtctctggcggagttgcctctttcatctgccaagctacgggagacccaagacctaaaattgtctggaacaaaaaaggaaagaaagtcagcaatcagagatttgaggtaatagagtttgacgatgggtctggatcagttctcagaatacaacccttacggactccgagggatgaggccatttatgaatgtgtggcctcaaataatgtgggagaaataagtgtatccaccagactcacagttttgcgggaagatcaaattcccaggggcttccctaccattgacatgggcccacagttgaaggtggttgagcgtactcgcacggccaccatgctttgtgcagccagtggtaatccggatccagaaatcacttggtttaaagatttcttacctgtggacacaagcaacaacaatggtcgtattaagcagttacgatcagtatccataggagcccttcagattgagcagagtgaagagtctgaccaaggaaaatatgagtgtgttgccaccaacagcgcgggcactcgctattccgctcctgccaatttatatgtcagagttcgccgtgtcccaccaagattctctatcccacccactaatcatgaaatcatgccaggcggaagcgttaatatcacctgtgtggccgtggggtcaccaatgccttatgtaaagtggatgttgggggcagaagatctgacacctgaagatgatatgccaataggaagaaatgtgctagaactgaatgatgtaagacagtcagcaaattacacctgtgttgctatgtcaacactgggtgtcattgaagcaatagcacagatcactgtcaaagccttacccaaacctccaggaactcctgtagtgaccgagagcacagctacaagcatcacactgacgtgggactctgggaaccctgagcctgtttcttattacataattcagcataaacctaaaaactctgaggaactttacaaagaaattgatggggtggcgaccacacgctacagtgtcgctggactaagtccctactcggattatgaattcagggttgttgctgtcaataacattgggcgggggcctcccagcgaacctgtgctaacacaaacctcagagcaagcaccatccagtgccccgagggatgtccaggcacgaatgttgagttcgaccaccattttggtacagtggaaggaacctgaagagccaaatggacagatccaaggatatagagtttattatacaatggatcccactcaacatgtcaacaactggatgaaacacaatgtagctgacagccaaatcactactattggcaacttagtgccccagaaaacatattctgtcaaagtcctggcttttacctcaattggagatggtcccctttcaagtgacatacaagtcatcactcagacaggagtaccagggcagccactaaacttcaaagcagaacctgagtctgaaacaagtattttgctctcttggacacctccacgttcagataccattgccaactatgaactggtctacaaagatggggagcatggagaggagcaacgaattaccattgagccagggacatcatataggctgcaaggactgaaaccaaacagcttatactatttccgtctggctgcacgctcccctcaaggcctgggtgcttctactgcagaaatatcagctagaaccatgcagtcaatgtttgcaaaaaattttcatgtcaaagcagtaatgaagacttccgtgttgctgtcttgggagattccagagaattataactccgccatgcctttcaaaattctttatgatgatgggaaaatggtagaagaagtggatggccgagccacacagaagttaattgtcaacctgaagcctgagaaatcatattcatttgtgctgacaaatcgtggaaacagtgctggtgggctgcagcacagggtcacggcaaagactgcaccagatgtattacgtaccaagcctgccttcattgggaagaccaacttggatggcatgattactgtgcaactgcctgaagtacctgcaaatgagaatataaaaggttactacataataattgtgcctttgaagaaatctcgcgggaaatttatcaagccatgggagagtccagatgaaatggaattagatgagctgcttaaggagatatctaggaagcgcagaagcatccgttatgggagagaagttgaattaaagccatatattgccgctcactttgatgtccttcccactgagttcaccctgggggatgacaagcattatggtggatttacaaacaagcaactccaaagtggtcaagaatatgtcttctttgtgttagcagtaatggaacatgcagagtctaagatgtatgcaaccagcccttactccgaccccgtggtgtcaatggatctggatccgcagccaatcacggatgaagaagaaggcttgatctgggttgtaggtcctgtccttgcagtggtctttatcatctgcattgtcattgctattcttctttataaaaggaagagggcagagtccgactctagaaaaagcagcataccgaacaataaggagatcccttcacaccacccaacagaccctgtagaactgaggcgccttaactttcaaacaccgggttcagatgattccggttaccctggtaaccttcattcttcaagtatggctagccatcctccaatacccatcttggaacttgcagaccacattgaaagattgaaagcaaatgacaacttgaagttttcccaggaatatgagtcaattgaccctggccagcagttcacttgggaacattcaaacttggaagtaaacaaaccaaagaatagatacgcgaatgtaatcgcatatgatcattcccgggttctcctatcagctatagaagggatcccaggaagtgactatgtgaatgccaactacatagatgggtataggaagcaaaatgcctatattgcaacacagggatctctccccgaaacatttggggacttttggagaatgatatgggaacaacggagtgccacagttgtcatgatgacaaaactagaagaaagatcaagggtgaagtgtgaccagtattggcctagcagaggcacagaaacccacggactcgttcaagtaacgctgcttgatactgtggagctggccacatattgtgttcgaacatttgcactttacaagaatggttcaagtgagaagagagaagtgagacaattccagttcaccgcctggcctgatcatggtgttccagaacaccctacaccttttctagctttcttacgtagagtcaaaacctgtaaccctcccgatgctggtccgatggttgtgcactgcagtgcgggagttggccggactggttgcttcatcgtcatagatgccatgttagaaagaataaagcatgaaaaaactgtagatatttatggccatgtaactttaatgagagcccagaggaactatatggttcaaacagaagaccaatacatctttatccatgatgcactgttagaagcagtgacttgtggaaataccgaagtgccagctagaaacttgtatgcctacattcagaagctgacacaaatagaaacgggagagaatgtcacaggaatggagctcgaatttaagcgtctagccagctcaaaagctcacacctcaaggtttatcagtgccaatcttccatgtaataaattcaaaaatcgccttgttaatattatgccatatgaatccacaagggtatgcctgcagcctatccgtggagtagaaggatctgattacatcaatgccagttttattgatggatacagacaacagaaagcctacatcgctacccaggggcccttggcagagaccactgaagacttctggcggatgctctgggaacacaattccaccatagttgtgatgctcaccaagctgcgtgaaatgggcagagagaaatgtcaccaatactggccagcagaacggtctgcaagataccagtactttgttgtagatcccatggctgagtacaacatgccacagtatatcctaagggaattcaaggtcacagatgccagggacggccagtcccgaacagtaaggcagttccagttcactgactggccagagcaaggagtgccaaagtccggagaaggatttattgacttcatcggccaagtccataaaacaaaagaacagtttggccaagatggacccatttcagtccattgcagcgcgggcgttggaagaactggagtcttcataacgctaagcattgttttggaaagaatgagatatgaaggagttgtagatatcttccagactgtcaaaatgttaagaacacaacgaccagctatggtacagacagaggatcaatatcagttttcctatcgtgccgcactagagtacctgggcagctttgaccactatgcaacgtagaaacccctgacccattctggatttttactacaggcccttcaatatccatggagtctcttctgagccatacagggcacttgagaagtccttcttaacttctagctaacaactacttagtgggactattacacacaaaacaaattaaaaacaaattattccaggtggaccaagaattcacagtttaataatctaacctgaaaaataatgaagagaatcctgactgatgaggcatctgaaggattttatttacagatacctcaaggattcaaaatcaagggaagaagaaatcacagcaaagaaccaccatcttattcaggattgcttgaaaggtgcaaggagaaattgccagaatgctgcagttcagcacaagatatgtgctggtgtggcttctcacaatgaaacggactctgctttgacatcgccccttcccaccatactgctcataataacattttagggggaaaggggagggaatgtttaaaaagaaagtccttgatttagttttttagtattgtaaagatactgctgacctgtgcttcatttctaactgtgtaaacttttttttaacaaaatgtatcattcgataaagtgaattttaaaaaagttacataactcttcatttttttatttccaaatcgtaggtttttttaagctgtagaactgttatctgtaatatcttgctgtagaaatatcaaatcatttgaaaatttgcacatttttgtgcaaaactcaatctacagtatcagtctcgtcagatatattaattttacacttcagttttgattggtgagaaagtacccattctcttcaaataatcaaagataattattattttgttttgtttttggaatcaacagggaggcgcaaagtataaagttgctgctaacatatatacatatatatccatattttataagggtgtctatgtatatatagacagtgtgtccacacaaaaaatagatacagttatcagtcagtcagttcttccatgatttagtttttttaaacgtagaaaagctattgtaaacatctctttccatttattcttaattttttgacatattggtatttctttaaagggaaatgaggaatgcacatcagtgattgattgtcaaacctcaccccctgatttcctacctaatctacccccacctaaccaatcaatcacatccacaaattgttttgtttgtttgttagtcaggcttccaacaaagttcaatatttctaacactctagtgcaataaaaattattattaaatagctaagaggtgtgcatgtgggaaaggtcagtgcatatccctttaggaggggagaatgttgtaatatatcagctatcgagttgtttaaaaaaagtgtattcaatcgtatattgtctatagtatgtgctatgaaatttgcatttatgatatgtaacaggggcaaagccaaattcatgttactctgttcagtcagaaacattttgtggcatacagcattcctgggaagtgctgtactttgtttcgttttggttttagttttgcatttagagtgccttataattgatgcctattttaatagcatttctttttagcttttggttcgtatttccattcactgttcgtatctgttactttctattaaagcattatctgtttaccacatgtacaaaaactctttgaataatatgcattcctagttttcagccaagtcggggatgttagtgattgtaccagcccaaagcacttggataatcagggcccttcttccttttataatcaatcatcaacatcagaaaaagctacttgttttatttatattcccttccaaatccgctctggaacatgcagtaactgcaccaaacttattttagtaacaaatatcattggcaactttggaatatatttgatattccattaggatttttctaaaaggggaaataaactatatatatatatgtatcttacccccaattcttccaacagaatttctataggaagccatggatgatggcataagtttgccacatattacatgattttaaataatcctcaaaatacccaaggaactcttaaagagttttggtatgagtatactactttggtttaattttagcttcatggatgttctgcatggaaggatttttgttttccacattttcccattgctagcagagtgaaatccaagagaccaaacatttgcaagcattgtatttgagcacttttgtaaaaaacaaagaaaaagaaaaaaaagaaaatatatataatactaaaaaaaagtatctagaaggctacctcagaatgagactctctaacctacatcagaaccagagaagaatgtgcactatgtgggtctgttatcattattttcttttagtttgtatctttttggagatttatccaagtgccagattactcagtgctataattttcttttagttaaacaaagggggtcagacagacattgcatcatccagacatgccttgttggacatgtagaatccgatggagcactgcacaccagaatgattggccaatgagcagcttctctccctgaaacaataactgcccatttggcaaagggaaagatgacaataatcagaagaagaaaatgaatgggatgcataccatagacgaacgaggcggagactattgcgggaatcttactgttcaggagctgttcctagaactaactcccttactgtcattgatgtgcattccactctgtgcttttctgtacaaccattcaagttttaatttcccaggtgaaccatctttatctgccattaccacaagctttcaagtttccagttattttcatcatcataaccagtacggtgctattatttacctatgtacgtgtagttatgtataattttgtaattagttacaatggtaaaaaaaatcaaaatatataaaaagtgatttgtacagaactttattttagctcttttttaaaaatgatttgcatggttagaaaacggcgaggacagccaggggagggaagggcctctagggaactttgcactttctatacctttgtactatgcactgccctattgattctacacccaataatgatattacttgaacccatctgtaagaaactgcttcggaaattcatttgtgtgtatgtaaataacacaacatagaaacaggaagggaaaaaagtctgcagtaatgcacgtattttttttctttcctgtttattttcggttttgctttaagtccttttatttttaattccctttttgtttttctttttgggttttggttccttttgggtttatgggtgccctgatactccagcagagatcagaaggctacagatccattctatccatccgttatgtggctttgccatcccagcttggagtgtctttacaaagataataacagttgtgttctttgctctcgttttggatgcatagactgaaaaattaaaacaaataacttgtaaaatggcttgttaaaaaatacaattacctctaattagtagtacgcgtaaatgttttacagaatgaaaggcgtgctttttattttcttacttcgttacattggtggcgaaagaagtctgtatgaaaatcagttctttgctgacacaagttccatttgttacaaatgaattctaataaaaatgtcagtgttatgc

SEQ ID NO: 171762 - DNA, 5039 bp, Homo sapiens
  Payload ID: 13759
  Gene Symbol: PTPRD
  Gene Name: protein tyrosine phosphatase, receptor type, D
  Uniprot ID: P23468
  ENST ID: ENST00000486161
  CDS Start-End: 52-4569
ccggaggcagtgattccaagctgctcgcgcacgctgctgccaagctgcaggatggtgcacgtagccaggctgctgctgctgctcctcactttcttcctccgcacggatgctgagacacctccaaggtttacacgaacacccgttgatcagacaggggtctctggcggagttgcctctttcatctgccaagctacgggagacccaagacctaaaattgtctggaacaaaaaaggaaagaaagtcagcaatcagagatttgaggtaatagagtttgacgatgggtctggatcagttctcagaatacaacccttacggactccgagggatgaggccatttatgaatgtgtggcctcaaataatgtgggagaaataagtgtatccaccagactcacagttttgcgggaagatcaaattcccaggggcttccctaccattgacatgggcccacagttgaaggtggttgagcgtactcgcacggccaccatgctttgtgcagccagtggtaatccggatccagaaatcacttggtttaaagatttcttacctgtggacacaagcaacaacaatggtcgtattaagcagttacgatcagaatctattggtggtacaccaataagaggagcccttcagattgagcagagtgaagagtctgaccaaggaaaatatgagtgtgttgccaccaacagcgcgggcactcgctattccgctcctgccaatttatatgtcagagagctgcgagaagttcgccgtgtcccaccaagattctctatcccacccactaatcatgaaatcatgccaggcggaagcgttaatatcacctgtgtggccgtggggtcaccaatgccttatgtaaagtggatgttgggggcagaagatctgacacctgaagatgatatgccaataggaagaaatgtgctagaactgaatgatgtaagacagtcagcaaattacacctgtgttgctatgtcaacactgggtgtcattgaagcaatagcacagatcactgtcaaagccttacccaaacctccaggaactcctgtagtgaccgagagcacagctacaagcatcacactgacgtgggactctgggaaccctgagcctgtttcttattacataattcagcataaacctaaaaactctgaggaactttacaaagaaattgatggggtggcgaccacacgctacagtgtcgctggactaagtccctactcggattatgaattcagggttgttgctgtcaataacattgggcgggggcctcccagcgaacctgtgctaacacaaacctcagagcaagcaccatccagtgccccgagggatgtccaggcacgaatgttgagttcgaccaccattttggtacagtggaaggaacctgaagagccaaatggacagatccaaggatatagagtttattatacaatggatcccactcaacatgtcaacaactggatgaaacacaatgtagctgacagccaaatcactactattggcaacttagtgccccagaaaacatattctgtcaaagtcctggcttttacctcaattggagatggtcccctttcaagtgacatacaagtcatcactcagacaggagtaccagggcagccactaaacttcaaagcagaacctgagtctgaaacaagtattttgctctcttggacacctccacgttcagataccattgccaactatgaactggtctacaaagatggggagcatggagaggagcaacgaattaccattgagccagggacatcatataggctgcaaggactgaaaccaaacagcttatactatttccgtctggctgcacgctcccctcaaggcctgggtgcttctactgcagaaatatcagctagaaccatgcagtcaatgtttgcaaaaaattttcatgtcaaagcagtaatgaagacttccgtgttgctgtcttgggagattccagagaattataactccgccatgcctttcaaaattctttatgatgatgggaaaatggtagaagaagtggatggccgagccacacagaagttaattgtcaacctgaagcctgagaaatcatattcatttgtgctgacaaatcgtggaaacagtgctggtgggctgcagcacagggtcacggcaaagactgcaccagatgtattacgtaccaagcctgccttcattgggaagaccaacttggatggcatgattactgtgcaactgcctgaagtacctgcaaatgagaatataaaaggttactacataataattgtgcctttgaagaaatctcgcgggaaatttatcaagccatgggagagtccagatgaaatggaattagatgagctgcttaaggagatatctaggaagcgcagaagcatccgttatgggagagaagttgaattaaagccatatattgccgctcactttgatgtccttcccactgagttcaccctgggggatgacaagcattatggtggatttacaaacaagcaactccaaagtggtcaagaatatgtcttctttgtgttagcagtaatggaacatgcagagtctaagatgtatgcaaccagcccttactccgaccccgtggtgtcaatggatctggatccgcagccaatcacggatgaagaagaaggcttgatctgggttgtaggtcctgtccttgcagtggtctttatcatctgcattgtcattgctattcttctttataaaagtaaacccgacaggaagagggcagagtccgactctagaaaaagcagcataccgaacaataaggagatcccttcacaccacccaacagaccctgtagaactgaggcgccttaactttcaaacaccgggtatggctagccatcctccaatacccatcttggaacttgcagaccacattgaaagattgaaagcaaatgacaacttgaagttttcccaggaatatgagtcaattgaccctggccagcagttcacttgggaacattcaaacttggaagtaaacaaaccaaagaatagatacgcgaatgtaatcgcatatgatcattcccgggttctcctatcagctatagaagggatcccaggaagtgactatgtgaatgccaactacatagatgggtataggaagcaaaatgcctatattgcaacacagggatctctccccgaaacatttggggacttttggagaatgatatgggaacaacggagtgccacagttgtcatgatgacaaaactagaagaaagatcaagggtgaagtgtgaccagtattggcctagcagaggcacagaaacccacggactcgttcaagtaacgctgcttgatactgtggagctggccacatattgtgttcgaacatttgcactttacaagaatggttcaagtgagaagagagaagtgagacaattccagttcaccgcctggcctgatcatggtgttccagaacaccctacaccttttctagctttcttacgtagagtcaaaacctgtaaccctcccgatgctggtccgatggttgtgcactgcagtgcgggagttggccggactggttgcttcatcgtcatagatgccatgttagaaagaataaagcatgaaaaaactgtagatatttatggccatgtaactttaatgagagcccagaggaactatatggttcaaacagaagaccaatacatctttatccatgatgcactgttagaagcagtgacttgtggaaataccgaagtgccagctagaaacttgtatgcctacattcagaagctgacacaaatagaaacgggagagaatgtcacaggaatggagctcgaatttaagcgtctagccagctcaaaagctcacacctcaaggtttatcagtgccaatcttccatgtaataaattcaaaaatcgccttgttaatattatgccatatgaatccacaagggtatgcctgcagcctatccgtggagtagaaggatctgattacatcaatgccagttttattgatggatacagacaacagaaagcctacatcgctacccaggggcccttggcagagaccactgaagacttctggcggatgctctgggaacacaattccaccatagttgtgatgctcaccaagctgcgtgaaatgggcagagagaaatgtcaccaatactggccagcagaacggtctgcaagataccagtactttgttgtagatcccatggctgagtacaacatgccacagtatatcctaagggaattcaaggtcacagatgccagggacggccagtcccgaacagtaaggcagttccagttcactgactggccagagcaaggagtgccaaagtccggagaaggatttattgacttcatcggccaagtccataaaacaaaagaacagtttggccaagatggacccatttcagtccattgcagcgcgggcgttggaagaactggagtcttcataacgctaagcattgttttggaaagaatgagatatgaaggagttgtagatatcttccagactgtcaaaatgttaagaacacaacgaccagctatggtacagacagaggatcaatatcagttttcctatcgtgccgcactagagtacctgggcagctttgaccactatgcaacgtagaaacccctgacccattctggatttttactacaggcccttcaatatccatggagtctcttctgagccatacagggcacttgagaagtccttcttaacttctagctaacaactacttagtgggactattacacacaaaacaaattaaaaacaaattattccaggtggaccaagaattcacagtttaataatctaacctgaaaaataatgaagagaatcctgactgatgaggcatctgaaggattttatttacagatacctcaaggattcaaaatcaagggaagaagaaatcacagcaaagaaccaccatcttattcaggattgcttgaaaggtgcaaggagaaattgccagaatgctgcagttcagcacaagatatgtgctggtgtggcttctcacaatgaaacggactctgctttgacatcgccccttcccaccatactgctcataataacattttagggggaaaggggag

SEQ ID NO: 171763 - DNA, 1697 bp, Homo sapiens
  Payload ID: 13759
  Gene Symbol: PTPRD
  Gene Name: protein tyrosine phosphatase, receptor type, D
  ENST ID: ENST00000463477
  CDS Start-End: 816-1424
cggcgccgccagccagcctcggcggggagagtgcagtttattctgggcctgtgtggaatagaaagacaattctttatttgactggtaggaaagaaaagagaagactcctcagggtttccaaggaggactggagcggctgctttagtgaagaagtgaagaatcaaggaagtaaaggacctgtctcaaagtcacacaactaggaaatcttgaggagtctgatacttttcatcctccagctataaaatcatcttgtagggggaagctgtacattggtggaaaataaaaggcaagcagttcctggcccgtgatattccagttagaggtgtctgactgacagcatgttggcaccgagggaagcgatgggcttcggctccaggtttctgtcctgagaccacagcagaatgtgccttggacaaaggcttggactccttgatcttctggtaacttcaaaaatctggtctcagggtggtgaactttttcttcgaattcctaacctgtgagcttacgaaaaagggagcatgcctgtcttattctcagtgcctcatgggaaataaaagattgggagatgatagctacctgatgatggtgcctgtccattaactgaacaactgtggttttgaacttcttgaggccagggactgtgtctgaaaacaccgacggtggctaactcaagggagacgtctggtgaacacccgtgggatctaaagaacaagctctgaaagtgttccagctgaaatttcagatcggacagactcgctgcggctccggaggcagtgattccaagctgctcgcgcacgctgctgccaagctgcaggatggtgcacgtagccaggctgctgctgctgctcctcactttcttcctccgcacggatgctgagacacctccaaggtttacacgaacacccgttgatcagacaggggtctctggcggagttgcctctttcatctgccaagctacgggagacccaagacctaaaattgtctggaacaaaaaaggaaagaaagtcagcaatcagagatttgaggtaatagagtttgacgatgggtctggatcagttctcagaatacaacccttacggactccgagggatgaggccatttatgaatgtgtggcctcaaataatgtgggagaaataagtgtatccaccagactcacagttttgcgggaagatcaaattcccaggggcttccctaccattgacatgggcccacagttgaaggtggttgagcgtactcgcacggccaccatgctttgtgcagccagtggtaatccggatccagaaatcacttggtttaaagatttcttacctgtggacacaagcaacaacaatggtcgtattaagcagttacgatcaggtactgatttttctccctcttctctttctctgttacttaatgggtggtccatgtttgtgatgtcatagcctgtttcagagtctgtctttctccttttctctgtgtgttttgcagcttctgtttaatccacattgctcactgctgtgactgtatttttggtaattttttaatttactgctttttcgcagtatttgatggatccattttctcctctttctttcttctttctctgttttcttttgaaacaaatttatttcaacattggacttcattcagaacttgcaaggagatccaatggttgtatccattaaaaaataaaatgttcatattaaaccctaaaa

SEQ ID NO: 171764 - DNA, 521 bp, Homo sapiens
  Payload ID: 13759
  Gene Symbol: PTPRD
  Gene Name: protein tyrosine phosphatase, receptor type, D
  ENST ID: ENST00000481079
  CDS Start-End: 243-521
gcggccgctgctccgcgggattaaattggccgcccggaggcggcggcgcggccgtggcggggcgcgaaggcgctggaggaaagtgttggcggcggcgcgggaggcggtggcggcggctgcccggggccaacatgaccaggctctgaaagtgttccagctgaaatttcagatcggacagactcgctgcggctccggaggcagtgattccaagctgctcgcgcacgctgctgccaagctgcaggatggtgcacgtagccaggctgctgctgctgctcctcactttcttcctccgcacggatgctgagacacctccaaggtttacacgaacacccgttgatcagacaggggtctctggcggagttgcctctttcatctgccaagctacgggagacccaagacctaaaattgtctggaacaaaaaaggaaagaaagtcagcaatcagagatttgaggtaatagagtttgacgatgggtctggatcagttctcagaatacaacccttacggactccgagggatgag

SEQ ID NO: 171765 - DNA, 6210 bp, Homo sapiens
  Payload ID: 13759
  Gene Symbol: PTPRD
  Gene Name: protein tyrosine phosphatase, receptor type, D
  Uniprot ID: P23468
  ENST ID: ENST00000540109
  CDS Start-End: 107-5845
caggctctgaaagtgttccagctgaaatttcagatcggacagactcgctgcggctccggaggcagtgattccaagctgctcgcgcacgctgctgccaagctgcaggatggtgcacgtagccaggctgctgctgctgctcctcactttcttcctccgcacggatgctgagacacctccaaggtttacacgaacacccgttgatcagacaggggtctctggcggagttgcctctttcatctgccaagctacgggagacccaagacctaaaattgtctggaacaaaaaaggaaagaaagtcagcaatcagagatttgaggtaatagagtttgacgatgggtctggatcagttctcagaatacaacccttacggactccgagggatgaggccatttatgaatgtgtggcctcaaataatgtgggagaaataagtgtatccaccagactcacagttttgcgggaagatcaaattcccaggggcttccctaccattgacatgggcccacagttgaaggtggttgagcgtactcgcacggccaccatgctttgtgcagccagtggtaatccggatccagaaatcacttggtttaaagatttcttacctgtggacacaagcaacaacaatggtcgtattaagcagttacgatcagaatctattggtggtacaccaataagaggagcccttcagattgagcagagtgaagagtctgaccaaggaaaatatgagtgtgttgccaccaacagcgcgggcactcgctattccgctcctgccaatttatatgtcagagagctgcgagaagttcgccgtgtcccaccaagattctctatcccacccactaatcatgaaatcatgccaggcggaagcgttaatatcacctgtgtggccgtggggtcaccaatgccttatgtaaagtggatgttgggggcagaagatctgacacctgaagatgatatgccaataggaagaaatgtgctagaactgaatgatgtaagacagtcagcaaattacacctgtgttgctatgtcaacactgggtgtcattgaagcaatagcacagatcactgtcaaagccttacccaaacctccaggaactcctgtagtgaccgagagcacagctacaagcatcacactgacgtgggactctgggaaccctgagcctgtttcttattacataattcagcataaacctaaaaactctgaggaactttacaaagaaattgatggggtggcgaccacacgctacagtgtcgctggactaagtccctactcggattatgaattcagggttgttgctgtcaataacattgggcgggggcctcccagcgaacctgtgctaacacaaacctcagagcaagcaccatccagtgccccgagggatgtccaggcacgaatgttgagttcgaccaccattttggtacagtggaaggaacctgaagagccaaatggacagatccaaggatatagagtttattatacaatggatcccactcaacatgtcaacaactggatgaaacacaatgtagctgacagccaaatcactactattggcaacttagtgccccagaaaacatattctgtcaaagtcctggcttttacctcaattggagatggtcccctttcaagtgacatacaagtcatcactcagacaggagtaccagggcagccactaaacttcaaagcagaacctgagtctgaaacaagtattttgctctcttggacacctccacgttcagataccattgccaactatgaactggtctacaaagatggggagcatggagaggagcaacgaattaccattgagccagggacatcatataggctgcaaggactgaaaccaaacagcttatactatttccgtctggctgcacgctcccctcaaggcctgggtgcttctactgcagaaatatcagctagaaccatgcagtcaaagccgtcagctcctcctcaagacattagttgcaccagcccaagttccactagtattttggtaagttggcaacctccaccagtggaaaaacagaatggcattatcactgaatactccatcaagtacactgcagtggatggggaagatgacaagcctcacgagattttgggaattccttcggacactaccaaataccttttggaacagctggaaaaatggactgaataccggatcactgtgacagcccatacagatgtcggccctggccctgagagcttgtccgtgttgattcgaaccaatgaagatgttcctagtggtcctcctcgcaaagtcgaggtagaggctgtcaactcaacatctgttaaagtctcatggcgctcacccgtgcccaataaacagcatggccagataagaggatatcaggtgcattatgtgaggatggaaaatggtgagcccaagggccagcccatgctgaaagatgtcatgctggctgatgcacagtgggaatttgatgatactactgaacatgacatgatcatttctgggctccagcctgaaacttcctactccctcaccgtcacagcctacacaaccaaaggagatggtgctcgcagcaagcccaaactggtgtccaccactggggcagttccagggaaacctcggcttgtgattaaccacactcagatgaatactgctcttattcagtggcaccctccggtggacacatttggacctcttcagggctaccgtctaaaatttggccgcaaggatatggagccacttactactcttgagttctctgaaaaagaagatcactttacagctacagacatccacaagggagcatcatacgtcttcaggctctcagccagaaacaaagtgggctttggggaggagatggtgaaggagatttccattccagaagaagtaccaactggattccctcaaaaccttcactcagaaggcaccacttcaacctccgtccagttatcttggcaaccacctgtcctggcagagagaaatggcattatcaccaagtatacccttctttatagggatatcaacatcccccttctcccgatggagcagcttattgttccagctgacaccactatgacactcactggcttaaaaccagataccacatacgatgtaaaagtacgtgctcatacgagcaaagggcccgggccatatagtcccagtgtccagttcaggacactgcctgtggatcaagtgtttgcaaaaaattttcatgtcaaagcagtaatgaagacttccgtgttgctgtcttgggagattccagagaattataactccgccatgcctttcaaaattctttatgatgatgggaaaatggtagaagaagtggatggccgagccacacagaagttaattgtcaacctgaagcctgagaaatcatattcatttgtgctgacaaatcgtggaaacagtgctggtgggctgcagcacagggtcacggcaaagactgcaccagatgtattacgtaccaagcctgccttcattgggaagaccaacttggatggcatgattactgtgcaactgcctgaagtacctgcaaatgagaatataaaaggttactacataataattgtgcctttgaagaaatctcgcgggaaatttatcaagccatgggagagtccagatgaaatggaattagatgagctgcttaaggagatatctaggaagcgcagaagcatccgttatgggagagaagttgaattaaagccatatattgccgctcactttgatgtccttcccactgagttcaccctgggggatgacaagcattatggtggatttacaaacaagcaactccaaagtggtcaagaatatgtcttctttgtgttagcagtaatggaacatgcagagtctaagatgtatgcaaccagcccttactccgaccccgtggtgtcaatggatctggatccgcagccaatcacggatgaagaagaaggcttgatctgggttgtaggtcctgtccttgcagtggtctttatcatctgcattgtcattgctattcttctttataaaaggaagagggcagagtccgactctagaaaaagcagcataccgaacaataaggagatcccttcacaccacccaacagaccctgtagaactgaggcgccttaactttcaaacaccgggtatggctagccatcctccaatacccatcttggaacttgcagaccacattgaaagattgaaagcaaatgacaacttgaagttttcccaggaatatgagtcaattgaccctggccagcagttcacttgggaacattcaaacttggaagtaaacaaaccaaagaatagatacgcgaatgtaatcgcatatgatcattcccgggttctcctatcagctatagaagggatcccaggaagtgactatgtgaatgccaactacatagatgggtataggaagcaaaatgcctatattgcaacacagggatctctccccgaaacatttggggacttttggagaatgatatgggaacaacggagtgccacagttgtcatgatgacaaaactagaagaaagatcaagggtgaagtgtgaccagtattggcctagcagaggcacagaaacccacggactcgttcaagtaacgctgcttgatactgtggagctggccacatattgtgttcgaacatttgcactttacaagaatggttcaagtgagaagagagaagtgagacaattccagttcaccgcctggcctgatcatggtgttccagaacaccctacaccttttctagctttcttacgtagagtcaaaacctgtaaccctcccgatgctggtccgatggttgtgcactgcagtgcgggagttggccggactggttgcttcatcgtcatagatgccatgttagaaagaataaagcatgaaaaaactgtagatatttatggccatgtaactttaatgagagcccagaggaactatatggttcaaacagaagaccaatacatctttatccatgatgcactgttagaagcagtgacttgtggaaataccgaagtgccagctagaaacttgtatgcctacattcagaagctgacacaaatagaaacgggagagaatgtcacaggaatggagctcgaatttaagcgtctagccagctcaaaagctcacacctcaaggtttatcagtgccaatcttccatgtaataaattcaaaaatcgccttgttaatattatgccatatgaatccacaagggtatgcctgcagcctatccgtggagtagaaggatctgattacatcaatgccagttttattgatggatacagacaacagaaagcctacatcgctacccaggggcccttggcagagaccactgaagacttctggcggatgctctgggaacacaattccaccatagttgtgatgctcaccaagctgcgtgaaatgggcagagagaaatgtcaccaatactggccagcagaacggtctgcaagataccagtactttgttgtagatcccatggctgagtacaacatgccacagtatatcctaagggaattcaaggtcacagatgccagggacggccagtcccgaacagtaaggcagttccagttcactgactggccagagcaaggagtgccaaagtccggagaaggatttattgacttcatcggccaagtccataaaacaaaagaacagtttggccaagatggacccatttcagtccattgcagcgcgggcgttggaagaactggagtcttcataacgctaagcattgttttggaaagaatgagatatgaaggagttgtagatatcttccagactgtcaaaatgttaagaacacaacgaccagctatggtacagacagaggatcaatatcagttttcctatcgtgccgcactagagtacctgggcagctttgaccactatgcaacgtagaaacccctgacccattctggatttttactacaggcccttcaatatccatggagtctcttctgagccatacagggcacttgagaagtccttcttaacttctagctaacaactacttagtgggactattacacacaaaacaaattaaaaacaaattattccaggtggaccaaggactctgctttgacatcgccccttcccaccatactgctcataataacattttagggggaaaggggagggaatgtttaaaaagaaagtccttgatttagttttttagtattgtaaagatactgctgacctgtgcttcatttctaactgtgtaaacttttttttaacaaaatgtatcattcgataaagtgaatttt

SEQ ID NO: 171766 - DNA, 8224 bp, Homo sapiens
  Payload ID: 13759
  Gene Symbol: PTPRD
  Gene Name: protein tyrosine phosphatase, receptor type, D
  ENST ID: ENST00000537002
  CDS Start-End: 107-4597
caggctctgaaagtgttccagctgaaatttcagatcggacagactcgctgcggctccggaggcagtgattccaagctgctcgcgcacgctgctgccaagctgcaggatggtgcacgtagccaggctgctgctgctgctcctcactttcttcctccgcacggatgctgagacacctccaaggtttacacgaacacccgttgatcagacaggggtctctggcggagttgcctctttcatctgccaagctacgggagacccaagacctaaaattgtctggaacaaaaaaggaaagaaagtcagcaatcagagatttgaggtaatagagtttgacgatgggtctggatcagttctcagaatacaacccttacggactccgagggatgaggccatttatgaatgtgtggcctcaaataatgtgggagaaataagtgtatccaccagactcacagttttgcgggaagatcaaattcccaggggcttccctaccattgacatgggcccacagttgaaggtggttgagcgtactcgcacggccaccatgctttgtgcagccagtggtaatccggatccagaaatcacttggtttaaagatttcttacctgtggacacaagcaacaacaatggtcgtattaagcagttacgatcagaatctattggagcccttcagattgagcagagtgaagagtctgaccaaggaaaatatgagtgtgttgccaccaacagcgcgggcactcgctattccgctcctgccaatttatatgtcagagagctgcgagaagttcgccgtgtcccaccaagattctctatcccacccactaatcatgaaatcatgccaggcggaagcgttaatatcacctgtgtggccgtggggtcaccaatgccttatgtaaagtggatgttgggggcagaagatctgacacctgaagatgatatgccaataggaagaaatgtgctagaactgaatgatgtaagacagtcagcaaattacacctgtgttgctatgtcaacactgggtgtcattgaagcaatagcacagatcactgtcaaagccttacccaaacctccaggaactcctgtagtgaccgagagcacagctacaagcatcacactgacgtgggactctgggaaccctgagcctgtttcttattacataattcagcataaacctaaaaactctgaggaactttacaaagaaattgatggggtggcgaccacacgctacagtgtcgctggactaagtccctactcggattatgaattcagggttgttgctgtcaataacattgggcgggggcctcccagcgaacctgtgctaacacaaacctcagagcaagcaccatccagtgccccgagggatgtccaggcacgaatgttgagttcgaccaccattttggtacagtggaaggaacctgaagagccaaatggacagatccaaggatatagagtttattatacaatggatcccactcaacatgtcaacaactggatgaaacacaatgtagctgacagccaaatcactactattggcaacttagtgccccagaaaacatattctgtcaaagtcctggcttttacctcaattggagatggtcccctttcaagtgacatacaagtcatcactcagacaggagtaccagggcagccactaaacttcaaagcagaacctgagtctgaaacaagtattttgctctcttggacacctccacgttcagataccattgccaactatgaactggtctacaaagatggggagcatggagaggagcaacgaattaccattgagccagggacatcatataggctgcaaggactgaaaccaaacagcttatactatttccgtctggctgcacgctcccctcaaggcctgggtgcttctactgcagaaatatcagctagaaccatgcagtcaacagtgtttgcaaaaaattttcatgtcaaagcagtaatgaagacttccgtgttgctgtcttgggagattccagagaattataactccgccatgcctttcaaaattctttatgatgatgggaaaatggtagaagaagtggatggccgagccacacagaagttaattgtcaacctgaagcctgagaaatcatattcatttgtgctgacaaatcgtggaaacagtgctggtgggctgcagcacagggtcacggcaaagactgcaccagatgtattacgtaccaagcctgccttcattgggaagaccaacttggatggcatgattactgtgcaactgcctgaagtacctgcaaatgagaatataaaaggttactacataataattgtgcctttgaagaaatctcgcgggaaatttatcaagccatgggagagtccagatgaaatggaattagatgagctgcttaaggagatatctaggaagcgcagaagcatccgttatgggagagaagttgaattaaagccatatattgccgctcactttgatgtccttcccactgagttcaccctgggggatgacaagcattatggtggatttacaaacaagcaactccaaagtggtcaagaatatgtcttctttgtgttagcagtaatggaacatgcagagtctaagatgtatgcaaccagcccttactccgaccccgtggtgtcaatggatctggatccgcagccaatcacggatgaagaagaaggcttgatctgggttgtaggtcctgtccttgcagtggtctttatcatctgcattgtcattgctattcttctttataaaaggaagagggcagagtccgactctagaaaaagcagcataccgaacaataaggagatcccttcacaccacccaacagaccctgtagaactgaggcgccttaactttcaaacaccgggtatggctagccatcctccaatacccatcttggaacttgcagaccacattgaaagattgaaagcaaatgacaacttgaagttttcccaggaatatgagtcaattgaccctggccagcagttcacttgggaacattcaaacttggaagtaaacaaaccaaagaatagatacgcgaatgtaatcgcatatgatcattcccgggttctcctatcagctatagaagggatcccaggaagtgactatgtgaatgccaactacatagatgggtataggaagcaaaatgcctatattgcaacacagggatctctccccgaaacatttggggacttttggagaatgatatgggaacaacggagtgccacagttgtcatgatgacaaaactagaagaaagatcaagggtgaagtgtgaccagtattggcctagcagaggcacagaaacccacggactcgttcaagtaacgctgcttgatactgtggagctggccacatattgtgttcgaacatttgcactttacaagaatggttcaagtgagaagagagaagtgagacaattccagttcaccgcctggcctgatcatggtgttccagaacaccctacaccttttctagctttcttacgtagagtcaaaacctgtaaccctcccgatgctggtccgatggttgtgcactgcagtgcgggagttggccggactggttgcttcatcgtcatagatgccatgttagaaagaataaagcatgaaaaaactgtagatatttatggccatgtaactttaatgagagcccagaggaactatatggttcaaacagaagaccaatacatctttatccatgatgcactgttagaagcagtgacttgtggaaataccgaagtgccagctagaaacttgtatgcctacattcagaagctgacacaaatagaaacgggagagaatgtcacaggaatggagctcgaatttaagcgtctagccagctcaaaagctcacacctcaaggtttatcagtgccaatcttccatgtaataaattcaaaaatcgccttgttaatattatgccatatgaatccacaagggtatgcctgcagcctatccgtggagtagaaggatctgattacatcaatgccagttttattgatggatacagacaacagaaagcctacatcgctacccaggggcccttggcagagaccactgaagacttctggcggatgctctgggaacacaattccaccatagttgtgatgctcaccaagctgcgtgaaatgggcagagagaaatgtcaccaatactggccagcagaacggtctgcaagataccagtactttgttgtagatcccatggctgagtacaacatgccacagtatatcctaagggaattcaaggtcacagatgccagggacggccagtcccgaacagtaaggcagttccagttcactgactggccagagcaaggagtgccaaagtccggagaaggatttattgacttcatcggccaagtccataaaacaaaagaacagtttggccaagatggacccatttcagtccattgcagcgcgggcgttggaagaactggagtcttcataacgctaagcattgttttggaaagaatgagatatgaaggagttgtagatatcttccagactgtcaaaatgttaagaacacaacgaccagctatggtacagacagaggatcaatatcagttttcctatcgtgccgcactagagtacctgggcagctttgaccactatgcaacgtagaaacccctgacccattctggatttttactacaggcccttcaatatccatggagtctcttctgagccatacagggcacttgagaagtccttcttaacttctagctaacaactacttagtgggactattacacacaaaacaaattaaaaacaaattattccaggtggaccaagaattcacagtttaataatctaacctgaaaaataatgaagagaatcctgactgatgaggcatctgaaggattttatttacagatacctcaaggattcaaaatcaagggaagaagaaatcacagcaaagaaccaccatcttattcaggattgcttgaaaggtgcaaggagaaattgccagaatgctgcagttcagcacaagatatgtgctggtgtggcttctcacaatgaaacggactctgctttgacatcgccccttcccaccatactgctcataataacattttagggggaaaggggagggaatgtttaaaaagaaagtccttgatttagttttttagtattgtaaagatactgctgacctgtgcttcatttctaactgtgtaaacttttttttaacaaaatgtatcattcgataaagtgaattttaaaaaagttacataactcttcatttttttatttccaaatcgtaggtttttttaagctgtagaactgttatctgtaatatcttgctgtagaaatatcaaatcatttgaaaatttgcacatttttgtgcaaaactcaatctacagtatcagtctcgtcagatatattaattttacacttcagttttgattggtgagaaagtacccattctcttcaaataatcaaagataattattattttgttttgtttttggaatcaacagggaggcgcaaagtataaagttgctgctaacatatatacatatatatccatattttataagggtgtctatgtatatatagacagtgtgtccacacaaaaaatagatacagttatcagtcagtcagttcttccatgatttagtttttttaaacgtagaaaagctattgtaaacatctctttccatttattcttaattttttgacatattggtatttctttaaagggaaatgaggaatgcacatcagtgattgattgtcaaacctcaccccctgatttcctacctaatctacccccacctaaccaatcaatcacatccacaaattgttttgtttgtttgttagtcaggcttccaacaaagttcaatatttctaacactctagtgcaataaaaattattattaaatagctaagaggtgtgcatgtgggaaaggtcagtgcatatccctttaggaggggagaatgttgtaatatatcagctatcgagttgtttaaaaaaagtgtattcaatcgtatattgtctatagtatgtgctatgaaatttgcatttatgatatgtaacaggggcaaagccaaattcatgttactctgttcagtcagaaacattttgtggcatacagcattcctgggaagtgctgtactttgtttcgttttggttttagttttgcatttagagtgccttataattgatgcctattttaatagcatttctttttagcttttggttcgtatttccattcactgttcgtatctgttactttctattaaagcattatctgtttaccacatgtacaaaaactctttgaataatatgcattcctagttttcagccaagtcggggatgttagtgattgtaccagcccaaagcacttggataatcagggcccttcttccttttataatcaatcatcaacatcagaaaaagctacttgttttatttatattcccttccaaatccgctctggaacatgcagtaactgcaccaaacttattttagtaacaaatatcattggcaactttggaatatatttgatattccattaggatttttctaaaaggggaaataaactatatatatatatgtatcttacccccaattcttccaacagaatttctataggaagccatggatgatggcataagtttgccacatattacatgattttaaataatcctcaaaatacccaaggaactcttaaagagttttggtatgagtatactactttggtttaattttagcttcatggatgttctgcatggaaggatttttgttttccacattttcccattgctagcagagtgaaatccaagagaccaaacatttgcaagcattgtatttgagcacttttgtaaaaaacaaagaaaaagaaaaaaaagaaaatatatataatactaaaaaaaagtatctagaaggctacctcagaatgagactctctaacctacatcagaaccagagaagaatgtgcactatgtgggtctgttatcattattttcttttagtttgtatctttttggagatttatccaagtgccagattactcagtgctataattttcttttagttaaacaaagggggtcagacagacattgcatcatccagacatgccttgttggacatgtagaatccgatggagcactgcacaccagaatgattggccaatgagcagcttctctccctgaaacaataactgcccatttggcaaagggaaagatgacaataatcagaagaagaaaatgaatgggatgcataccatagacgaacgaggcggagactattgcgggaatcttactgttcaggagctgttcctagaactaactcccttactgtcattgatgtgcattccactctgtgcttttctgtacaaccattcaagttttaatttcccaggtgaaccatctttatctgccattaccacaagctttcaagtttccagttattttcatcatcataaccagtacggtgctattatttacctatgtacgtgtagttatgtataattttgtaattagttacaatggtaaaaaaaatcaaaatatataaaaagtgatttgtacagaactttattttagctcttttttaaaaatgatttgcatggttagaaaacggcgaggacagccaggggagggaagggcctctagggaactttgcactttctatacctttgtactatgcactgccctattgattctacacccaataatgatattacttgaacccatctgtaagaaactgcttcggaaattcatttgtgtgtatgtaaataacacaacatagaaacaggaagggaaaaaagtctgcagtaatgcacgtattttttttctttcctgtttattttcggttttgctttaagtccttttatttttaattccctttttgtttttctttttgggttttggttccttttgggtttatgggtgccctgatactccagcagagatcagaaggctacagatccattctatccatccgttatgtggctttgccatcccagcttggagtgtctttacaaagataataacagttgtgttctttgctctcgttttggatgcatagactgaaaaattaaaacaaataacttgtaaaatggcttgttaaaaaatacaattacctctaattagtagtacgcgtaaatgttttacagaatgaaaggcgtgctttttattttcttacttcgttacattggtggcgaaagaagtctgtatgaaaatcagttctttgctgacacaagttccatttgttacaaatgaattctaataaaaatgtcagtgttatgc

SEQ ID NO: 171767 - DNA, 5331 bp, Homo sapiens
  Payload ID: 13760
  Gene Symbol: PTPRE
  Gene Name: protein tyrosine phosphatase, receptor type, E
  Uniprot ID: P23469
  ENST ID: ENST00000254667
  CDS Start-End: 280-2382
agccggagctggagccgaggcggcggcgggacgcggccggccggacaaatttcctgctaggctgcggacagcgggcggcaggagccggcgcgagcggcttcaggaacccacggcctctgcgcgtccccgcgacccttcttcgcgcccggcgaagacagccgggcgccccggagggcggcgggcaggcgcccgggagatgcggagcctccgctgcagcgcgatctgcgcgaccagaccggcccccccgagactatagccttcactttccctcggtccaccatggagcccttgtgtccactcctgctggtgggttttagcttgccgctcgccagggctctcaggggcaacgagaccactgccgacagcaacgagacaaccacgacctcaggccctccggacccgggcgcctcccagccgctgctggcctggctgctactgccgctgctgctcctcctcctcgtgctccttctcgccgcctacttcttcaggttcaggaagcagaggaaagctgtggtcagcaccagcgacaagaagatgcccaacggaatcttggaggagcaagagcagcaaagggtgatgctgctcagcaggtcaccctcagggcccaagaagtattttcccatccccgtggagcacctggaggaggagatccgtatcagatccgccgacgactgcaagcagtttcgggaggagttcaactcattgccatctggacacatacaaggaacttttgaactggcaaataaagaagaaaacagagaaaaaaacagatatcccaacatccttcccaatgaccattctagggtgattctgagccaactggatggaattccctgttcagactacatcaatgcttcctacatagatggttacaaagagaagaataaattcatagcagctcaaggtcccaaacaggaaacggttaacgacttctggagaatggtctgggagcaaaagtctgcgaccatcgtcatgttaacaaacttgaaagaaaggaaagaggaaaagtgccatcagtactggcccgaccaaggctgctggacctatggaaacatccgggtgtgcgtggaggactgcgtggttttggtcgactacaccatccggaagttctgcatacagccacagctccccgacggctgcaaagcccccaggctggtctcacagctgcacttcaccagctggcccgacttcggagtgccttttacccccattgggatgctgaagttcctcaagaaagtaaagacgctcaaccccgtgcacgctgggcccatcgtggtccactgtagcgcgggcgtgggccggacgggcaccttcattgtgatcgatgccatgatggccatgatgcacgcggagcagaaggtggatgtgtttgaatttgtgtctcgaatccgtaatcagcgccctcagatggttcaaacggatatgcagtacacgttcatctaccaagccttactcgagtactacctctacggggacacagagctggacgtgtcctccctggagaagcacctgcagaccatgcacggcaccaccacccacttcgacaagatcgggctggaggaggagttcaggaaattgacaaatgtccggatcatgaaggagaacatgaggacgggcaacttgccggcaaacatgaagaaggccagggtcatccagatcatcccgtatgacttcaaccgagtgatcctttccatgaaaaggggtcaagaatacacagactacatcaacgcatccttcatagacggctaccgacagaaggactatttcatcgccacccaggggccactggcacacacggttgaggacttctggaggatgatctgggaatggaaatcccacactatcgtgatgctgacggaggtgcaggagagagagcaggataaatgctaccagtattggccaaccgagggctcagttactcatggagaaataacgattgagataaagaatgataccctttcagaagccatcagtatacgagactttctggtcactctcaatcagccccaggcccgccaggaggagcaggtccgagtagtgcgccagtttcacttccacggctggcctgagatcgggattcccgccgagggcaaaggcatgattgacctcatcgcagccgtgcagaagcagcagcagcagacaggcaaccaccccatcaccgtgcactgcagtgccggagctgggcgaacaggtacattcatagccctcagcaacattttggagcgagtaaaagccgagggacttttagatgtatttcaagctgtgaagagtttacgacttcagagaccacatatggtgcaaaccctggaacagtatgaattctgctacaaagtggtacaagattttattgatatattttctgattatgctaatttcaaatgaagattcctgccttaaaatattttttaatttaatggtcagtatattttgtaaaaatcatgttaatttatttcatagttgacattaatatcttccctaatttctttgtatatattttgttatgccttaaaggccacctgctatacagttgttaaatcttaaatatgctttttaaaaattggaataatgtattaaggtcaaataatatcccataaaatatatatttctgctaatattagtaaatatcttaatttttcattagattcatatcatttaatttcacatattcaacacctttaaatgttgtaatcttaatatgcgaagtgtgcctctgcaagatactaacacaaagctcatgttaagaaaacagttgaggactcagaagtcagttcgaaaatgcactttcctaacagtgaattcacaaccctgaacagcagcatttttggaaggcaaactgttcgtgatggtacaatgtaaatggggacttctgtaaagttctcagtttcggtccatgtggtttatctttacattttaaagatcaaagaagtctttacaacctgaatccaggtctaaaacacactagagtagctggtgactataaataatattttaaaatgctgtgtctacaccatcaagactgtgtctacactatcttggctgaacgagaagagatgtaaatgctgggtggtcccgttgacccacggcgttgggtacaacaaaaccagccatcggagttacaccccaaagcaccatttgctgtccagctgcctgtcgtttggcccagaccaccctcagaaaaaaaccagctgcctctcccattctcccctcccgttctgccacagcggcctgggctggtccagtgctatgcctggaggctcaacacaaaacttcccatccaaacattcagatgaactgagcgtcttacacacgcagtacagaggagcacacattaggatagaaacagtagaataaccacgggcaattaaactttaaattttctgagcagcattttggtatttaaacatttcttgtaaaaagctgagacagtttgtaagaaaagaatccttaaaatctagatttataccattttttaaagtcccacctttcaatgtttaataaaacaaaaagagaaatccttaatctaaaagctaaattatttttgaatggaaatactactgagaccattgacactggataacagtaatgatcccattaccagataagattgactgacggggaaaaaaaaaaaaaaagaatggggtgtgaatgtaccaacactgaatcttacagcagttatctttctatggccattaggtacctagcagatgtgcacaatataaacaaaaagatatctggcctaccttactactaaaagcatttaacacgtgcatttttggtacttttttttttgttttctaaaagctacataaaggccttatttgacattttcactgataactgatcgcaccctcatgttgcagtgttcgtcccctattcattaacagtgtgtgcaaatgcaaccccaggacacattattgttctgatagatgctcacagggaatcaagcttctcgcccactccacggctctgagccccatccaagggcaagacttggtgcccagctggaaggacgaaagcacactttgtgaccgccatcctcaccagctgcatgcctgggctgcacactgctgaacgtgctcctctctccttctctgtacaatgattcagcatctcggcggaagaggaaaatggagctttttgaggctcgccaggtcccttttgttttcaccattaaaattccaaacccaaagcctttgtttgactgaaggagaagagagggaagtaagcttctgttcagcacctgaaccctagaaaaagagccagtttgctacgatgaaggtgacatttctctggtcatttatttgagagttcgaagtcaaagtcgaggggcaccggctttggttcatgtctaggagccctctgtcagaatccttgaagccctttaatggtctaactggcatctcttgtatcaagaagtacctttaaggtagaccttttcagggtgccctcaggaaagggccctgctcatgtttttttcctgtccccttagaccaaccccaggtgtccactgcaggggttctgcctgttcccaaactttttccattccaggaacaaaggagaagccactttccccaggacgcaagactctcccctccactgtccgggacagcgttcgccctttagcggggaggtcattacagcctcatggcctctaccaaggccccagatcacaggatctcctgggccttggagcacctcacgctgggggaatcaatccctgagggactcagaatcttctccgtgcaacctggaaagttcatctcttgtttccttcagtcaaagaaagtccattgtacataacaaaacagcccccaaacagcccagtgccgacaccattgttcctttcacactttcctttgttgcatgcagttgggttcaaatgccaaatagtgattagaagacgaccattctgatctgtgtgtgatctggtcactatgtgactgcctttacggtttctctccatgtgctatatgaatgaagaatgcataccagtgttttaaaaggtatttttatgtgtttttaaacacttttttaaatgagcctgacacctgtgtttcagcatttggagacatccccatgttattcttttaagtgtataattactgatacttttttgtttgtttgtttaactaagttgtgtttaacttatgtgcagtctttataatgtatgtatgttattacagtttcaactatcatattttctttgattacatttataatttgatcttgctctgattataatgccagtgaatgttgctgaactctttgtatatgcaaattgcaagatttaaaccattctgatgcaaggataaacctttactttgactacca

SEQ ID NO: 171768 - DNA, 4957 bp, Homo sapiens
  Payload ID: 13760
  Gene Symbol: PTPRE
  Gene Name: protein tyrosine phosphatase, receptor type, E
  Uniprot ID: P23469
  ENST ID: ENST00000306042
  CDS Start-End: 80-2008
gtgcagcagagggcagctgagaggctgggtggctgggcctgggagacacacagaggccaggccttagcgcggctcagccatgagcaacaggagtagcttttcccggctcacctggttcaggaagcagaggaaagctgtggtcagcaccagcgacaagaagatgcccaacggaatcttggaggagcaagagcagcaaagggtgatgctgctcagcaggtcaccctcagggcccaagaagtattttcccatccccgtggagcacctggaggaggagatccgtatcagatccgccgacgactgcaagcagtttcgggaggagttcaactcattgccatctggacacatacaaggaacttttgaactggcaaataaagaagaaaacagagaaaaaaacagatatcccaacatccttcccaatgaccattctagggtgattctgagccaactggatggaattccctgttcagactacatcaatgcttcctacatagatggttacaaagagaagaataaattcatagcagctcaaggtcccaaacaggaaacggttaacgacttctggagaatggtctgggagcaaaagtctgcgaccatcgtcatgttaacaaacttgaaagaaaggaaagaggaaaagtgccatcagtactggcccgaccaaggctgctggacctatggaaacatccgggtgtgcgtggaggactgcgtggttttggtcgactacaccatccggaagttctgcatacagccacagctccccgacggctgcaaagcccccaggctggtctcacagctgcacttcaccagctggcccgacttcggagtgccttttacccccattgggatgctgaagttcctcaagaaagtaaagacgctcaaccccgtgcacgctgggcccatcgtggtccactgtagcgcgggcgtgggccggacgggcaccttcattgtgatcgatgccatgatggccatgatgcacgcggagcagaaggtggatgtgtttgaatttgtgtctcgaatccgtaatcagcgccctcagatggttcaaacggatatgcagtacacgttcatctaccaagccttactcgagtactacctctacggggacacagagctggacgtgtcctccctggagaagcacctgcagaccatgcacggcaccaccacccacttcgacaagatcgggctggaggaggagttcaggaaattgacaaatgtccggatcatgaaggagaacatgaggacgggcaacttgccggcaaacatgaagaaggccagggtcatccagatcatcccgtatgacttcaaccgagtgatcctttccatgaaaaggggtcaagaatacacagactacatcaacgcatccttcatagacggctaccgacagaaggactatttcatcgccacccaggggccactggcacacacggttgaggacttctggaggatgatctgggaatggaaatcccacactatcgtgatgctgacggaggtgcaggagagagagcaggataaatgctaccagtattggccaaccgagggctcagttactcatggagaaataacgattgagataaagaatgataccctttcagaagccatcagtatacgagactttctggtcactctcaatcagccccaggcccgccaggaggagcaggtccgagtagtgcgccagtttcacttccacggctggcctgagatcgggattcccgccgagggcaaaggcatgattgacctcatcgcagccgtgcagaagcagcagcagcagacaggcaaccaccccatcaccgtgcactgcagtgccggagctgggcgaacaggtacattcatagccctcagcaacattttggagcgagtaaaagccgagggacttttagatgtatttcaagctgtgaagagtttacgacttcagagaccacatatggtgcaaaccctggaacagtatgaattctgctacaaagtggtacaagattttattgatatattttctgattatgctaatttcaaatgaagattcctgccttaaaatattttttaatttaatggtcagtatattttgtaaaaatcatgttaatttatttcatagttgacattaatatcttccctaatttctttgtatatattttgttatgccttaaaggccacctgctatacagttgttaaatcttaaatatgctttttaaaaattggaataatgtattaaggtcaaataatatcccataaaatatatatttctgctaatattagtaaatatcttaatttttcattagattcatatcatttaatttcacatattcaacacctttaaatgttgtaatcttaatatgcgaagtgtgcctctgcaagatactaacacaaagctcatgttaagaaaacagttgaggactcagaagtcagttcgaaaatgcactttcctaacagtgaattcacaaccctgaacagcagcatttttggaaggcaaactgttcgtgatggtacaatgtaaatggggacttctgtaaagttctcagtttcggtccatgtggtttatctttacattttaaagatcaaagaagtctttacaacctgaatccaggtctaaaacacactagagtagctggtgactataaataatattttaaaatgctgtgtctacaccatcaagactgtgtctacactatcttggctgaacgagaagagatgtaaatgctgggtggtcccgttgacccacggcgttgggtacaacaaaaccagccatcggagttacaccccaaagcaccatttgctgtccagctgcctgtcgtttggcccagaccaccctcagaaaaaaaccagctgcctctcccattctcccctcccgttctgccacagcggcctgggctggtccagtgctatgcctggaggctcaacacaaaacttcccatccaaacattcagatgaactgagcgtcttacacacgcagtacagaggagcacacattaggatagaaacagtagaataaccacgggcaattaaactttaaattttctgagcagcattttggtatttaaacatttcttgtaaaaagctgagacagtttgtaagaaaagaatccttaaaatctagatttataccattttttaaagtcccacctttcaatgtttaataaaacaaaaagagaaatccttaatctaaaagctaaattatttttgaatggaaatactactgagaccattgacactggataacagtaatgatcccattaccagataagattgactgacggggaaaaaaaaaaaaaaagaatggggtgtgaatgtaccaacactgaatcttacagcagttatctttctatggccattaggtacctagcagatgtgcacaatataaacaaaaagatatctggcctaccttactactaaaagcatttaacacgtgcatttttggtacttttttttttgttttctaaaagctacataaaggccttatttgacattttcactgataactgatcgcaccctcatgttgcagtgttcgtcccctattcattaacagtgtgtgcaaatgcaaccccaggacacattattgttctgatagatgctcacagggaatcaagcttctcgcccactccacggctctgagccccatccaagggcaagacttggtgcccagctggaaggacgaaagcacactttgtgaccgccatcctcaccagctgcatgcctgggctgcacactgctgaacgtgctcctctctccttctctgtacaatgattcagcatctcggcggaagaggaaaatggagctttttgaggctcgccaggtcccttttgttttcaccattaaaattccaaacccaaagcctttgtttgactgaaggagaagagagggaagtaagcttctgttcagcacctgaaccctagaaaaagagccagtttgctacgatgaaggtgacatttctctggtcatttatttgagagttcgaagtcaaagtcgaggggcaccggctttggttcatgtctaggagccctctgtcagaatccttgaagccctttaatggtctaactggcatctcttgtatcaagaagtacctttaaggtagaccttttcagggtgccctcaggaaagggccctgctcatgtttttttcctgtccccttagaccaaccccaggtgtccactgcaggggttctgcctgttcccaaactttttccattccaggaacaaaggagaagccactttccccaggacgcaagactctcccctccactgtccgggacagcgttcgccctttagcggggaggtcattacagcctcatggcctctaccaaggccccagatcacaggatctcctgggccttggagcacctcacgctgggggaatcaatccctgagggactcagaatcttctccgtgcaacctggaaagttcatctcttgtttccttcagtcaaagaaagtccattgtacataacaaaacagcccccaaacagcccagtgccgacaccattgttcctttcacactttcctttgttgcatgcagttgggttcaaatgccaaatagtgattagaagacgaccattctgatctgtgtgtgatctggtcactatgtgactgcctttacggtttctctccatgtgctatatgaatgaagaatgcataccagtgttttaaaaggtatttttatgtgtttttaaacacttttttaaatgagcctgacacctgtgtttcagcatttggagacatccccatgttattcttttaagtgtataattactgatacttttttgtttgtttgtttaactaagttgtgtttaacttatgtgcagtctttataatgtatgtatgttattacagtttcaactatcatattttctttgattacatttataatttgatcttgctctgattataatgccagtgaatgttgctgaactctttgtatatgcaaattgcaagatttaaaccattctgatgcaaggataaacctttactttgactacca

SEQ ID NO: 171769 - DNA, 779 bp, Homo sapiens
  Payload ID: 13760
  Gene Symbol: PTPRE
  Gene Name: protein tyrosine phosphatase, receptor type, E
  ENST ID: ENST00000442830
  CDS Start-End: 360-779
gagcggcttcaggaacccacggcctctgcgcgtccccgcgacccttcttcgcgcccggcgaagacagccgggcgccccggagggcggcgggcaggcgcccgggagatgcggagcctccgctgcagcgcgatctgcgcgaccagaccggcccccccgagtaagcgcttgcagccagttgtctagttgtcagaagccgagctcatcagcgggctcctggtgtcggcgttctgctgctggaaggtcagggagttccctggaccccacggaagaagctgtctccatgaaggacagggaccgtgccgtgaaccttttattctcccactgacatgactatagccttcactttccctcggtccaccatggagcccttgtgtccactcctgctggtgggttttagcttgccgctcgccagggctctcaggggcaacgagaccactgccgacagcaacgagacaaccacgacctcaggccctccggacccgggcgcctcccagccgctgctggcctggctgctactgccgctgctgctcctcctcctcgtgctccttctcgccgcctacttcttcaggttcaggaagcagaggaaagctgtggtcagcaccagcgacaagaagatgcccaacggaatcttggaggagcaagagcagcaaagggtgatgctgctcagcaggtcaccctcagggcccaagaagtattttcccatccccgtggagcacctggaggaggagatccgtatcagatccgccgacgactgcaagcagtttcgggaggagttcaac

SEQ ID NO: 171770 - DNA, 2304 bp, Homo sapiens
  Payload ID: 13760
  Gene Symbol: PTPRE
  Gene Name: protein tyrosine phosphatase, receptor type, E
  ENST ID: ENST00000455661
  CDS Start-End: 1844-2304
atctcaaatcctgttgcagtcagtagcgctggctgtctgcagtagagatggttttcaatgattgtttcagaaattccttatcaacagaaaatgaacgagacggggagttttcagaaaataaatggatttgcagacaacttaacgtcatcatcgaagtcaccaaagaaagcaaagcagcgactggggaagctgaggctgaagtagcaagggcatgccacccaggctgctattccagtcgctgtgaaagcctggtcactgtctttgccacgcagaacacatctctgggaatgctgtcgatctatgcctccatcttttaaaggctttccatttctgtctggattttttctttatgggaggcagaaataatagtgaattgaatgaaatggagtatataagtgtctagcacagtccttggcacatagaaagtgctctgtaaacagtacttcgcatcaaattcttgggatgaatgaaagtgagtgcctggcgctgcacataagaaaagacgtggcagcaaaccatcctcccgacatgacgtgctgcgttggtgcgtttacgtccctgttccttctgaaagactcaaaattgtgttggagctactggtgcacctttgtaagacctgcactaacgaccgcgccactgggaagggcacttctttatgaagtcgccgtattcccagggagactggtcaacccatacaatgtgaaaaaaaaagaagctatgtgaaaaaatattcccctttgtcatagagaaggagaacttggtgaggctgggcagctgcaggagcctcagtttttcagataacagaacagagtagaccttgagggtccatttccctttttgttttaggaagtgctgtagaagggggcaaagagatctttgatatgagaaggtatttcttcaaagcagcatcgtgcctgaaatagcattgttctttacgctgagagaggaggaaatgggaatttggtgttcaacgggtttaaagtttcagttacaagaaatggacaagtccgagagctctgctgtgccacatcatgcctaaagtcaccgagactgtgttgtacacttttttgttaaaaggtaaatctcatgttaaatgttgttactacaattaaaaagaagccctaggctgtgtttgcagaaaggcactaaccatacatgtgctcaagagcccttttgtgttttcttcacttcatgttgtagttcaatttagttttgctttgcaaggatcctcggaaagtgtatcatcagcaatgacttttattttagaactaaatgtgaaccacggggggaatcatgatcgacattgctcgttgtcctttcttcctccctgtgggctgtgaatccaactcgtcctgggagcagggcgctctcgccttctgttcctctccgagctcagtgcacagaagcattctgcttacccagctgggactgctgactgcaccatcgagcacgcaggttgcactgttctcagcagctacactggattatatgccgcctttcttactgactgattatgaacttaaaacaaattcactctgctgctgtgaattatacatttatttttaagcatttatttcaactcgagatgagcggtctctcctgtaaatttctccctgctggatctttgctctggtttctggtgacatagtgtgagtgccggcagccgcgagcctcagaaggaaaattacaaagggaatactcagtaaatgatgtattgcctttcgcatcagtagcctgcttggaaatgttcaaattatcagcccaggagactccagtgctgtggacatgggtctgaacgaattgatcacctaggggctactgagaacgcggtgctctgtccaccatggagcccttgtgtccactcctgctggtgggttttagcttgccgctcgccagggctctcaggggcaacgagaccactgccgacagcaacgagacaaccacgacctcaggccctccggacccgggcgcctcccagccgctgctggcctggctgctactgccgctgctgctcctcctcctcgtgctccttctcgccgcctacttcttcaggttcaggaagcagaggaaagctgtggtcagcaccagcgacaagaagatgcccaacggaatcttggaggagcaagagcagcaaagggtgatgctgctcagcaggtcaccctcagggcccaagaagtattttcccatccccgtggagcacctggaggaggagatccgtatcagatccgccgacgactgcaagcagtttcgggaggagttcaactcattgccatctggacacatacaaggaacttttgaactggc

SEQ ID NO: 171771 - DNA, 5736 bp, Homo sapiens
  Payload ID: 13760
  Gene Symbol: PTPRE
  Gene Name: protein tyrosine phosphatase, receptor type, E
  ENST ID: ENST00000479896
  CDS Start-End: 19-1629
ccttagcgcggctcagccatgagcaacaggagtagcttttcccggctcacctggttcaggaagcagaggaaagctgtggtcagcaccagcgacaagaagatgcccaacggaatcttggaggagcaagagcagcaaagggtgatgctgctcagcaggtcaccctcagggcccaagaagtattttcccatccccgtggagcacctggaggaggagatccgtatcagatccgccgacgactgcaagcagtttcgggaggagttcaactcattgccatctggacacatacaaggaacttttgaactggcaaataaagaagaaaacagagaaaaaaacagatatcccaacatccttcccaatgaccattctagggtgattctgagccaactggatggaattccctgttcagactacatcaatgcttcctacatagatggttacaaagagaagaataaattcatagcagctcaaggtcccaaacaggaaacggttaacgacttctggagaatggtctgggagcaaaagtctgcgaccatcgtcatgttaacaaacttgaaagaaaggaaagaggaaaagtgccatcagtactggcccgaccaaggctgctggacctatggaaacatccgggtgtgcgtggaggactgcgtggttttggtcgactacaccatccggaagttctgcatacagccacagctccccgacggctgcaaagcccccaggctggtctcacagctgcacttcaccagctggcccgacttcggagtgccttttacccccattgggatgctgaagttcctcaagaaagtaaagacgctcaaccccgtgcacgctgggcccatcgtggtccactgtagcgcgggcgtgggccggacgggcaccttcattgtgatcgatgccatgatggccatgatgcacgcggagcagaaggtggatgtgtttgaatttgtgtctcgaatccgtaatcagcgccctcagatggttcaaacggatatgcagtacacgttcatctaccaagccttactcgagtactacctctacggggacacagagctggacgtgtcctccctggagaagcacctgcagaccatgcacggcaccaccacccacttcgacaagatcgggctggaggaggagttcaggaaattgacaaatgtccggatcatgaaggagaacatgaggacgggcaacttgccggcaaacatgaagaaggccagggtcatccagatcatcccgtgtaaggcacccgtggcgtggcttgggcagggctggggcggggctggtgccggaggctttcatcctggagaagccattgaccgcttacccctgtgcaccagggtcaaaagcagggtgtcctctggcctcaggctaagggctcctgtgtgctgtaccaaatgtcaggtagaaaagacacctgtgaagcaccagctgacccagacagtcctgcatgggtctcaggcaagctgcttcggatatgagcttgcagatgcgggagggcagccgaggctgatttcaggggagggcttcacagaagctggagatttgcggcaggcacgacttgggattccttgtctcattccttgtctccccaagcctgggcagaggcccgcctcccccttacacagaggggcctgagccacccagccgaggccatgcaggtgaactcagctgagaccacctaggaaaaggctgtggccttgaggaggacaagaaatgggcctagggtagagtcaggacactggtctgccacccaggtcatgggagagggaaggaggacctggcaggtgtgggaggagtggaggcaaagctggcaagaagacagggccacatgcagtgggcaggggagtgggaatcgggaggctcaccaagtgggaaaaagagaaacttgagaaacccggccccaaagcagactccacagggatccgaggaactagggagggaggtgggagatgccccgcttgggaggagggtgtgcctcgttatagacttgtcctcgacagagtcacagctcaacaaacaccatctggaaacagctgggagcaggcctgctgcagcagggtctccccgagcactgcagatgacttcaaccgagtgatcctttccatgaaaaggggtcaagaatacacagactacatcaacgcatccttcatagacggctaccgacagaaggactatttcatcgccacccaggggccactggcacacacggttgaggacttctggaggatgatctgggaatggaaatcccacactatcgtgatgctgacggaggtgcaggagagagagcaggataaatgctaccagtattggccaaccgagggctcagttactcatggagaaataacgattgagataaagaatgataccctttcagaagccatcagtatacgagactttctggtcactctcaatcagccccaggcccgccaggaggagcaggtccgagtagtgcgccagtttcacttccacggctggcctgagatcgggattcccgccgagggcaaaggcatgattgacctcatcgcagccgtgcagaagcagcagcagcagacaggcaaccaccccatcaccgtgcactgcagtgccggagctgggcgaacaggtacattcatagccctcagcaacattttggagcgagtaaaagccgagggacttttagatgtatttcaagctgtgaagagtttacgacttcagagaccacatatggtgcaaaccctggaacagtatgaattctgctacaaagtggtacaagattttattgatatattttctgattatgctaatttcaaatgaagattcctgccttaaaatattttttaatttaatggtcagtatattttgtaaaaatcatgttaatttatttcatagttgacattaatatcttccctaatttctttgtatatattttgttatgccttaaaggccacctgctatacagttgttaaatcttaaatatgctttttaaaaattggaataatgtattaaggtcaaataatatcccataaaatatatatttctgctaatattagtaaatatcttaatttttcattagattcatatcatttaatttcacatattcaacacctttaaatgttgtaatcttaatatgcgaagtgtgcctctgcaagatactaacacaaagctcatgttaagaaaacagttgaggactcagaagtcagttcgaaaatgcactttcctaacagtgaattcacaaccctgaacagcagcatttttggaaggcaaactgttcgtgatggtacaatgtaaatggggacttctgtaaagttctcagtttcggtccatgtggtttatctttacattttaaagatcaaagaagtctttacaacctgaatccaggtctaaaacacactagagtagctggtgactataaataatattttaaaatgctgtgtctacaccatcaagactgtgtctacactatcttggctgaacgagaagagatgtaaatgctgggtggtcccgttgacccacggcgttgggtacaacaaaaccagccatcggagttacaccccaaagcaccatttgctgtccagctgcctgtcgtttggcccagaccaccctcagaaaaaaaccagctgcctctcccattctcccctcccgttctgccacagcggcctgggctggtccagtgctatgcctggaggctcaacacaaaacttcccatccaaacattcagatgaactgagcgtcttacacacgcagtacagaggagcacacattaggatagaaacagtagaataaccacgggcaattaaactttaaattttctgagcagcattttggtatttaaacatttcttgtaaaaagctgagacagtttgtaagaaaagaatccttaaaatctagatttataccattttttaaagtcccacctttcaatgtttaataaaacaaaaagagaaatccttaatctaaaagctaaattatttttgaatggaaatactactgagaccattgacactggataacagtaatgatcccattaccagataagattgactgacggggaaaaaaaaaaaaaaagaatggggtgtgaatgtaccaacactgaatcttacagcagttatctttctatggccattaggtacctagcagatgtgcacaatataaacaaaaagatatctggcctaccttactactaaaagcatttaacacgtgcatttttggtacttttttttttgttttctaaaagctacataaaggccttatttgacattttcactgataactgatcgcaccctcatgttgcagtgttcgtcccctattcattaacagtgtgtgcaaatgcaaccccaggacacattattgttctgatagatgctcacagggaatcaagcttctcgcccactccacggctctgagccccatccaagggcaagacttggtgcccagctggaaggacgaaagcacactttgtgaccgccatcctcaccagctgcatgcctgggctgcacactgctgaacgtgctcctctctccttctctgtacaatgattcagcatctcggcggaagaggaaaatggagctttttgaggctcgccaggtcccttttgttttcaccattaaaattccaaacccaaagcctttgtttgactgaaggagaagagagggaagtaagcttctgttcagcacctgaaccctagaaaaagagccagtttgctacgatgaaggtgacatttctctggtcatttatttgagagttcgaagtcaaagtcgaggggcaccggctttggttcatgtctaggagccctctgtcagaatccttgaagccctttaatggtctaactggcatctcttgtatcaagaagtacctttaaggtagaccttttcagggtgccctcaggaaagggccctgctcatgtttttttcctgtccccttagaccaaccccaggtgtccactgcaggggttctgcctgttcccaaactttttccattccaggaacaaaggagaagccactttccccaggacgcaagactctcccctccactgtccgggacagcgttcgccctttagcggggaggtcattacagcctcatggcctctaccaaggccccagatcacaggatctcctgggccttggagcacctcacgctgggggaatcaatccctgagggactcagaatcttctccgtgcaacctggaaagttcatctcttgtttccttcagtcaaagaaagtccattgtacataacaaaacagcccccaaacagcccagtgccgacaccattgttcctttcacactttcctttgttgcatgcagttgggttcaaatgccaaatagtgattagaagacgaccattctgatctgtgtgtgatctggtcactatgtgactgcctttacggtttctctccatgtgctatatgaatgaagaatgcataccagtgttttaaaaggtatttttatgtgtttttaaacacttttttaaatgagcctgacacctgtgtttcagcatttggagacatccccatgttattcttttaagtgtataattactgatacttttttgtttgtttgtttaactaagttgtgtttaacttatgtgcagtctttataatgtatgtatgttattacagtttcaactatcatattttctttgattacatttataatttgatcttgctctgattataatgccagtgaatgttgctgaactctttgtatatgcaaattgcaagatttaaaccattctgatgcaaggataaacctttactttgactacca

SEQ ID NO: 171772 - DNA, 522 bp, Homo sapiens
  Payload ID: 13760
  Gene Symbol: PTPRE
  Gene Name: protein tyrosine phosphatase, receptor type, E
  ENST ID: ENST00000471218
  CDS Start-End: 60-509
ggattctccaaggccaggatggtttcccagcgtcttcccaggaagacaagaggtccaccatggagcccttgtgtccactcctgctggtgggttttagcttgccgctcgccagggctctcaggggcaacgagaccactgccgacagcaacgagacaaccacgacctcaggccctccggacccgggcgcctcccagccgctgctggcctggctgctactgccgctgctgctcctcctcctcgtgctccttctcgccgcctacttcttcaggttcaggaagcagaggaaagctgtggtcagcaccagcgacaagaagatgcccaacggaatcttggaggagcaagcaaagggtgatgctgctcagcaggtcaccctcagggcccaagaagtattttcccatccccgtggagcacctggaggaggagatccgtatcagatccgccgacgactgcaagcagtttcgggaggagttcaactcattgccatctggacacatacaaggaacttttgaactggcaaataaa

SEQ ID NO: 171773 - DNA, 338 bp, Homo sapiens
  Payload ID: 13760
  Gene Symbol: PTPRE
  Gene Name: protein tyrosine phosphatase, receptor type, E
  ENST ID: ENST00000467366
  CDS Start-End: 1-324
cgcctcccagccgctgctggcctggctgctactgccgctgctgctcctcctcctcgtgctccttctcgccgcctacttcttcaggaagcagaggaaagctgtggtcagcaccagcgacaagaagatgcccaacggaatcttggaggagcaagagcagcaaagggtgatgctgctcagcaggtcaccctcagggcccaagaagtattttcccatccccgtggagcacctggaggaggagatccgtatcagatccgccgacgactgcaagcagtttcgggaggagttcaactcattgccatctggacacatacaaggaacttttgaactggcaaataaag

SEQ ID NO: 171774 - DNA, 987 bp, Homo sapiens
  Payload ID: 13760
  Gene Symbol: PTPRE
  Gene Name: protein tyrosine phosphatase, receptor type, E
  ENST ID: ENST00000495530
  CDS Start-End: 21-377
ggccttagcgcggctcagccatgagcaacaggagtagcttttcccggctcacctggttcaggaagcagaggaaagctgtggtcagcaccagcgacaagaagatgcccaacggaatcttggaggagcaagagcagcaaagggtgatgctgctcagcaggtcaccctcagggcccaagaagtattttcccatccccgtggagcacctggaggaggagatccgtatcagatccgccgacgactgcaagcagtttcgggaggagttcaactcattgccatctggacacatacaaggaacttttgaactggcaaataaagaagaaaacagagaaaaaaacagatatcccaacatccttcccaggttacaaagagaagaataaattcatagcagctcaaggtcccaaacaggaaacggttaacgacttctggagaatggtctgggagcaaaagtctgcgaccatcgtcatgttaacaaacttgaaagaaaggaaagaggaaaagtgccatcagtactggcccgaccaaggctgctggacctatggaaacatccgggtgtgcgtggaggactgcgtggttttggtcgactacaccatccggaagttctgcatacagccacagctccccgacggctgcaaagcccccaggctggtctcacagctgcacttcaccagctggcccgacttcggagtgccttttacccccattgggatgctgaagttcctcaagaaagtaaagacgctcaaccccgtgcacgctgggcccatcgtggtccactgtagcgcgggcgtgggccggacgggcaccttcattgtgatcgatgccatgatggccatgatgcacgcggagcagaaggtggatgtgtttgaatttgtgtctcgaatccgtaatcagcgccctcagatggttcaaacggatatgcagtacacgttcatctaccaagccttactcgagtactacctctacggggacacagagctggacgtgtcctcc

SEQ ID NO: 171775 - DNA, 7727 bp, Homo sapiens
  Payload ID: 13761
  Gene Symbol: PTPRF
  Gene Name: protein tyrosine phosphatase, receptor type, F
  Uniprot ID: P10586
  ENST ID: ENST00000359947
  CDS Start-End: 341-6064
cgggagcggcgggagcggtggcggcggcagaggcggcggctccagcttcggctccggctcgggctcgggctccggctccggctccggctccggctccagctcgggtggcggtggcgggagcgggaccaggtggaggcggcggcggcagaggagtgggagcagcggccctagcggcttgcggggggacatgcggaccgacggcccctggataggcggaaggagtggaggccctggtgcccggcccttggtgctgagtatccagcaagagtgaccggggtgaagaagcaaagactcggttgattgtcctgggctgtggctggctgtggagctagagccctggatggcccctgagccagccccagggaggacgatggtgccccttgtgcctgcactggtgatgcttggtttggtggcaggcgcccatggtgacagcaaacctgtcttcattaaagtccctgaggaccagactgggctgtcaggaggggtagcctccttcgtgtgccaagctacaggagaacccaagccgcgcatcacatggatgaagaaggggaagaaagtcagctcccagcgcttcgaggtcattgagtttgatgatggggcagggtcagtgcttcggatccagccattgcgggtgcagcgagatgaagccatctatgagtgtacagctactaacagcctgggtgagatcaacactagtgccaagctctcagtgctcgaagaggaacagctgccccctgggttcccttccatcgacatggggcctcagctgaaggtggtggagaaggcacgcacagccaccatgctatgtgccgcaggcggaaatccagaccctgagatttcttggttcaaggacttccttcctgtagaccctgccacgagcaacggccgcatcaagcagctgcgttcaggtgccttgcagatagagagcagtgaggaatccgaccaaggcaagtacgagtgtgtggcgaccaactcggcaggcacacgttactcagcccctgcgaacctgtatgtgcgagtgcgccgcgtggctcctcgtttctccatccctcccagcagccaggaggtgatgccaggcggcagcgtgaacctgacatgcgtggcagtgggtgcacccatgccctacgtgaagtggatgatgggggccgaggagctcaccaaggaggatgagatgccagttggccgcaacgtcctggagctcagcaatgtcgtacgctctgccaactacacctgtgtggccatctcctcgctgggcatgatcgaggccacagcccaggtcacagtgaaagctcttccaaagcctccgattgatcttgtggtgacagagacaactgccaccagtgtcaccctcacctgggactctgggaactcggagcctgtaacctactatggcatccagtaccgcgcagcgggcacggagggcccctttcaggaggtggatggtgtggccaccacccgctacagcattggcggcctcagccctttctcggaatatgccttccgcgtgctggcggtgaacagcatcgggcgagggccgcccagcgaggcagtgcgggcacgcacgggagaacaggcgccctccagcccaccgcgccgcgtgcaggcacgcatgctgagcgccagcaccatgctggtgcagtgggagcctcccgaggagcccaacggcctggtgcggggataccgcgtctactatactccggactcccgccgccccccgaacgcctggcacaagcacaacaccgacgcggggctcctcacgaccgtgggcagcctgctgcctggcatcacctacagcctgcgcgtgcttgccttcaccgccgtgggcgatggccctcccagccccaccatccaggtcaagacgcagcagggagtgcctgcccagcccgcggacttccaggccgaggtggagtcggacaccaggatccagctctcgtggctgctgccccctcaggagcggatcatcatgtatgaactggtgtactgggcggcagaggacgaagaccaacagcacaaggtgaccttcgacccaacctcctcctacacactagaggacctgaagcctgacacactctaccgcttccagctggctgcacgctcggatatgggggtgggcgtcttcacccccaccattgaggcccgcacagcccagtccaccccctccgcccctccccagaaggtgatgtgtgtgagcatgggctccaccacggtccgggtaagttgggtcccgccgcctgccgacagccgcaacggcgttatcacccagtactccgtggcctacgaggcggtggacggcgaggaccgcgggcggcatgtggtggatggcatcagccgtgagcactccagctgggacctggtgggcctggagaagtggacggagtaccgggtgtgggtgcgggcacacacagacgtgggccccggccccgagagcagcccggtgctggtgcgcaccgatgaggacgtgcccagcgggcctccgcggaaggtggaggtggagccactgaactccactgctgtgcatgtctactggaagctgcctgtccccagcaagcagcatggccagatccgcggctaccaggtcacctacgtgcggctggagaatggcgagccccgtggactccccatcatccaagacgtcatgctagccgaggcccagtggcggccagaggagtccgaggactatgaaaccactatcagcggcctgaccccggagaccacctactccgttactgttgctgcctataccaccaagggggatggtgcccgcagcaagcccaaaattgtcactacaacaggtgcagtcccaggccggcccaccatgatgatcagcaccacggccatgaacactgcgctgctccagtggcacccacccaaggaactgcctggcgagctgctgggctaccggctgcagtactgccgggccgacgaggcgcggcccaacaccatagatttcggcaaggatgaccagcacttcacagtcaccggcctgcacaaggggaccacctacatcttccggcttgctgccaagaaccgggctggcttgggtgaggagttcgagaaggagatcaggacccccgaggacctgcccagcggcttcccccaaaacctgcatgtgacaggactgaccacgtctaccacagaactggcctgggacccgccagtgctggcggagaggaacgggcgcatcatcagctacaccgtggtgttccgagacatcaacagccaacaggagctgcagaacatcacgacagacacccgctttacccttactggcctcaagccagacaccacttacgacatcaaggtccgcgcatggaccagcaaaggctctggcccactcagccccagcatccagtcccggaccatgccggtggagcaagtgtttgccaagaacttccgggtggcggctgcaatgaagacgtctgtgctgctcagctgggaggttcccgactcctataagtcagctgtgccctttaagattctgtacaatgggcagagtgtggaggtggacgggcactcgatgcggaagctgatcgcagacctgcagcccaacacagagtactcgtttgtgctgatgaaccgtggcagcagcgcagggggcctgcagcacctggtgtccatccgcacagcccccgacctcctgcctcacaagccgctgcctgcctctgcctacatagaggacggccgcttcgatctctccatgccccatgtgcaagacccctcgcttgtcaggtggttctacattgttgtggtgcccattgaccgtgtgggcgggagcatgctgacgccaaggtggagcacacccgaggaactggagctggacgagcttctagaagccatcgagcaaggcggagaggagcagcggcggcggcggcggcaggcagaacgtctgaagccatatgtggctgctcaactggatgtgctcccggagacctttaccttgggggacaagaagaactaccggggcttctacaaccggcccctgtctccggacttgagctaccagtgctttgtgcttgcctccttgaaggaacccatggaccagaagcgctatgcctccagcccctactcggatgagatcgtggtccaggtgacaccagcccagcagcaggaggagccggagatgctgtgggtgacgggtcccgtgctggcagtcatcctcatcatcctcattgtcatcgccatcctcttgttcaaaaggaaaaggacccactctccgtcctctaaggatgagcagtcgatcggactgaaggactccttgctggcccactcctctgaccctgtggagatgcggaggctcaactaccagaccccaggtatgcgagaccacccacccatccccatcaccgacctggcggacaacatcgagcgcctcaaagccaacgatggcctcaagttctcccaggagtatgagtccatcgaccctggacagcagttcacgtgggagaattcaaacctggaggtgaacaagcccaagaaccgctatgcgaatgtcatcgcctacgaccactctcgagtcatccttacctctatcgatggcgtccccgggagtgactacatcaatgccaactacatcgatggctaccgcaagcagaatgcctacatcgccacgcagggccccctgcccgagaccatgggtgatttctggaggatggtgtgggaacagcgcacggccactgtggtcatgatgacacggctggaggagaagtcccgggtaaaatgtgatcagtactggccagcccgtggcaccgagacctgtggccttattcaggtgaccctgttggacacagtggagctggccacatacactgtgcgcaccttcgcactccacaagagtggctccagtgagaagcgcgagctgcgtcagtttcagttcatggcctggccagaccatggagttcctgagtacccaactcccatcctggccttcctacgacgggtcaaggcctgcaaccccctagacgcagggcccatggtggtgcactgcagcgcgggcgtgggccgcaccggctgcttcatcgtgattgatgccatgttggagcggatgaagcacgagaagacggtggacatctatggccacgtgacctgcatgcgatcacagaggaactacatggtgcagacggaggaccagtacgtgttcatccatgaggcgctgctggaggctgccacgtgcggccacacagaggtgcctgcccgcaacctgtatgcccacatccagaagctgggccaagtgcctccaggggagagtgtgaccgccatggagctcgagttcaagttgctggccagctccaaggcccacacgtcccgcttcatcagcgccaacctgccctgcaacaagttcaagaaccggctggtgaacatcatgccctacgaattgacccgtgtgtgtctgcagcccatccgtggtgtggagggctctgactacatcaatgccagcttcctggatggttatagacagcagaaggcctacatagctacacaggggcctctggcagagagcaccgaggacttctggcgcatgctatgggagcacaattccaccatcatcgtcatgctgaccaagcttcgggagatgggcagggagaaatgccaccagtactggccagcagagcgctctgctcgctaccagtactttgttgttgacccgatggctgagtacaacatgccccagtatatcctgcgtgagttcaaggtcacggatgcccgggatgggcagtcaaggacaatccggcagttccagttcacagactggccagagcagggcgtgcccaagacaggcgagggattcattgacttcatcgggcaggtgcataagaccaaggagcagtttggacaggatgggcctatcacggtgcactgcagtgctggcgtgggccgcaccggggtgttcatcactctgagcatcgtcctggagcgcatgcgctacgagggcgtggtcgacatgtttcagaccgtgaagaccctgcgtacacagcgtcctgccatggtgcagacagaggaccagtatcagctgtgctaccgtgcggccctggagtacctcggcagctttgaccactatgcaacgtaactaccgctcccctctcctccgccacccccgccgtggggctccggaggggacccagctcctctgagccataccgaccatcgtccagccctcctacgcagatgctgtcactggcagagcacagcccacggggatcacagcgtttcaggaacgttgccacaccaatcagagagcctagaacatccctgggcaagtggatggcccagcaggcaggcactgtggcccttctgtccaccagacccacctggagcccgcttcaagctctctgttgcgctcccgcatttctcatgcttcttctcatggggtggggttggggcaaagcctcctttttaatacattaagtggggtagactgagggattttagcctcttccctctgatttttcctttcgcgaatccgtatctgcagaatgggccactgtaggggttggggtttattttgttttgtttttttttttcttgagttcactttggatccttattttgtatgacttctgctgaaggacagaacattgccttcctcgtgcagagctggggctgccagcctgagcggaggctcggccgtgggccgggaggcagtgctgatccggctgctcctccagcccttcagacgagatcctgtttcagctaaatgcagggaaactcaatgtttttttaagttttgttttccctttaaagcctttttttaggccacattgacagtggtgggcggggagaagatagggaacactcatccctggtcgtctatcccagtgtgtgtttaacattcacagcccagaaccacagatgtgtctgggagagcctggcaaggcattcctcatcaccatcgtgtttgcaaaggttaaaacaaaaacaaaaaaccacaaaaataaaaaacaaaaaaaacaaaaaacccaagaaaaaaaaaaagagtcagcccttggcttctgcttcaaaccctcaagaggggaagcaactccgtgtgcctggggttcccgagggagctgctggctgacctgggcccacagagcctggctttggtccccagcattgcagtatggtgtggtgtttgtaggctgtggggtctggctgtgtggccaaggtgaatagcacaggttagggtgtgtgccacaccccatgcacctcagggccaagcgggggcgtggctggcctttcaggtccaggccagtgggcctggtagcacatgtctgtcctcagagcaggggccagatgattttcctccctggtttgcagctgttttcaaagcccccgataatcgctcttttccactccaagatgccctcataaaccaatgtggcaagactactggacttctatcaatggtactctaatcagtccttattatcccagcttgctgaggggcagggagagcgcctcttcctctgggcagcgctatctagataggtaagtgggggcggggaagggtgcatagctgttttagctgagggacgtggtgccgacgtccccaaacctagctaggctaagtcaagatcaacattccagggttggtaatgttggatgatgaaacattcatttttaccttgtggatgctagtgctgtagagttcactgttgtacacagtctgttttctatttgttaagaaaaactacagcatcattgcataattcttgatggtaataaatttgaataatcagatttcttacaaa

SEQ ID NO: 171776 - DNA, 4600 bp, Homo sapiens
  Payload ID: 13761
  Gene Symbol: PTPRF
  Gene Name: protein tyrosine phosphatase, receptor type, F
  ENST ID: ENST00000372407
  CDS Start-End: 1-2940
acctacgtgcggctggagaatggcgagccccgtggactccccatcatccaagacgtcatgctagccgaggcccagtggcggccagaggagtccgaggactatgaaaccactatcagcggcctgaccccggagaccacctactccgttactgttgctgcctataccaccaagggggatggtgcccgcagcaagcccaaaattgtcactacaacaggtgcagtgtttgccaagaacttccgggtggcggctgcaatgaagacgtctgtgctgctcagctgggaggttcccgactcctataagtcagctgtgccctttaagattctgtacaatgggcagagtgtggaggtggacgggcactcgatgcggaagctgatcgcagacctgcagcccaacacagagtactcgtttgtgctgatgaaccgtggcagcagcgcagggggcctgcagcacctggtgtccatccgcacagcccccgacctcctgcctcacaagccgctgcctgcctctgcctacatagaggacggccgcttcgatctctccatgccccatgtgcaagacccctcgcttgtcaggtggttctacattgttgtggtgcccattgaccgtgtgggcgggagcatgctgacgccaaggtggagcacacccgaggaactggagctggacgagcttctagaagccatcgagcaaggcggagaggagcagcggcggcggcggcggcaggcagaacgtctgaagccatatgtggctgctcaactggatgtgctcccggagacctttaccttgggggacaagaagaactaccggggcttctacaaccggcccctgtctccggacttgagctaccagtgctttgtgcttgcctccttgaaggaacccatggaccagaagcgctatgcctccagcccctactcggatgagatcgtggtccaggtgacaccagcccagcagcaggaggagccggagatgctgtgggtgacgggtcccgtgctggcagtcatcctcatcatcctcattgtcatcgccatcctcttgttcaaaaggaaaaggacccactctccgtcctctaaggatgagcagtcgatcggactgaaggactccttgctggcccactcctctgaccctgtggagatgcggaggctcaactaccagaccccaggttccagtgtccccagttgcccgaatacctcaagtatgcgagaccacccacccatccccatcaccgacctggcggacaacatcgagcgcctcaaagccaacgatggcctcaagttctcccaggagtatgagtccatcgaccctggacagcagttcacgtgggagaattcaaacctggaggtgaacaagcccaagaaccgctatgcgaatgtcatcgcctacgaccactctcgagtcatccttacctctatcgatggcgtccccgggagtgactacatcaatgccaactacatcgatggctaccgcaagcagaatgcctacatcgccacgcagggccccctgcccgagaccatgggtgatttctggaggatggtgtgggaacagcgcacggccactgtggtcatgatgacacggctggaggagaagtcccgggtaaaatgtgatcagtactggccagcccgtggcaccgagacctgtggccttattcaggtgaccctgttggacacagtggagctggccacatacactgtgcgcaccttcgcactccacaagagtggctccagtgagaagcgcgagctgcgtcagtttcagttcatggcctggccagaccatggagttcctgagtacccaactcccatcctggccttcctacgacgggtcaaggcctgcaaccccctagacgcagggcccatggtggtgcactgcagcgcgggcgtgggccgcaccggctgcttcatcgtgattgatgccatgttggagcggatgaagcacgagaagacggtggacatctatggccacgtgacctgcatgcgatcacagaggaactacatggtgcagacggaggaccagtacgtgttcatccatgaggcgctgctggaggctgccacgtgcggccacacagaggtgcctgcccgcaacctgtatgcccacatccagaagctgggccaagtgcctccaggggagagtgtgaccgccatggagctcgagttcaagttgctggccagctccaaggcccacacgtcccgcttcatcagcgccaacctgccctgcaacaagttcaagaaccggctggtgaacatcatgccctacgaattgacccgtgtgtgtctgcagcccatccgtggtgtggagggctctgactacatcaatgccagcttcctggatggttatagacagcagaaggcctacatagctacacaggggcctctggcagagagcaccgaggacttctggcgcatgctatgggagcacaattccaccatcatcgtcatgctgaccaagcttcgggagatgggcagggagaaatgccaccagtactggccagcagagcgctctgctcgctaccagtactttgttgttgacccgatggctgagtacaacatgccccagtatatcctgcgtgagttcaaggtcacggatgcccgggatgggcagtcaaggacaatccggcagttccagttcacagactggccagagcagggcgtgcccaagacaggcgagggattcattgacttcatcgggcaggtgcataagaccaaggagcagtttggacaggatgggcctatcacggtgcactgcagtgctggcgtgggccgcaccggggtgttcatcactctgagcatcgtcctggagcgcatgcgctacgagggcgtggtcgacatgtttcagaccgtgaagaccctgcgtacacagcgtcctgccatggtgcagacagaggaccagtatcagctgtgctaccgtgcggccctggagtacctcggcagctttgaccactatgcaacgtaactaccgctcccctctcctccgccacccccgccgtggggctccggaggggacccagctcctctgagccataccgaccatcgtccagccctcctacgcagatgctgtcactggcagagcacagcccacggggatcacagcgtttcaggaacgttgccacaccaatcagagagcctagaacatccctgggcaagtggatggcccagcaggcaggcactgtggcccttctgtccaccagacccacctggagcccgcttcaagctctctgttgcgctcccgcatttctcatgcttcttctcatggggtggggttggggcaaagcctcctttttaatacattaagtggggtagactgagggattttagcctcttccctctgatttttcctttcgcgaatccgtatctgcagaatgggccactgtaggggttggggtttattttgttttgtttttttttttcttgagttcactttggatccttattttgtatgacttctgctgaaggacagaacattgccttcctcgtgcagagctggggctgccagcctgagcggaggctcggccgtgggccgggaggcagtgctgatccggctgctcctccagcccttcagacgagatcctgtttcagctaaatgcagggaaactcaatgtttttttaagttttgttttccctttaaagcctttttttaggccacattgacagtggtgggcggggagaagatagggaacactcatccctggtcgtctatcccagtgtgtgtttaacattcacagcccagaaccacagatgtgtctgggagagcctggcaaggcattcctcatcaccatcgtgtttgcaaaggttaaaacaaaaacaaaaaaccacaaaaataaaaaacaaaaaaaacaaaaaacccaagaaaaaaaaaaagagtcagcccttggcttctgcttcaaaccctcaagaggggaagcaactccgtgtgcctggggttcccgagggagctgctggctgacctgggcccacagagcctggctttggtccccagcattgcagtatggtgtggtgtttgtaggctgtggggtctggctgtgtggccaaggtgaatagcacaggttagggtgtgtgccacaccccatgcacctcagggccaagcgggggcgtggctggcctttcaggtccaggccagtgggcctggtagcacatgtctgtcctcagagcaggggccagatgattttcctccctggtttgcagctgttttcaaagcccccgataatcgctcttttccactccaagatgccctcataaaccaatgtggcaagactactggacttctatcaatggtactctaatcagtccttattatcccagcttgctgaggggcagggagagcgcctcttcctctgggcagcgctatctagataggtaagtgggggcggggaagggtgcatagctgttttagctgagggacgtggtgccgacgtccccaaacctagctaggctaagtcaagatcaacattccagggttggtaatgttggatgatgaaacattcatttttaccttgtggatgctagtgctgtagagttcactgttgtacacagtctgttttctatttgttaagaaaaactacagcatcattgcataattcttgatggtaataaatttgaataatcagatttcttac

SEQ ID NO: 171777 - DNA, 4154 bp, Homo sapiens
  Payload ID: 13761
  Gene Symbol: PTPRF
  Gene Name: protein tyrosine phosphatase, receptor type, F
  ENST ID: ENST00000412568
  CDS Start-End: 1-3874
cagtgtcaccctcacctgggactctgggaactcggagcctgtaacctactatggcatccagtaccgcgcagcgggcacggagggcccctttcaggaggtggatggtgtggccaccacccgctacagcattggcggcctcagccctttctcggaatatgccttccgcgtgctggcggtgaacagcatcgggcgagggccgcccagcgaggcagtgcgggcacgcacgggagaacaggcgccctccagcccaccgcgccgcgtgcaggcacgcatgctgagcgccagcaccatgctggtgcagtgggagcctcccgaggagcccaacggcctggtgcggggataccgcgtctactatactccggactcccgccgccccccgaacgcctggcacaagcacaacaccgacgcggggctcctcacgaccgtgggcagcctgctgcctggcatcacctacagcctgcgcgtgcttgccttcaccgccgtgggcgatggccctcccagccccaccatccaggtcaagacgcagcagggagtgcctgcccagcccgcggacttccaggccgaggtggagtcggacaccaggatccagctctcgtggctgctgccccctcaggagcggatcatcatgtatgaactggtgtactgggcggcagaggacgaagaccaacagcacaaggtgaccttcgacccaacctcctcctacacactagaggacctgaagcctgacacactctaccgcttccagctggctgcacgctcggatatgggggtgggcgtcttcacccccaccattgaggcccgcacagcccagtccatgcccagcgggcctccgcggaaggtggaggtggagccactgaactccactgctgtgcatgtctactggaagctgcctgtccccagcaagcagcatggccagatccgcggctaccaggtcacctacgtgcggctggagaatggcgagccccgtggactccccatcatccaagacgtcatgctagccgaggcccagtggcggccagaggagtccgaggactatgaaaccactatcagcggcctgaccccggagaccacctactccgttactgttgctgcctataccaccaagggggatggtgcccgcagcaagcccaaaattgtcactacaacaggtgcagtgtttgccaagaacttccgggtggcggctgcaatgaagacgtctgtgctgctcagctgggaggttcccgactcctataagtcagctgtgccctttaagattctgtacaatgggcagagtgtggaggtggacgggcactcgatgcggaagctgatcgcagacctgcagcccaacacagagtactcgtttgtgctgatgaaccgtggcagcagcgcagggggcctgcagcacctggtgtccatccgcacagcccccgacctcctgcctcacaagccgctgcctgcctctgcctacatagaggacggccgcttcgatctctccatgccccatgtgcaagacccctcgcttgtcaggtggttctacattgttgtggtgcccattgaccgtgtgggcgggagcatgctgacgccaaggtggagcacacccgaggaactggagctggacgagcttctagaagccatcgagcaaggcggagaggagcagcggcggcggcggcggcaggcagaacgtctgaagccatatgtggctgctcaactggatgtgctcccggagacctttaccttgggggacaagaagaactaccggggcttctacaaccggcccctgtctccggacttgagctaccagtgctttgtgcttgcctccttgaaggaacccatggaccagaagcgctatgcctccagcccctactcggatgagatcgtggtccaggtgacaccagcccagcagcaggaggagccggagatgctgtgggtgacgggtcccgtgctggcagtcatcctcatcatcctcattgtcatcgccatcctcttgttcaaaaggaaaaggacccactctccgtcctctaaggatgagcagtcgatcggactgaaggactccttgctggcccactcctctgaccctgtggagatgcggaggctcaactaccagaccccaggttccagtgtccccagttgcccgaatacctcaagtatgcgagaccacccacccatccccatcaccgacctggcggacaacatcgagcgcctcaaagccaacgatggcctcaagttctcccaggagtatgagtccatcgaccctggacagcagttcacgtgggagaattcaaacctggaggtgaacaagcccaagaaccgctatgcgaatgtcatcgcctacgaccactctcgagtcatccttacctctatcgatggcgtccccgggagtgactacatcaatgccaactacatcgatggctaccgcaagcagaatgcctacatcgccacgcagggccccctgcccgagaccatgggtgatttctggaggatggtgtgggaacagcgcacggccactgtggtcatgatgacacggctggaggagaagtcccgggtaaaatgtgatcagtactggccagcccgtggcaccgagacctgtggccttattcaggtgaccctgttggacacagtggagctggccacatacactgtgcgcaccttcgcactccacaagagtggctccagtgagaagcgcgagctgcgtcagtttcagttcatggcctggccagaccatggagttcctgagtacccaactcccatcctggccttcctacgacgggtcaaggcctgcaaccccctagacgcagggcccatggtggtgcactgcagcgcgggcgtgggccgcaccggctgcttcatcgtgattgatgccatgttggagcggatgaagcacgagaagacggtggacatctatggccacgtgacctgcatgcgatcacagaggaactacatggtgcagacggaggaccagtacgtgttcatccatgaggcgctgctggaggctgccacgtgcggccacacagaggtgcctgcccgcaacctgtatgcccacatccagaagctgggccaagtgcctccaggggagagtgtgaccgccatggagctcgagttcaagttgctggccagctccaaggcccacacgtcccgcttcatcagcgccaacctgccctgcaacaagttcaagaaccggctggtgaacatcatgccctacgaattgacccgtgtgtgtctgcagcccatccgtggtgtggagggctctgactacatcaatgccagcttcctggatggttatagacagcagaaggcctacatagctacacaggggcctctggcagagagcaccgaggacttctggcgcatgctatgggagcacaattccaccatcatcgtcatgctgaccaagcttcgggagatgggcagggagaaatgccaccagtactggccagcagagcgctctgctcgctaccagtactttgttgttgacccgatggctgagtacaacatgccccagtatatcctgcgtgagttcaaggtcacggatgcccgggatgggcagtcaaggacaatccggcagttccagttcacagactggccagagcagggcgtgcccaagacaggcgagggattcattgacttcatcgggcaggtgcataagaccaaggagcagtttggacaggatgggcctatcacggtgcactgcagtgctggcgtgggccgcaccggggtgttcatcactctgagcatcgtcctggagcgcatgcgctacgagggcgtggtcgacatgtttcagaccgtgaagaccctgcgtacacagcgtcctgccatggtgcagacagaggaccagtatcagctgtgctaccgtgcggccctggagtacctcggcagctttgaccactatgcaacgtaactaccgctcccctctcctccgccacccccgccgtggggctccggaggggacccagctcctctgagccataccgaccatcgtccagccctcctacgcagatgctgtcactggcagagcacagcccacggggatcacagcgtttcaggaacgttgccacaccaatcagagagcctagaacatccctgggcaagtggatggcccagcaggcaggcactgtggcccttctgtccaccagacccacctggagcccgcttcaagctctctgttgcgctcccgcatt

SEQ ID NO: 171778 - DNA, 6377 bp, Homo sapiens
  Payload ID: 13761
  Gene Symbol: PTPRF
  Gene Name: protein tyrosine phosphatase, receptor type, F
  Uniprot ID: P10586
  ENST ID: ENST00000438120
  CDS Start-End: 327-6023
gcggtggcggcggcagaggcggcggctccagcttcggctccggctcgggctcgggctccggctccggctccggctccggctccagctcgggtggcggtggcgggagcgggaccaggtggaggcggcggcggcagaggagtgggagcagcggccctagcggcttgcggggggacatgcggaccgacggcccctggataggcggaaggagtggaggccctggtgcccggcccttggtgctgagtatccagcaagagtgaccggggtgaagaagcaaagactcggttgattgtcctgggctgtggctggctgtggagctagagccctggatggcccctgagccagccccagggaggacgatggtgccccttgtgcctgcactggtgatgcttggtttggtggcaggcgcccatggtgacagcaaacctgtcttcattaaagtccctgaggaccagactgggctgtcaggaggggtagcctccttcgtgtgccaagctacaggagaacccaagccgcgcatcacatggatgaagaaggggaagaaagtcagctcccagcgcttcgaggtcattgagtttgatgatggggcagggtcagtgcttcggatccagccattgcgggtgcagcgagatgaagccatctatgagtgtacagctactaacagcctgggtgagatcaacactagtgccaagctctcagtgctcgaagaggaacagctgccccctgggttcccttccatcgacatggggcctcagctgaaggtggtggagaaggcacgcacagccaccatgctatgtgccgcaggcggaaatccagaccctgagatttcttggttcaaggacttccttcctgtagaccctgccacgagcaacggccgcatcaagcagctgcgttcaggtgccttgcagatagagagcagtgaggaatccgaccaaggcaagtacgagtgtgtggcgaccaactcggcaggcacacgttactcagcccctgcgaacctgtatgtgcgagtgcgccgcgtggctcctcgtttctccatccctcccagcagccaggaggtgatgccaggcggcagcgtgaacctgacatgcgtggcagtgggtgcacccatgccctacgtgaagtggatgatgggggccgaggagctcaccaaggaggatgagatgccagttggccgcaacgtcctggagctcagcaatgtcgtacgctctgccaactacacctgtgtggccatctcctcgctgggcatgatcgaggccacagcccaggtcacagtgaaagctcttccaaagcctccgattgatcttgtggtgacagagacaactgccaccagtgtcaccctcacctgggactctgggaactcggagcctgtaacctactatggcatccagtaccgcgcagcgggcacggagggcccctttcaggaggtggatggtgtggccaccacccgctacagcattggcggcctcagccctttctcggaatatgccttccgcgtgctggcggtgaacagcatcgggcgagggccgcccagcgaggcagtgcgggcacgcacgggagaacaggcgccctccagcccaccgcgccgcgtgcaggcacgcatgctgagcgccagcaccatgctggtgcagtgggagcctcccgaggagcccaacggcctggtgcggggataccgcgtctactatactccggactcccgccgccccccgaacgcctggcacaagcacaacaccgacgcggggctcctcacgaccgtgggcagcctgctgcctggcatcacctacagcctgcgcgtgcttgccttcaccgccgtgggcgatggccctcccagccccaccatccaggtcaagacgcagcagggagtgcctgcccagcccgcggacttccaggccgaggtggagtcggacaccaggatccagctctcgtggctgctgccccctcaggagcggatcatcatgtatgaactggtgtactgggcggcagaggacgaagaccaacagcacaaggtgaccttcgacccaacctcctcctacacactagaggacctgaagcctgacacactctaccgcttccagctggctgcacgctcggatatgggggtgggcgtcttcacccccaccattgaggcccgcacagcccagtccaccccctccgcccctccccagaaggtgatgtgtgtgagcatgggctccaccacggtccgggtaagttgggtcccgccgcctgccgacagccgcaacggcgttatcacccagtactccgtggcctacgaggcggtggacggcgaggaccgcgggcggcatgtggtggatggcatcagccgtgagcactccagctgggacctggtgggcctggagaagtggacggagtaccgggtgtgggtgcgggcacacacagacgtgggccccggccccgagagcagcccggtgctggtgcgcaccgatgaggacgtgcccagcgggcctccgcggaaggtggaggtggagccactgaactccactgctgtgcatgtctactggaagctgcctgtccccagcaagcagcatggccagatccgcggctaccaggtcacctacgtgcggctggagaatggcgagccccgtggactccccatcatccaagacgtcatgctagccgaggcccaggaaaccactatcagcggcctgaccccggagaccacctactccgttactgttgctgcctataccaccaagggggatggtgcccgcagcaagcccaaaattgtcactacaacaggtgcagtcccaggccggcccaccatgatgatcagcaccacggccatgaacactgcgctgctccagtggcacccacccaaggaactgcctggcgagctgctgggctaccggctgcagtactgccgggccgacgaggcgcggcccaacaccatagatttcggcaaggatgaccagcacttcacagtcaccggcctgcacaaggggaccacctacatcttccggcttgctgccaagaaccgggctggcttgggtgaggagttcgagaaggagatcaggacccccgaggacctgcccagcggcttcccccaaaacctgcatgtgacaggactgaccacgtctaccacagaactggcctgggacccgccagtgctggcggagaggaacgggcgcatcatcagctacaccgtggtgttccgagacatcaacagccaacaggagctgcagaacatcacgacagacacccgctttacccttactggcctcaagccagacaccacttacgacatcaaggtccgcgcatggaccagcaaaggctctggcccactcagccccagcatccagtcccggaccatgccggtggagcaagtgtttgccaagaacttccgggtggcggctgcaatgaagacgtctgtgctgctcagctgggaggttcccgactcctataagtcagctgtgccctttaagattctgtacaatgggcagagtgtggaggtggacgggcactcgatgcggaagctgatcgcagacctgcagcccaacacagagtactcgtttgtgctgatgaaccgtggcagcagcgcagggggcctgcagcacctggtgtccatccgcacagcccccgacctcctgcctcacaagccgctgcctgcctctgcctacatagaggacggccgcttcgatctctccatgccccatgtgcaagacccctcgcttgtcaggtggttctacattgttgtggtgcccattgaccgtgtgggcgggagcatgctgacgccaaggtggagcacacccgaggaactggagctggacgagcttctagaagccatcgagcaaggcggagaggagcagcggcggcggcggcggcaggcagaacgtctgaagccatatgtggctgctcaactggatgtgctcccggagacctttaccttgggggacaagaagaactaccggggcttctacaaccggcccctgtctccggacttgagctaccagtgctttgtgcttgcctccttgaaggaacccatggaccagaagcgctatgcctccagcccctactcggatgagatcgtggtccaggtgacaccagcccagcagcaggaggagccggagatgctgtgggtgacgggtcccgtgctggcagtcatcctcatcatcctcattgtcatcgccatcctcttgttcaaaaggaaaaggacccactctccgtcctctaaggatgagcagtcgatcggactgaaggactccttgctggcccactcctctgaccctgtggagatgcggaggctcaactaccagaccccaggtatgcgagaccacccacccatccccatcaccgacctggcggacaacatcgagcgcctcaaagccaacgatggcctcaagttctcccaggagtatgagtccatcgaccctggacagcagttcacgtgggagaattcaaacctggaggtgaacaagcccaagaaccgctatgcgaatgtcatcgcctacgaccactctcgagtcatccttacctctatcgatggcgtccccgggagtgactacatcaatgccaactacatcgatggctaccgcaagcagaatgcctacatcgccacgcagggccccctgcccgagaccatgggtgatttctggaggatggtgtgggaacagcgcacggccactgtggtcatgatgacacggctggaggagaagtcccgggtaaaatgtgatcagtactggccagcccgtggcaccgagacctgtggccttattcaggtgaccctgttggacacagtggagctggccacatacactgtgcgcaccttcgcactccacaagagtggctccagtgagaagcgcgagctgcgtcagtttcagttcatggcctggccagaccatggagttcctgagtacccaactcccatcctggccttcctacgacgggtcaaggcctgcaaccccctagacgcagggcccatggtggtgcactgcagcgcgggcgtgggccgcaccggctgcttcatcgtgattgatgccatgttggagcggatgaagcacgagaagacggtggacatctatggccacgtgacctgcatgcgatcacagaggaactacatggtgcagacggaggaccagtacgtgttcatccatgaggcgctgctggaggctgccacgtgcggccacacagaggtgcctgcccgcaacctgtatgcccacatccagaagctgggccaagtgcctccaggggagagtgtgaccgccatggagctcgagttcaagttgctggccagctccaaggcccacacgtcccgcttcatcagcgccaacctgccctgcaacaagttcaagaaccggctggtgaacatcatgccctacgaattgacccgtgtgtgtctgcagcccatccgtggtgtggagggctctgactacatcaatgccagcttcctggatggttatagacagcagaaggcctacatagctacacaggggcctctggcagagagcaccgaggacttctggcgcatgctatgggagcacaattccaccatcatcgtcatgctgaccaagcttcgggagatgggcagggagaaatgccaccagtactggccagcagagcgctctgctcgctaccagtactttgttgttgacccgatggctgagtacaacatgccccagtatatcctgcgtgagttcaaggtcacggatgcccgggatgggcagtcaaggacaatccggcagttccagttcacagactggccagagcagggcgtgcccaagacaggcgagggattcattgacttcatcgggcaggtgcataagaccaaggagcagtttggacaggatgggcctatcacggtgcactgcagtgctggcgtgggccgcaccggggtgttcatcactctgagcatcgtcctggagcgcatgcgctacgagggcgtggtcgacatgtttcagaccgtgaagaccctgcgtacacagcgtcctgccatggtgcagacagaggaccagtatcagctgtgctaccgtgcggccctggagtacctcggcagctttgaccactatgcaacgtaactaccgctcccctctcctccgccacccccgccgtggggctccggaggggacccagctcctctgagccataccgaccatcgtccagccctcctacgcagatgctgtcactggcagagcacagcccacggggatcacagcgtttcaggaacgttgccacaccaatcagagagcctagaacatccctgggcaagtggatggcccagcaggcaggcactgtggcccttctgtccaccagacccacctggagcccgcttcaagctctctgttgcgctcccgcatttctcatgcttcttctcatggggtggggttggggcaaagcctcctttttaatacattaagtggggtagactgagg

SEQ ID NO: 171779 - DNA, 6312 bp, Homo sapiens
  Payload ID: 13761
  Gene Symbol: PTPRF
  Gene Name: protein tyrosine phosphatase, receptor type, F
  ENST ID: ENST00000429895
  CDS Start-End: 1-4661
cggagcctgtaacctactatggcatccagtaccgcgcagcgggcacggagggcccctttcaggaggtggatggtgtggccaccacccgctacagcattggcggcctcagccctttctcggaatatgccttccgcgtgctggcggtgaacagcatcgggcgagggccgcccagcgaggcagtgcgggcacgcacgggagaacaggcgccctccagcccaccgcgccgcgtgcaggcacgcatgctgagcgccagcaccatgctggtgcagtgggagcctcccgaggagcccaacggcctggtgcggggataccgcgtctactatactccggactcccgccgccccccgaacgcctggcacaagcacaacaccgacgcggggctcctcacgaccgtgggcagcctgctgcctggcatcacctacagcctgcgcgtgcttgccttcaccgccgtgggcgatggccctcccagccccaccatccaggtcaagacgcagcagggagtgcctgcccagcccgcggacttccaggccgaggtggagtcggacaccaggatccagctctcgtggctgctgccccctcaggagcggatcatcatgtatgaactggtgtactgggcggcagaggacgaagaccaacagcacaaggtgaccttcgacccaacctcctcctacacactagaggacctgaagcctgacacactctaccgcttccagctggctgcacgctcggatatgggggtgggcgtcttcacccccaccattgaggcccgcacagcccagtccaccccctccgcccctccccagaaggtgatgtgtgtgagcatgggctccaccacggtccgggtaagttgggtcccgccgcctgccgacagccgcaacggcgttatcacccagtactccgtggcctacgaggcggtggacggcgaggaccgcgggcggcatgtggtggatggcatcagccgtgagcactccagctgggacctggtgggcctggagaagtggacggagtaccgggtgtgggtgcgggcacacacagacgtgggccccggccccgagagcagcccggtgctggtgcgcaccgatgaggacgtgcccagcgggcctccgcggaaggtggaggtggagccactgaactccactgctgtgcatgtctactggaagctgcctgtccccagcaagcagcatggccagatccgcggctaccaggtcacctacgtgcggctggagaatggcgagccccgtggactccccatcatccaagacgtcatgctagccgaggcccaggaaaccactatcagcggcctgaccccggagaccacctactccgttactgttgctgcctataccaccaagggggatggtgcccgcagcaagcccaaaattgtcactacaacagtcccaggccggcccaccatgatgatcagcaccacggccatgaacactgcgctgctccagtggcacccacccaaggaactgcctggcgagctgctgggctaccggctgcagtactgccgggccgacgaggcgcggcccaacaccatagatttcggcaaggatgaccagcacttcacagtcaccggcctgcacaaggggaccacctacatcttccggcttgctgccaagaaccgggctggcttgggtgaggagttcgagaaggagatcaggacccccgaggacctgcccagcggcttcccccaaaacctgcatgtgacaggactgaccacgtctaccacagaactggcctgggacccgccagtgctggcggagaggaacgggcgcatcatcagctacaccgtggtgttccgagacatcaacagccaacaggagctgcagaacatcacgacagacacccgctttacccttactggcctcaagccagacaccacttacgacatcaaggtccgcgcatggaccagcaaaggctctggcccactcagccccagcatccagtcccggaccatgccggtggagcaagtgtttgccaagaacttccgggtggcggctgcaatgaagacgtctgtgctgctcagctgggaggttcccgactcctataagtcagctgtgccctttaagattctgtacaatgggcagagtgtggaggtggacgggcactcgatgcggaagctgatcgcagacctgcagcccaacacagagtactcgtttgtgctgatgaaccgtggcagcagcgcagggggcctgcagcacctggtgtccatccgcacagcccccgacctcctgcctcacaagccgctgcctgcctctgcctacatagaggacggccgcttcgatctctccatgccccatgtgcaagacccctcgcttgtcaggtggttctacattgttgtggtgcccattgaccgtgtgggcgggagcatgctgacgccaaggtggagcacacccgaggaactggagctggacgagcttctagaagccatcgagcaaggcggagaggagcagcggcggcggcggcggcaggcagaacgtctgaagccatatgtggctgctcaactggatgtgctcccggagacctttaccttgggggacaagaagaactaccggggcttctacaaccggcccctgtctccggacttgagctaccagtgctttgtgcttgcctccttgaaggaacccatggaccagaagcgctatgcctccagcccctactcggatgagatcgtggtccaggtgacaccagcccagcagcaggaggagccggagatgctgtgggtgacgggtcccgtgctggcagtcatcctcatcatcctcattgtcatcgccatcctcttgttcaaaaggaaaaggacccactctccgtcctctaaggatgagcagtcgatcggactgaaggactccttgctggcccactcctctgaccctgtggagatgcggaggctcaactaccagaccccaggtatgcgagaccacccacccatccccatcaccgacctggcggacaacatcgagcgcctcaaagccaacgatggcctcaagttctcccaggagtatgagtccatcgaccctggacagcagttcacgtgggagaattcaaacctggaggtgaacaagcccaagaaccgctatgcgaatgtcatcgcctacgaccactctcgagtcatccttacctctatcgatggcgtccccgggagtgactacatcaatgccaactacatcgatggctaccgcaagcagaatgcctacatcgccacgcagggccccctgcccgagaccatgggtgatttctggaggatggtgtgggaacagcgcacggccactgtggtcatgatgacacggctggaggagaagtcccgggtaaaatgtgatcagtactggccagcccgtggcaccgagacctgtggccttattcaggtgaccctgttggacacagtggagctggccacatacactgtgcgcaccttcgcactccacaagagtggctccagtgagaagcgcgagctgcgtcagtttcagttcatggcctggccagaccatggagttcctgagtacccaactcccatcctggccttcctacgacgggtcaaggcctgcaaccccctagacgcagggcccatggtggtgcactgcagcgcgggcgtgggccgcaccggctgcttcatcgtgattgatgccatgttggagcggatgaagcacgagaagacggtggacatctatggccacgtgacctgcatgcgatcacagaggaactacatggtgcagacggaggaccagtacgtgttcatccatgaggcgctgctggaggctgccacgtgcggccacacagaggtgcctgcccgcaacctgtatgcccacatccagaagctgggccaagtgcctccaggggagagtgtgaccgccatggagctcgagttcaagttgctggccagctccaaggcccacacgtcccgcttcatcagcgccaacctgccctgcaacaagttcaagaaccggctggtgaacatcatgccctacgaattgacccgtgtgtgtctgcagcccatccgtggtgtggagggctctgactacatcaatgccagcttcctggatggttatagacagcagaaggcctacatagctacacaggggcctctggcagagagcaccgaggacttctggcgcatgctatgggagcacaattccaccatcatcgtcatgctgaccaagcttcgggagatgggcagggagaaatgccaccagtactggccagcagagcgctctgctcgctaccagtactttgttgttgacccgatggctgagtacaacatgccccagtatatcctgcgtgagttcaaggtcacggatgcccgggatgggcagtcaaggacaatccggcagttccagttcacagactggccagagcagggcgtgcccaagacaggcgagggattcattgacttcatcgggcaggtgcataagaccaaggagcagtttggacaggatgggcctatcacggtgcactgcagtgctggcgtgggccgcaccggggtgttcatcactctgagcatcgtcctggagcgcatgcgctacgagggcgtggtcgacatgtttcagaccgtgaagaccctgcgtacacagcgtcctgccatggtgcagacagaggaccagtatcagctgtgctaccgtgcggccctggagtacctcggcagctttgaccactatgcaacgtaactaccgctcccctctcctccgccacccccgccgtggggctccggaggggacccagctcctctgagccataccgaccatcgtccagccctcctacgcagatgctgtcactggcagagcacagcccacggggatcacagcgtttcaggaacgttgccacaccaatcagagagcctagaacatccctgggcaagtggatggcccagcaggcaggcactgtggcccttctgtccaccagacccacctggagcccgcttcaagctctctgttgcgctcccgcatttctcatgcttcttctcatggggtggggttggggcaaagcctcctttttaatacattaagtggggtagactgagggattttagcctcttccctctgatttttcctttcgcgaatccgtatctgcagaatgggccactgtaggggttggggtttattttgttttgtttttttttttcttgagttcactttggatccttattttgtatgacttctgctgaaggacagaacattgccttcctcgtgcagagctggggctgccagcctgagcggaggctcggccgtgggccgggaggcagtgctgatccggctgctcctccagcccttcagacgagatcctgtttcagctaaatgcagggaaactcaatgtttttttaagttttgttttccctttaaagcctttttttaggccacattgacagtggtgggcggggagaagatagggaacactcatccctggtcgtctatcccagtgtgtgtttaacattcacagcccagaaccacagatgtgtctgggagagcctggcaaggcattcctcatcaccatcgtgtttgcaaaggttaaaacaaaaacaaaaaaccacaaaaataaaaaacaaaaaaaacaaaaaacccaagaaaaaaaaaaagagtcagcccttggcttctgcttcaaaccctcaagaggggaagcaactccgtgtgcctggggttcccgagggagctgctggctgacctgggcccacagagcctggctttggtccccagcattgcagtatggtgtggtgtttgtaggctgtggggtctggctgtgtggccaaggtgaatagcacaggttagggtgtgtgccacaccccatgcacctcagggccaagcgggggcgtggctggcctttcaggtccaggccagtgggcctggtagcacatgtctgtcctcagagcaggggccagatgattttcctccctggtttgcagctgttttcaaagcccccgataatcgctcttttccactccaagatgccctcataaaccaatgtggcaagactactggacttctatcaatggtactctaatcagtccttattatcccagcttgctgaggggcagggagagcgcctcttcctctgggcagcgctatctagataggtaagtgggggcggggaagggtgcatagctgttttagctgagggacgtggtgccgacgtccccaaacctagctaggctaagtcaagatcaacattccagggttggtaatgttggatgatgaaacattcatttttaccttgtggatgctagtgctgtagagttcactgttgtacacagtctgttttctatttgttaagaaaaactacagcatcattgcataattcttgatggtaataaatttgaataatcag

SEQ ID NO: 171780 - DNA, 788 bp, Homo sapiens
  Payload ID: 13761
  Gene Symbol: PTPRF
  Gene Name: protein tyrosine phosphatase, receptor type, F
  ENST ID: ENST00000437607
  CDS Start-End: 1-788
atggcccctgagccagccccagggaggacgatggtgccccttgtgcctgcactggtgatgcttggtttggtggcaggcgcccatggtgacagcaaacctgtcttcattaaagtccctgaggaccagactgggctgtcaggaggggtagcctccttcgtgtgccaagctacaggagaacccaagccgcgcatcacatggatgaagaaggggaagaaagtcagctcccagcgcttcgaggtcattgagtttgatgatggggcagggtcagtgcttcggatccagccattgcgggtgcagcgagatgaagccatctatgagtgtacagctactaacagcctgggtgagatcaacactagtgccaagctctcagtgctcgaagaggaacagctgccccctgggttcccttccatcgacatggggcctcagctgaaggtggtggagaaggcacgcacagccaccatgctatgtgccgcaggcggaaatccagaccctgagatttcttggttcaaggacttccttcctgtagaccctgccacgagcaacggccgcatcaagcagctgcgttcaggtgccttgcagatagagagcagtgaggaatccgaccaaggcaagtacgagtgtgtggcgaccaactcggcaggcacacgttactcagcccctgcgaacctgtatgtgcgaggtcttgccgcatgggcccggagccccatgggaatttggagccatccaatccgacttcttggtgtatgtgcatgtgtgtgtgcacacacgggcacacttatctgtgtgta

SEQ ID NO: 171781 - DNA, 4836 bp, Homo sapiens
  Payload ID: 13761
  Gene Symbol: PTPRF
  Gene Name: protein tyrosine phosphatase, receptor type, F
  ENST ID: ENST00000414879
  CDS Start-End: 1-3997
cagcctgctgcctggcatcacctacagcctgcgcgtgcttgccttcaccgccgtgggcgatggccctcccagccccaccatccaggtcaagacgcagcagggagtgcctgcccagcccgcggacttccaggccgaggtggagtcggacaccaggatccagctctcgtggctgctgccccctcaggagcggatcatcatgtatgaactggtgtactgggcggcagaggacgaagaccaacagcacaaggtgaccttcgacccaacctcctcctacacactagaggacctgaagcctgacacactctaccgcttccagctggctgcacgctcggatatgggggtgggcgtcttcacccccaccattgaggcccgcacagcccagtccatgcccagcgggcctccgcggaaggtggaggtggagccactgaactccactgctgtgcatgtctactggaagctgcctgtccccagcaagcagcatggccagatccgcggctaccaggtcacctacgtgcggctggagaatggcgagccccgtggactccccatcatccaagacgtcatgctagccgaggcccaggaaaccactatcagcggcctgaccccggagaccacctactccgttactgttgctgcctataccaccaagggggatggtgcccgcagcaagcccaaaattgtcactacaacaggtgcagtcccaggccggcccaccatgatgatcagcaccacggccatgaacactgcgctgctccagtggcacccacccaaggaactgcctggcgagctgctgggctaccggctgcagtactgccgggccgacgaggcgcggcccaacaccatagatttcggcaaggatgaccagcacttcacagtcaccggcctgcacaaggggaccacctacatcttccggcttgctgccaagaaccgggctggcttgggtgaggagttcgagaaggagatcaggacccccgaggacctgcccagcggcttcccccaaaacctgcatgtgacaggactgaccacgtctaccacagaactggcctgggacccgccagtgctggcggagaggaacgggcgcatcatcagctacaccgtggtgttccgagacatcaacagccaacaggagctgcagaacatcacgacagacacccgctttacccttactggcctcaagccagacaccacttacgacatcaaggtccgcgcatggaccagcaaaggctctggcccactcagccccagcatccagtcccggaccatgccggtggagcaagtgtttgccaagaacttccgggtggcggctgcaatgaagacgtctgtgctgctcagctgggaggttcccgactcctataagtcagctgtgccctttaagattctgtacaatgggcagagtgtggaggtggacgggcactcgatgcggaagctgatcgcagacctgcagcccaacacagagtactcgtttgtgctgatgaaccgtggcagcagcgcagggggcctgcagcacctggtgtccatccgcacagcccccgacctcctgcctcacaagccgctgcctgcctctgcctacatagaggacggccgcttcgatctctccatgccccatgtgcaagacccctcgcttgtcaggtggttctacattgttgtggtgcccattgaccgtgtgggcgggagcatgctgacgccaaggtggagcacacccgaggaactggagctggacgagcttctagaagccatcgagcaaggcggagaggagcagcggcggcggcggcggcaggcagaacgtctgaagccatatgtggctgctcaactggatgtgctcccggagacctttaccttgggggacaagaagaactaccggggcttctacaaccggcccctgtctccggacttgagctaccagtgctttgtgcttgcctccttgaaggaacccatggaccagaagcgctatgcctccagcccctactcggatgagatcgtggtccaggtgacaccagcccagcagcaggaggagccggagatgctgtgggtgacgggtcccgtgctggcagtcatcctcatcatcctcattgtcatcgccatcctcttgttcaaaaggaaaaggacccactctccgtcctctaaggatgagcagtcgatcggactgaaggactccttgctggcccactcctctgaccctgtggagatgcggaggctcaactaccagaccccaggttccagtgtccccagttgcccgaatacctcaagtatgcgagaccacccacccatccccatcaccgacctggcggacaacatcgagcgcctcaaagccaacgatggcctcaagttctcccaggagtatgagtccatcgaccctggacagcagttcacgtgggagaattcaaacctggaggtgaacaagcccaagaaccgctatgcgaatgtcatcgcctacgaccactctcgagtcatccttacctctatcgatggcgtccccgggagtgactacatcaatgccaactacatcgatggctaccgcaagcagaatgcctacatcgccacgcagggccccctgcccgagaccatgggtgatttctggaggatggtgtgggaacagcgcacggccactgtggtcatgatgacacggctggaggagaagtcccgggtaaaatgtgatcagtactggccagcccgtggcaccgagacctgtggccttattcaggtgaccctgttggacacagtggagctggccacatacactgtgcgcaccttcgcactccacaagagtggctccagtgagaagcgcgagctgcgtcagtttcagttcatggcctggccagaccatggagttcctgagtacccaactcccatcctggccttcctacgacgggtcaaggcctgcaaccccctagacgcagggcccatggtggtgcactgcagcgcgggcgtgggccgcaccggctgcttcatcgtgattgatgccatgttggagcggatgaagcacgagaagacggtggacatctatggccacgtgacctgcatgcgatcacagaggaactacatggtgcagacggaggaccagtacgtgttcatccatgaggcgctgctggaggctgccacgtgcggccacacagaggtgcctgcccgcaacctgtatgcccacatccagaagctgggccaagtgcctccaggggagagtgtgaccgccatggagctcgagttcaagttgctggccagctccaaggcccacacgtcccgcttcatcagcgccaacctgccctgcaacaagttcaagaaccggctggtgaacatcatgccctacgaattgacccgtgtgtgtctgcagcccatccgtggtgtggagggctctgactacatcaatgccagcttcctggatggttatagacagcagaaggcctacatagctacacaggggcctctggcagagagcaccgaggacttctggcgcatgctatgggagcacaattccaccatcatcgtcatgctgaccaagcttcgggagatgggcagggagaaatgccaccagtactggccagcagagcgctctgctcgctaccagtactttgttgttgacccgatggctgagtacaacatgccccagtatatcctgcgtgagttcaaggtcacggatgcccgggatgggcagtcaaggacaatccggcagttccagttcacagactggccagagcagggcgtgcccaagacaggcgagggattcattgacttcatcgggcaggtgcataagaccaaggagcagtttggacaggatgggcctatcacggtgcactgcagtgctggcgtgggccgcaccggggtgttcatcactctgagcatcgtcctggagcgcatgcgctacgagggcgtggtcgacatgtttcagaccgtgaagaccctgcgtacacagcgtcctgccatggtgcagacagaggaccagtatcagctgtgctaccgtgcggccctggagtacctcggcagctttgaccactatgcaacgtaactaccgctcccctctcctccgccacccccgccgtggggctccggaggggacccagctcctctgagccataccgaccatcgtccagccctcctacgcagatgctgtcactggcagagcacagcccacggggatcacagcgtttcaggaacgttgccacaccaatcagagagcctagaacatccctgggcaagtggatggcccagcaggcaggcactgtggcccttctgtccaccagacccacctggagcccgcttcaagctctctgttgcgctcccgcatttctcatgcttcttctcatggggtggggttggggcaaagcctcctttttaatacattaagtggggtagactgagggattttagcctcttccctctgatttttcctttcgcgaatccgtatctgcagaatgggccactgtaggggttggggtttattttgttttgtttttttttttcttgagttcactttggatccttattttgtatgacttctgctgaaggacagaacattgccttcctcgtgcagagctggggctgccagcctgagcggaggctcggccgtgggccgggaggcagtgctgatccggctgctcctccagcccttcagacgagatcctgtttcagctaaatgcagggaaactcaatgtttttttaagttttgttttccctttaaagcctttttttaggccacattgacagtggtgggcggggagaagatagggaacactcatccctggtcgtctatcccagtgtgtgtttaacattcacagcccagaaccacagatgtgtctgggagagcctggcaaggcattcctcatcaccatcgtgtttgcaaaggtt

SEQ ID NO: 171782 - DNA, 1129 bp, Homo sapiens
  Payload ID: 13761
  Gene Symbol: PTPRF
  Gene Name: protein tyrosine phosphatase, receptor type, F
  ENST ID: ENST00000617451
  CDS Start-End: 341-1129
cgggagcggcgggagcggtggcggcggcagaggcggcggctccagcttcggctccggctcgggctcgggctccggctccggctccggctccggctccagctcgggtggcggtggcgggagcgggaccaggtggaggcggcggcggcagaggagtgggagcagcggccctagcggcttgcggggggacatgcggaccgacggcccctggataggcggaaggagtggaggccctggtgcccggcccttggtgctgagtatccagcaagagtgaccggggtgaagaagcaaagactcggttgattgtcctgggctgtggctggctgtggagctagagccctggatggcccctgagccagccccagggaggacgatggtgccccttgtgcctgcactggtgatgcttggtttggtggcaggcgcccatggtgacagcaaacctgtcttcattaaagtccctgaggaccagactgggctgtcaggaggggtagcctccttcgtgtgccaagctacaggagaacccaagccgcgcatcacatggatgaagaaggggaagaaagtcagctcccagcgcttcgaggtcattgagtttgatgatggggcagggtcagtgcttcggatccagccattgcgggtgcagcgagatgaagccatctatgagtgtacagctactaacagcctgggtgagatcaacactagtgccaagctctcagtgctcgaagaggaacagctgccccctgggttcccttccatcgacatggggcctcagctgaaggtggtggagaaggcacgcacagccaccatgctatgtgccgcaggcggaaatccagaccctgagatttcttggttcaaggacttccttcctgtagaccctgccacgagcaacggccgcatcaagcagctgcgttcaggtgccttgcagatagagagcagtgaggaatccgaccaaggcaagtacgagtgtgtggcgaccaactcggcaggcacacgttactcagcccctgcgaacctgtatgtgcgaggtcttgccgcatgggcccggagccccatgggaatttggagccatccaatccgacttcttggtgtatgtgcatgtgtgtgtgcacacacgggcacacttatctgtgtgtaa

SEQ ID NO: 171783 - DNA, 5234 bp, Homo sapiens
  Payload ID: 13762
  Gene Symbol: PPFIA1
  Gene Name: protein tyrosine phosphatase, receptor type, f polypeptide (PTPRF), interacting protein (liprin), alpha 1
  Uniprot ID: Q13136
  ENST ID: ENST00000253925
  CDS Start-End: 216-3824
gccgcgcagccgggcccgctcctcctccgctccgccagtgtccggccgcgggccggccttagtgactggggcggcgggccccggggccgcggcgtggggcgggcaggcggacgccggccgcgggctgctttcgtcggctcccaagctctcccggagcgagcagccgcccgcgagccgccgcggagcctcctcgcccgctcccgccggcgagcaagatgatgtgcgaggtgatgccgaccatcagcgaagcagaaggcccccctggaggaggtggaggccatggttccggctccccttcacagccagatgcagattcacattttgaacagttgatggtctccatgctagaagaaagggaccgccttcttgatacactgagagagactcaagaaacgctggccttaacccaggggaagttacacgaggttggtcatgaaagagattccttgcagagacagctcaacacggcacttccacaggagttcgcagcacttactaaagaactcaatgtatgcagggaacagctccttgaaagggaagaagaaattgctgaactgaaagcagaaaggaataacaccaggctgctgttagagcatttggaatgccttgtctccaggcatgagcggtctcttaggatgaccgtggtgaagagacaagcgcagtctccagcaggcgtgtccagcgaagtggaagtgctgaaagcactgaagtccttatttgaacaccacaaagctctggatgaaaaggtgagagagcgattacgagtagcacttgaaagatgtagtttgttagaagaggaattaggtgccacacacaaagagctaatgattcttaaagaacagaataatcagaaaaaaactctaacagatggagtgctggacataaaccatgaacaagaaaatacaccaagcacgagtggaaagagatcttctgatggttctttaagccacgaggaagaccttgctaaagtaattgagctccaagaaatcataagtaagcagtcaagggaacagagccaaatgaaagaacgcctggcttccctttccagtcatgtgacagaactggaagaggatctggacacggctagaaaagatctcatcaaatctgaagaaatgaacacaaaattgcaacgagatgtccgtgaagccatggcccaaaaggaagatatggaagagagaatcactactcttgaaaaacgctacctcgctgcacagcgtgaagccacatctgtgcatgacctcaatgataaacttgaaaatgaaattgcaaataaagattctatgcatcgacagactgaagataaaaaccgccagttacaggagcgcttggaattggcagagcaaaagctgcaacagacactgaggaaggcagagacgctcccggaggtggaggcggagctggcccagagggtggcagcgctttccaaggctgaagagagacacggcaacattgaagaaaggttacgacagatggaagcacagttggaggagaagaatcaagaactgcagcgggcaaggcaaagagaaaaaatgaacgaagaacataataaacgtttatcagacactgttgacaagctgctttcagaatctaatgagaggcttcaacttcatcttaaagagagaatggctgctttggaagataagaactctcttttaagagaagttgaaagtgcaaaaaagcagttagaagaaacacaacacgataaggatcagcttgtcctaaacattgaagcactgagggctgaactagaccacatgagactaagaggtgcttcacttcatcatggccgaccccacttgggcagtgtcccagatttcaggttccccatggcagacggccacacagactcctacagcaccagtgcagtgctgcggcgcccacagaaaggccggctggcagccctgcgagatgagccttccaaggtacaaactcttaatgagcaggattgggaacgtgcccagcaagctagtgtcttggcaaatgtagcacaagcattcgagagtgatgctgacgtgtctgatggtgaagatgacagggacactctcctcagctcagttgacctgctatcgcccagcgggcaggccgacgcgcacacactagccatgatgcttcaggagcagctggacgccatcaacaaagagatcaggttgattcaggaagaaaaagaaaatacagagcagcgggcagaggagattgaaagtcgagttggcagtggaagtctagacaatcttggtcgttttagatcaatgagctccattcccccctaccctgcttcctcgcttgctagctcctcccctccgggcagtgggcgctccaccccacgaaggatccctcacagcccagctcgggaagtggacagactgggcgtcatgacccttttgccaccttccagagaagaggtacgagatgacaagacaaccataaagtgtgaaacctccccgccttcctccccgagagcccttcggttagaccggctgcacaaaggggcgctgcacaccgtcagccacgaggacatcagggacataaggaactccacaggctcccaggatggtcccgtgagcaaccccagcagtagcaacagtagccaggactcgctccacaaagccccaaagaagaaaggcattaagtcctccattggccgcttgtttggcaagaaagaaaagggccgacctggacaaactggcaaagaagcattaggacaagctggtgtttccgagacggataactcatctcaggatgccttgggacttagcaaattggggggacaggctgaaaaaaatcgtaaacttcaaaaaaagcatgaattgctggaggaagcccggagacaaggtttaccttttgcccaatgggacgggccaacggttgtggtctggctagagctctgggttgggatgccagcctggtatgtggctgcctgccgagcaaacgtgaaaagcggggccatcatgtcggccctgtccgacacagagatccagcgtgagattggcatcagcaaccccctgcacaggctgaagctgaggctggccatccaggagatcatgtcgctgaccagcccgtctgccccgcccacatctagaacgacactcgcctatggggacatgaaccacgagtggatcggcaacgagtggctccccagcctgggcctcccccagtaccgcagctacttcatggagtgccttgtagacgccaggatgctggaccacttgaccaagaaagaccttcgagggcagctgaaaatggtcgacagttttcacagaaacagtttccagtgtggaattatgtgcctgagaaggttaaattatgaccggaaagaactggaaagaaaaagagaagaaagtcagagtgaaataaaagacgtgcttgtttggagcaatgatcgagtgattcgctggatcctgtcaattggccttaaagaatatgcaaacaatcttatagagagtggtgttcacggagcacttctggccttagatgaaaccttcgacttcagtgcactggcactgctgttacagatcccgacgcagaacacacaggctcgtgctgtcttggaaagagaatttaacaaccttttggtcatggggactgatagaaggtttgatgaagatgatgataaaagctttaggagagcaccttcatggagaaaaaagtttagaccaaaggacattcgtggcttagctgctgggtcagcagagactctccctgcaaacttccgggtgacttcttctatgtcttccccctctatgcagccaaagaagatgcagatggacggcaatgtatcaggaacacagaggttggattctgctacagtcaggacttactcctgctaaagtctcctgttgtttacccacactacttctacagatgattatgcagcatttgaatccaacaaagactacattttggaatccagtggaatctttaatcttgttaatacttgttatatggaccctaagatattttattacagagtttttaattagtgaaaaattcatgaataccatagagaaaatattttagaatttaatgtttcttatatttatgtaaacttatgactcttcatttatatagttacttactttttcatgtatatccaggctataaatatcctttcaaatcatgttcttatacctaattttagtctttcaaatgaatgtactgtaatgcttgtatgtataaatcctatgaatagagggcttttgtaaattatgcatttattgtaattatcattaattttttaatgataaaccatgacaaaggattttacgtttataaaattatgacagaagccatgtgcattatcctttacggacgcagcctagctctacagcaatcatcctgaaataagcatacctaatttcaagcaattgttgtattttcatgactgaccttaactgtactttttctagcaagagatgctttattctgcagcatgaacagatttaaaatggctggtgttaaatatcagctcctaataagatgtggactgaaaacactatcacaacactatgagaagcccctagcactggttaacgctttcctagcctagtctctggatttggggagcttgtcttcagtggctgagactgtgagctgggagcagttctctcagctggagagactcgggatggggtaacctggggaccagtctagcccctgcaccctcttccctgcctctgctccttgggagcgggtggagagacacccatgtggctccccttagggccagcaccaagcaccacgctctcatcctgcaagtcggcgcacacagtggatgaaggcaggagacccagaaagcagtgcagtgcagctctaataaaggccttatttttcttatgtaaatcatctttttacatttgtttgtaaacatgtttaaagaacgaacctagtgggacatttttagactttgatgctctagccattttggattgtgtaagttgcagatgtggcttttactttttaaatggcatattaacaagccagcaaagtgtgtcagaccatggcgtggtatttattgtgcagcagatccagagacagaggcagcctgtcttttcagttggtttctgcttttaatttacttgtacaattcattgttactgttctgtttttctattaatcttttgtcaacttcctgattatgtaacaaagtatgtacagtctacttttgaactatttttatcacagtattatttattgctttctttcaataaagtactgaagcattttccactgccaatgaa

SEQ ID NO: 171784 - DNA, 4133 bp, Homo sapiens
  Payload ID: 13762
  Gene Symbol: PPFIA1
  Gene Name: protein tyrosine phosphatase, receptor type, f polypeptide (PTPRF), interacting protein (liprin), alpha 1
  Uniprot ID: Q13136
  ENST ID: ENST00000389547
  CDS Start-End: 199-3756
gctcctcctccgctccgccagtgtccggccgcgggccggccttagtgactggggcggcgggccccggggccgcggcgtggggcgggcaggcggacgccggccgcgggctgctttcgtcggctcccaagctctcccggagcgagcagccgcccgcgagccgccgcggagcctcctcgcccgctcccgccggcgagcaagatgatgtgcgaggtgatgccgaccatcagcgaagcagaaggcccccctggaggaggtggaggccatggttccggctccccttcacagccagatgcagattcacattttgaacagttgatggtctccatgctagaagaaagggaccgccttcttgatacactgagagagactcaagaaacgctggccttaacccaggggaagttacacgaggttggtcatgaaagagattccttgcagagacagctcaacacggcacttccacaggagttcgcagcacttactaaagaactcaatgtatgcagggaacagctccttgaaagggaagaagaaattgctgaactgaaagcagaaaggaataacaccaggctgctgttagagcatttggaatgccttgtctccaggcatgagcggtctcttaggatgaccgtggtgaagagacaagcgcagtctccagcaggcgtgtccagcgaagtggaagtgctgaaagcactgaagtccttatttgaacaccacaaagctctggatgaaaaggtgagagagcgattacgagtagcacttgaaagatgtagtttgttagaagaggaattaggtgccacacacaaagagctaatgattcttaaagaacagaataatcagaaaaaaactctaacagatggagtgctggacataaaccatgaacaagaaaatacaccaagcacgagtggaaagagatcttctgatggttctttaagccacgaggaagaccttgctaaagtaattgagctccaagaaatcataagtaagcagtcaagggaacagagccaaatgaaagaacgcctggcttccctttccagtcatgtgacagaactggaagaggatctggacacggctagaaaagatctcatcaaatctgaagaaatgaacacaaaattgcaacgagatgtccgtgaagccatggcccaaaaggaagatatggaagagagaatcactactcttgaaaaacgctacctcgctgcacagcgtgaagccacatctgtgcatgacctcaatgataaacttgaaaatgaaattgcaaataaagattctatgcatcgacagactgaagataaaaaccgccagttacaggagcgcttggaattggcagagcaaaagctgcaacagacactgaggaaggcagagacgctcccggaggtggaggcggagctggcccagagggtggcagcgctttccaaggctgaagagagacacggcaacattgaagaaaggttacgacagatggaagcacagttggaggagaagaatcaagaactgcagcgggcaaggcaaagagaaaaaatgaacgaagaacataataaacgtttatcagacactgttgacaagctgctttcagaatctaatgagaggcttcaacttcatcttaaagagagaatggctgctttggaagataagaactctcttttaagagaagttgaaagtgcaaaaaagcagttagaagaaacacaacacgataaggatcagcttgtcctaaacattgaagcactgagggctgaactagaccacatgagactaagaggtgcttcacttcatcatggccgaccccacttgggcagtgtcccagatttcaggttccccatggcagacggccacacagactcctacagcaccagtgcagtgctgcggcgcccacagaaaggccggctggcagccctgcgagatgagccttccaaggtacaaactcttaatgagcaggattgggaacgtgcccagcaagctagtgtcttggcaaatgtagcacaagcattcgagagtgatgctgacgtgtctgatggtgaagatgacagggacactctcctcagctcagttgacctgctatcgcccagcgggcaggccgacgcgcacacactagccatgatgcttcaggagcagctggacgccatcaacaaagagatcaggttgattcaggaagaaaaagaaaatacagagcagcgggcagaggagattgaaagtcgagttggcagtggaagtctagacaatcttggtcgttttagatcaatgagctccattcccccctaccctgcttcctcgcttgctagctcctcccctccgggcagtgggcgctccaccccacgaaggatccctcacagcccagctcgggaagtggacagactgggcgtcatgacccttttgccaccttccagagaagaggtacgagatgacaagacaaccataaagtgtgaaacctccccgccttcctccccgagagcccttcggttagaccggctgcacaaaggggcgctgcacaccgtcagccacgaggacatcagggacataaggaactccacaggctcccaggatggtcccgtgagcaaccccagcagtagcaacagtagccaggactcgctccacaaagccccaaagaagaaaggcattaagtcctccattggccgcttgtttggcaagaaagaaaagggccgacctggacaaactggcaaagaagcattaggacaagctggtgtttccgagacggataactcatctcaggatgccttgggacttagcaaattggggggacaggctgaaaaaaatcgtaaacttcaaaaaaagcatgaattgctggaggaagcccggagacaaggtttaccttttgcccaatgggacgggccaacggttgtggtctggctagagctctgggttgggatgccagcctggtatgtggctgcctgccgagcaaacgtgaaaagcggggccatcatgtcggccctgtccgacacagagatccagcgtgagattggcatcagcaaccccctgcacaggctgaagctgaggctggccatccaggagatcatgtcgctgaccagcccgtctgccccgcccacatctagaacgacactcgcctatggggacatgaaccacgagtggatcggcaacgagtggctccccagcctgggcctcccccagtaccgcagctacttcatggagtgccttgtagacgccaggatgctggaccacttgaccaagaaagaccttcgagggcagctgaaaatggtcgacagttttcacagaaacagtttccagtgtggaattatgtgcctgagaaggttaaattatgaccggaaagaactggaaagaaaaagagaagaaagtcagagtgaaataaaagacgtgcttgtttggagcaatgatcgagtgattcgctggatcctgtcaattggccttaaagaatatgcaaacaatcttatagagagtggtgttcacggagcacttctggccttagatgaaaccttcgacttcagtgcactggcactgctgttacagatcccgacgcagaacacacaggctcgtgctgtcttggaaagagaatttaacaaccttttggtcatggggactgatagaaggtttgatgaagatgatgataaaagctttaggagagcaccttcatggagaaaaaagtttagaccaaaggacattcgtggcttagctgctgggtcagcagagactctccctgcaaacttccgggtgacttcttctatgtcttccccctctatgcagccaaagaagatgcagatggacggtatgtgatgggtcacactaacctgtcacttgttgggagcatgagcagctttctgtctggaacattaataatgatctaaaacggcctatttaatatgttacaaggcacttgagtatggttgcatgtccaaatataaatgtttttaaattaactctaacatttgtttataaaagtttaaccataataatagaatttttaaaacacgcttgtctggttgaatcttagcatatttttccaactaataaagctcagtattcgtctgtgttctcagagagagactgaggcatacttgtaaatttgtgtctgtgacaggccgtgctagaaagctctttcaggaaatagtagtgtagtagtagcttccaaaccacataatttactgctctcc

SEQ ID NO: 171785 - DNA, 563 bp, Homo sapiens
  Payload ID: 13762
  Gene Symbol: PPFIA1
  Gene Name: protein tyrosine phosphatase, receptor type, f polypeptide (PTPRF), interacting protein (liprin), alpha 1
  ENST ID: ENST00000532024
  CDS Start-End: 267-563
ggcttgcccttttttgtgagggtagtcctttgggatcttgaccccttccctggatttttgtctgtgttaatgtcttcatgttgtgtatttttgcacttaatatttgccctgtgtatgttttcccagcttatttacacacaaagcataacagatctgagcataatgagactgcccatctttttagctacagatacctgtaaagttgcatatttgtgggaacctgtattctgagcttaattactgtagcctgggtctttcatttcaagatgatgtgcgaggtgatgccgaccatcagcgaagcagaaggcccccctggaggaggtggaggccatggttccggctccccttcacagccagatgcagattcacattttgaacagttgatggtctccatgctagaagaaagggaccgccttcttgatacactgagagagactcaagaaacgctggccttaacccaggggaagttacacgaggttggtcatgaaagagattccttgcagagacagctcaacacggcacttccacaggagttcgcagcacttactaaagaactcaatgta

SEQ ID NO: 171786 - DNA, 575 bp, Homo sapiens
  Payload ID: 13762
  Gene Symbol: PPFIA1
  Gene Name: protein tyrosine phosphatase, receptor type, f polypeptide (PTPRF), interacting protein (liprin), alpha 1
  ENST ID: ENST00000530746
  CDS Start-End: 101-575
tcaacggtcctcaccccccggggttcggggcttccgccgcacctgatacaggaggggaggagtgcggctcgagcaggctggaggtcaccatccccatcagatgatgtgcgaggtgatgccgaccatcagcgaagcagaaggcccccctggaggaggtggaggccatggttccggctccccttcacagccagatgcagattcacattttgaacagttgatggtctccatgctagaagaaagggaccgccttcttgatacactgagagagactcaagaaacgctggccttaacccaggggaagttacacgaggttggtcatgaaagagattccttgcagagacagctcaacacggcacttccacaggagttcgcagcacttactaaagaactcaatgtatgcagggaacagctccttgaaagggaagaagaaattgctgaactgaaagcagaaaggaataacaccaggctgctgttagagcatttggaatgccttgtctccaggcatgagcggtctcttaggatgaccgtggtgaagagacaagcgcagtctccagcaggcgtgtccagcgaagtgg

SEQ ID NO: 171787 - DNA, 553 bp, Homo sapiens
  Payload ID: 13762
  Gene Symbol: PPFIA1
  Gene Name: protein tyrosine phosphatase, receptor type, f polypeptide (PTPRF), interacting protein (liprin), alpha 1
  ENST ID: ENST00000533894
  CDS Start-End: 1-100
acagaacactggagctcttcaggagtgcacggctccactccagtgttcctttccctgtgtgaagttaacatggacagtgagtgctcagattgcaggttgattcaggaagaaaaagaaaatacagagcagcgggcagaggagattgaaagtcgagttggcagtggaagtctagacaatcttggtcgttttagatcaatgagctccattcccccctaccctgcttcctcgcttgctagctcctcccctccgggcagtgggcgctccaccccacgaaggatccctcacagcccagctcgggaagtggacagactgggcgtcatgacccttttgccaccttccagagaagaggtacgagatgacaagacaaccataaagtgtgaaacctccccgccttcctccccgagagcccttcggttagaccggctgcacaaaggggcgctgcacaccgtcagccacgaggacatcagggacataaggaactccacaggctcccaggatggtcccgtgagcaaccccagcagtagcaacagtagccaggactcgctccacaaag

SEQ ID NO: 171788 - DNA, 710 bp, Homo sapiens
  Payload ID: 13762
  Gene Symbol: PPFIA1
  Gene Name: protein tyrosine phosphatase, receptor type, f polypeptide (PTPRF), interacting protein (liprin), alpha 1
  ENST ID: ENST00000530798
  CDS Start-End: 1-710
cactgttgacaagctgctttcagaatctaatgagaggcttcaacttcatcttaaagagagaatggctgctttggaagataagaactctcttttaagagaagttgaaagtgcaaaaaagcagttagaagaaacacaacacgataaggatcagcttgtcctaaacattgaagcactgagggctgaactagaccacatgagactaagaggtgcttcacttcatcatggccgaccccacttgggcagtgtcccagatttcaggttccccatggcagacggccacacagactcctacagcaccagtgcagtgctgcggcgcccacagaaaggccggctggcagccctgcgagatgagccttccaaggtacgagatgacaagacaaccataaagtgtgaaacctccccgccttcctccccgagagcccttcggttagaccggctgcacaaaggggcgctgcacaccgtcagccacgaggacatcagggacataaggaactccacaggctcccaggatggtcccgtgagcaaccccagcagtagcaacagtagccaggactcgctccacaaagccccaaagaagaaaggcattaagtcctccattggccgcttgtttggcaagaaagaaaagggccgacctggacaaactggcaaagaagcattaggacaagctggtgtttccgagacggataactcatctcaggatgccttgggac

SEQ ID NO: 171789 - DNA, 5159 bp, Homo sapiens
  Payload ID: 13762
  Gene Symbol: PPFIA1
  Gene Name: protein tyrosine phosphatase, receptor type, f polypeptide (PTPRF), interacting protein (liprin), alpha 1
  ENST ID: ENST00000532504
  CDS Start-End: 143-1894
gcgggccccggggccgcggcgtggggcgggcaggcggacgccggccgcgggctgctttcgtcggctcccaagctctcccggagcgagcagccgcccgcgagccgccgcggagcctcctcgcccgctcccgccggcgagcaagatgatgtgcgaggtgatgccgaccatcagcgaagcagaaggcccccctggaggaggtggaggccatggttccggctccccttcacagccagatgcagattcacattttgaacagttgatggtctccatgctagaagaaagggaccgccttcttgatacactgagagagactcaagaaacgctggccttaacccaggggaagttacacgaggttggtcatgaaagagattccttgcagagacagctcaacacggcacttccacaggagttcgcagcacttactaaagaactcaatgtatgcagggaacagctccttgaaagggaagaagaaattgctgaactgaaagcagaaaggaataacaccaggctgctgttagagcatttggaatgccttgtctccaggcatgagcggtctcttaggatgaccgtggtgaagagacaagcgcagtctccagcaggcgtgtccagcgaagtggaagtgctgaaagcactgaagtccttatttgaacaccacaaagctctggatgaaaaggtgagagagcgattacgagtagcacttgaaagatgtagtttgttagaagaggaattaggtgccacacacaaagagctaatgattcttaaagaacagaataatcagaaaaaaactctaacagatggagtgctggacataaaccatgaacaagaaaatacaccaagcacgagtggaaagagatcttctgatggttctttaagccacgaggaagaccttgctaaagtaattgagctccaagaaatcataagtaagcagtcaagggaacagagccaaatgaaagaacgcctggcttccctttccagtcatgtgacagaactggaagaggatctggacacggctagaaaagatctcatcaaatctgaagaaatgaacacaaaattgcaacgagatgtccgtgaagccatggcccaaaaggaagatatggaagagagaatcactactcttgaaaaacgctacctcgctgcacagcgtgaagccacatctgtgcatgacctcaatgataaacttgaaaatgaaattgcaaataaagattctatgcatcgacagactgaagataaaaaccgccagttacaggagcgcttggaattggcagagcaaaagctgcaacagacactgaggaaggcagagacgctcccggaggtggaggcggagctggcccagagggtggcagcgctttccaaggctgaagagagacacggcaacattgaagaaaggttacgacagatggaagcacagttggaggagaagaatcaagaactgcagcgggcaaggcaaagagaaaaaatgaacgaagaacataataaacgtttatcagacactgttgacaagctgctttcagaatctaatgagaggcttcaacttcatcttaaagagagaatggctgctttggaagataagaactctcttttaagagaagttgaaagtgcaaaaaagcagttagaagaaacacaacacgataaggatcagcttgtcctaaacattgaagcactgagggctgaactagaccacatgagactaagagccgaccccacttgggcagtgtcccagatttcaggttccccatggcagacggccacacagactcctacagcaccagtgcagtgctgcggcgcccacagaaaggccggctggcagccctgcgagatgagccttccaaggtacaaactcttaatgagcaggattgggaacgtgcccagcaagctagtgtcttggcaaatgtagcacaagcattcgagagtgatgctgacgtgtctgatggtgaagatgacagggacactctcctcagctcagttgacctgctatcgcccagcgggcaggccgacgcgcacacactagccatgatgcttcaggagcagctggacgccatcaacaaagagatcaggttgattcaggaagaaaaagaaaatacagagcagcgggcagaggagattgaaagtcgagttggcagtggaagtctagacaatcttggtcgttttagatcaatgagctccattcccccctaccctgcttcctcgcttgctagctcctcccctccgggcagtgggcgctccaccccacgaaggatccctcacagcccagctcgggaagtggacagactgggcgtcatgacccttcctagtgatttaaggaaacatcgtagaaagttgccaccttccagagaagaggtacgagatgacaagacaaccataaagtgtgaaacctccccgccttcctccccgagagcccttcggttagaccggctgcacaaaggggcgctgcacaccgtcagccacgaggacatcagggacataaggaactccacaggctcccaggatggtcccgtgagcaaccccagcagtagcaacagtagccaggactcgctccacaaagccccaaagaagaaaggcattaagtcctccattggccgcttgtttggcaagaaagaaaagggccgacctggacaaactggcaaagaagcattaggacaagctggtgtttccgagacggataactcatctcaggatgccttgggacttagcaaattggggggacaggctgaaaaaaatcgtaaacttcaaaaaaagcatgaattgctggaggaagcccggagacaaggtttaccttttgcccaatgggacgggccaacggttgtggtctggctagagctctgggttgggatgccagcctggtatgtggctgcctgccgagcaaacgtgaaaagcggggccatcatgtcggccctgtccgacacagagatccagcgtgagattggcatcagcaaccccctgcacaggctgaagctgaggctggccatccaggagatcatgtcgctgaccagcccgtctgccccgcccacatctagaacgacactcgcctatggggacatgaaccacgagtggatcggcaacgagtggctccccagcctgggcctcccccagtaccgcagctacttcatggagtgccttgtagacgccaggatgctggaccacttgaccaagaaagaccttcgagggcagctgaaaatggtcgacagttttcacagaaacagtttccagtgtggaattatgtgcctgagaaggttaaattatgaccggaaagaactggaaagaaaaagagaagaaagtcagagtgaaataaaagacgtgcttgtttggagcaatgatcgagtgattcgctggatcctgtcaattggccttaaagaatatgcaaacaatcttatagagagtggtgttcacggagcacttctggccttagatgaaaccttcgacttcagtgcactggcactgctgttacagatcccgacgcagaacacacaggctcgtgctgtcttggaaagagaatttaacaaccttttggtcatggggactgatagaaggtttgatgaagatgatgataaaagctttaggagagcaccttcatggagaaaaaagtttagaccaaaggacattcgtggcttagctgctgggtcagcagagactctccctgcaaacttccgggtgacttcttctatgtcttccccctctatgcagccaaagaagatgcagatggacggcaatgtatcaggaacacagaggttggattctgctacagtcaggacttactcctgctaaagtctcctgttgtttacccacactacttctacagatgattatgcagcatttgaatccaacaaagactacattttggaatccagtggaatctttaatcttgttaatacttgttatatggaccctaagatattttattacagagtttttaattagtgaaaaattcatgaataccatagagaaaatattttagaatttaatgtttcttatatttatgtaaacttatgactcttcatttatatagttacttactttttcatgtatatccaggctataaatatcctttcaaatcatgttcttatacctaattttagtctttcaaatgaatgtactgtaatgcttgtatgtataaatcctatgaatagagggcttttgtaaattatgcatttattgtaattatcattaattttttaatgataaaccatgacaaaggattttacgtttataaaattatgacagaagccatgtgcattatcctttacggacgcagcctagctctacagcaatcatcctgaaataagcatacctaatttcaagcaattgttgtattttcatgactgaccttaactgtactttttctagcaagagatgctttattctgcagcatgaacagatttaaaatggctggtgttaaatatcagctcctaataagatgtggactgaaaacactatcacaacactatgagaagcccctagcactggttaacgctttcctagcctagtctctggatttggggagcttgtcttcagtggctgagactgtgagctgggagcagttctctcagctggagagactcgggatggggtaacctggggaccagtctagcccctgcaccctcttccctgcctctgctccttgggagcgggtggagagacacccatgtggctccccttagggccagcaccaagcaccacgctctcatcctgcaagtcggcgcacacagtggatgaaggcaggagacccagaaagcagtgcagtgcagctctaataaaggccttatttttcttatgtaaatcatctttttacatttgtttgtaaacatgtttaaagaacgaacctagtgggacatttttagactttgatgctctagccattttggattgtgtaagttgcagatgtggcttttactttttaaatggcatattaacaagccagcaaagtgtgtcagaccatggcgtggtatttattgtgcagcagatccagagacagaggcagcctgtcttttcagttggtttctgcttttaatttacttgtacaattcattgttactgttctgtttttctattaatcttttgtcaacttcctgattatgtaacaaagtatgtacagtctacttttgaactatttttatcacagtattatttattgctttctttcaataaagtactgaagcattttc

SEQ ID NO: 171790 - DNA, 1168 bp, Homo sapiens
  Payload ID: 13762
  Gene Symbol: PPFIA1
  Gene Name: protein tyrosine phosphatase, receptor type, f polypeptide (PTPRF), interacting protein (liprin), alpha 1
  ENST ID: ENST00000528750
  CDS Start-End: 1-1168
atgctgacgtgtctgatggtgaagatgacagggacactctcctcagctcagttgacctgctatcgcccagcgggcaggccgacgcgcacacactagccatgatgcttcaggagcagctggacgccatcaacaaagagatcaggttgattcaggaagaaaaagaaaatacagagcagcgggcagaggagattgaaagtcgagttggcagtggaagtctagacaatcttggtcgttttagatcaatgagctccattcccccctaccctgcttcctcgcttgctagctcctcccctccgggcagtgggcgctccaccccacgaaggatccctcacagcccagctcgggaagtggacagactgggcgtcatgacccttccatctccagattcatttttaatccagacctcaggtccccatcagtcagtagtttactcatccacctcccctcccagttccaccccatgctatagcgattcttcacagcatgctcagttgccaccttccagagaagaggtacgagatgacaagacaaccataaagtgtgaaacctccccgccttcctccccgagagcccttcggttagaccggctgcacaaaggggcgctgcacaccgtcagccacgaggacatcagggacataaggaactccacaggctcccaggatggtcccgtgagcaaccccagcagtagcaacagtagccaggactcgctccacaaagccccaaagaagaaaggcattaagtcctccattggccgcttgtttggcaagaaagaaaagggccgacctggacaaactggcaaagaagcattaggacaagctggtgtttccgagacggataactcatctcaggatgccttgggacttagcaaattggggggacaggctgaaaaaaatcgtaaacttcaaaaaaagcatgaattgctggaggaagcccggagacaaggtttaccttttgcccaatgggacgggccaacggttgtggtctggctagagctctgggttgggatgccagcctggtatgtggctgcctgccgagcaaacgtgaaaagcggggccatcatgtcggccctgtccgacacagagatccagcgtgagattggcatcagcaaccccctgcacaggctgaagctgaggctggccatccaggagatcatgtcgctgaccagccc

SEQ ID NO: 171791 - DNA, 745 bp, Homo sapiens
  Payload ID: 13762
  Gene Symbol: PPFIA1
  Gene Name: protein tyrosine phosphatase, receptor type, f polypeptide (PTPRF), interacting protein (liprin), alpha 1
  ENST ID: ENST00000528853
  CDS Start-End: 1-296
agaccaaaggacattcgtggcttagctgctgggtcagcagagactctccctgcaaacttccgggtgacttcttctatgtcttccccctctatgcagccaaagaagatgcagatggacgtttacccacactacttctacagatgattatgcagcatttgaatccaacaaagactacattttggaatccagtggaatctttaatcttgttaatacttgttatatggaccctaagatattttattacagagtttttaattagtgaaaaattcatgaataccatagagaaaatattttagaatttaatgtttcttatatttatgtaaacttatgactcttcatttatatagttacttactttttcatgtatatccaggctataaatatcctttcaaatcatgttcttatacctaattttagtctttcaaatgaatgtactgtaatgcttgtatgtataaatcctatgaatagagggcttttgtaaattatgcatttattgtaattatcattaattttttaatgataaaccatgacaaaggattttacgtttataaaattatgacagaagccatgtgcattatcctttacggacgcagcctagctctacagcaatcatcctgaaataagcatacctaatttcaagcaattgttgtattttcatgactgaccttaactgtactttttctagcaagagatgctttattctgcagcatgaacagatttaaaatggctggtgttaaatatcagc

SEQ ID NO: 171792 - DNA, 4537 bp, Homo sapiens
  Payload ID: 13762
  Gene Symbol: PPFIA1
  Gene Name: protein tyrosine phosphatase, receptor type, f polypeptide (PTPRF), interacting protein (liprin), alpha 1
  ENST ID: ENST00000526262
  CDS Start-End: 1-1163
caccaagcacgagtggaaagagatcttctgatggttctttaagccacgaggaagaccttgctaaagtaattgagctccaagaaatcataagtaagcagtcaagggaacagagccaaatgaaagaacgcctggcttccctttccagtcatgtgacagaactggaagaggatctggacacggctagaaaagatctcatcaaatctgaagaaatgaacacaaaattgcaacgagatgtccgtgaagccatggcccaaaaggaagatatggaagagagaatcactactcttgaaaaacgctacctcgctgcacagcgtgaagccacatctgtgcatgacctcaatgataaacttgaaaatgaaattgcaaataaagattctatgcatcgacagactgaagataaaaaccgccagttacaggagcgcttggaattggcagagcaaaagctgcaacagacactgaggaaggcagagacgctcccggaggtggaggcggagctggcccagagggtggcagcgctttccaagtctgaccttttgtcttctgggagctctgctgctaaggaagctaaactgttggaacttacttccaagcttaggaaggctgaagagagacacggcaacattgaagaaaggttacgacagatggaagcacagttggaggagaagaatcaagaactgcagcgggcaaggcaaagagaaaaaatgaacgaagaacataataaacgtttatcagacactgttgacaagctgctttcagaatctaatgagaggcttcaacttcatcttaaagagagaatggctgctttggaagataagaactctcttttaagagaagttgaaagtgcaaaaaagcagttagaagaaacacaacacgataaggatcagcttgtcctaaacattgaagcactgagggctgaactagaccacatgagactaagaggtgcttcacttcatcatggccgaccccacttgggcagtgtcccagatttcaggttccccatggcagacggccacacagactcctacagcaccagtgcagtgctgcggcgcccacagaaaggccggctggcagccctgcgagatgagccttccaaggcaaggtacaaactcttaatgagcaggattgggaacgtgcccagcaagctagtgtcttggcaaatgtagcacaagcattcgagagtgatgctgacgtgtctgatggtgaagatgacagggacactctcctcagctcagttgacctgctatcgcccagcgggcaggccgacgcgcacacactagccatgatgcttcaggagcagctggacgccatcaacaaagagatcaggttgattcaggaagaaaaagaaaatacagagcagcgggcagaggagattgaaagtcgagttggcagtggaagtctagacaatcttggtcgttttagatcaatgagctccattcccccctaccctgcttcctcgcttgctagctcctcccctccgggcagtgggcgctccaccccacgaaggatccctcacagcccagctcgggaagtggacagactgggcgtcatgacccttcctagtgatttaaggaaacatcgtagaaagttgccaccttccagagaagaggtacgagatgacaagacaaccataaagtgtgaaacctccccgccttcctccccgagagcccttcggttagaccggctgcacaaaggggcgctgcacaccgtcagccacgaggacatcagggacataaggaactccacaggctcccaggatggtcccgtgagcaaccccagcagtagcaacagtagccaggactcgctccacaaagccccaaagaagaaaggcattaagtcctccattggccgcttgtttggcaagaaagaaaagggccgacctggacaaactggcaaagaagcattaggacaagctggtgtttccgagacggataactcatctcaggatgccttgggacttagcaaattggggggacaggctgaaaaaaatcgtaaacttcaaaaaaagcatgaattgctggaggaagcccggagacaaggtttaccttttgcccaatgggacgggccaacggttgtggtctggctagagctctgggttgggatgccagcctggtatgtggctgcctgccgagcaaacgtgaaaagcggggccatcatgtcggccctgtccgacacagagatccagcgtgagattggcatcagcaaccccctgcacaggctgaagctgaggctggccatccaggagatcatgtcgctgaccagcccgtctgccccgcccacatctagaacgaccacaggaaatgtctggttaacacacgaagagatggaaacgctcgcagccacgccgcaaacggaagatgaggagggaagctgggctcagcagacactcgcctatggggacatgaaccacgagtggatcggcaacgagtggctccccagcctgggcctcccccagtaccgcagctacttcatggagtgccttgtagacgccaggatgctggaccacttgaccaagaaagaccttcgagggcagctgaaaatggtcgacagttttcacagaaacagtttccagtgtggaattatgtgcctgagaaggttaaattatgaccggaaagaactggaaagaaaaagagaagaaagtcagagtgaaataaaagacgtgcttgtttggagcaatgatcgagtgattcgctggatcctgtcaattggccttaaagaatatgcaaacaatcttatagagagtggtgttcacggagcacttctggccttagatgaaaccttcgacttcagtgcactggcactgctgttacagatcccgacgcagaacacacaggctcgtgctgtcttggaaagagaatttaacaaccttttggtcatggggactgatagaaggtttgatgaagatgatgataaaagctttaggagagcaccttcatggagaaaaaagtttagaccaaaggacattcgtggcttagctgctgggtcagcagagactctccctgcaaacttccgggtgacttcttctatgtcttccccctctatgcagccaaagaagatgcagatggacggcaatgtatcaggaacacagaggttggattctgctacagtcaggacttactcctgctaaagtctcctgttgtttacccacactacttctacagatgattatgcagcatttgaatccaacaaagactacattttggaatccagtggaatctttaatcttgttaatacttgttatatggaccctaagatattttattacagagtttttaattagtgaaaaattcatgaataccatagagaaaatattttagaatttaatgtttcttatatttatgtaaacttatgactcttcatttatatagttacttactttttcatgtatatccaggctataaatatcctttcaaatcatgttcttatacctaattttagtctttcaaatgaatgtactgtaatgcttgtatgtataaatcctatgaatagagggcttttgtaaattatgcatttattgtaattatcattaattttttaatgataaaccatgacaaaggattttacgtttataaaattatgacagaagccatgtgcattatcctttacggacgcagcctagctctacagcaatcatcctgaaataagcatacctaatttcaagcaattgttgtattttcatgactgaccttaactgtactttttctagcaagagatgctttattctgcagcatgaacagatttaaaatggctggtgttaaatatcagctcctaataagatgtggactgaaaacactatcacaacactatgagaagcccctagcactggttaacgctttcctagcctagtctctggatttggggagcttgtcttcagtggctgagactgtgagctgggagcagttctctcagctggagagactcgggatggggtaacctggggaccagtctagcccctgcaccctcttccctgcctctgctccttgggagcgggtggagagacacccatgtggctccccttagggccagcaccaagcaccacgctctcatcctgcaagtcggcgcacacagtggatgaaggcaggagacccagaaagcagtgcagtgcagctctaataaaggccttatttttcttatgtaaatcatctttttacatttgtttgtaaacatgtttaaagaacgaacctagtgggacatttttagactttgatgctctagccattttggattgtgtaagttgcagatgtggcttttactttttaaatggcatattaacaagccagcaaagtgtgtcagaccatggcgtggtatttattgtgcagcagatccagagacagaggcagcctgtcttttcagttggtttctgcttttaatttacttgtacaattcattgttactgttctgtttttctattaatcttttgtcaacttcctgattatgtaacaaagtatgtacagtctacttttgaactatttttatcacagtattatttattgctttctttcaataaagtactgaagcattttccactgccaatgaagaa

SEQ ID NO: 171793 - DNA, 879 bp, Homo sapiens
  Payload ID: 13762
  Gene Symbol: PPFIA1
  Gene Name: protein tyrosine phosphatase, receptor type, f polypeptide (PTPRF), interacting protein (liprin), alpha 1
  ENST ID: ENST00000530390
  CDS Start-End: 1-141
tcacagcccagctcgggaagtggacagactgggcgtcatgacccttccatctccagattcatttttaatccagacctcaggtccccatcagtcagtagtttactcatccacctcccctcccagttccaccccatgctatagcgattcttcacagcatgctcagcctagtgatttaaggaaacatcgtagaaagttgccaccttccagagaagaggtacgagatgacaagacaaccataaagtgtgaaacctccccgccttcctccccgagagcccttcggttagaccggctgcacaaaggggcgctgcacaccgtcagccacgaggacatcagggacataaggaactccacaggctcccaggatggtcccgtgagcaaccccagcagtagcaacagtagccaggactcgctccacaaagccccaaagaagaaaggcattaagtcctccattggccgcttgtttggcaagaaagaaaagggccgacctggacaaactggcaaagaagcattaggacaagctggtgtttccgagacggataactcatctcaggatgccttgggacttagcaaattggggggacaggctgaaaaaaatcgtaaacttcaaaaaaagcatgaattgctggaggaagcccggagacaaggtttaccttttgcccaatgggacgggccaacggttgtggtctggctagagctctgggttgggatgccagcctggtatgtggctgcctgccgagcaaacgtgaaaagcggggccatcatgtcggccctgtccgacacagagatccagcgtgagattggcatcagcaaccccctgcacaggctgaagctgaggctggccatccaggagatcatgtcgctgaccagcccgtctgcccc

SEQ ID NO: 171794 - DNA, 564 bp, Homo sapiens
  Payload ID: 13762
  Gene Symbol: PPFIA1
  Gene Name: protein tyrosine phosphatase, receptor type, f polypeptide (PTPRF), interacting protein (liprin), alpha 1
  ENST ID: ENST00000526369
  CDS Start-End: 1-292
aaagcagttagaagaaacacaacacgataaggatcagcttgtcctaaacattgaagcactgagggctgaactagaccacatgagactaagagccgaccccacttgggcagtgtcccagatttcaggttccccatggcagacggccacacagactcctacagcaccagtgcagtgctgcggcgcccacagaaaggccggctggcagccctgcgagatgagccttccaaggtacaaactcttaatgagcaggattgggaacgtgcccagcaagctagtgtcttggcaaatgtagcacaagcattcgagagtgatgctgacgtgtctgatggtgaagatgacagggacactctcctcagctcagttgacctgctatcgcccagcgggcaggccgacgcgcacacactagccatgatgcttcaggagcagctggacgccatcaacaaagagatcaggttgattcaggaagaaaaagaaaatacagagcagcgggcagaggagattgaaagtcgagttggcagtggaagtctagacaatcttggtcgttttagatcaatgagctccatt

SEQ ID NO: 171795 - DNA, 5517 bp, Homo sapiens
  Payload ID: 13763
  Gene Symbol: PPFIA2
  Gene Name: protein tyrosine phosphatase, receptor type, f polypeptide (PTPRF), interacting protein (liprin), alpha 2
  Uniprot ID: O75334
  ENST ID: ENST00000333447
  CDS Start-End: 340-3798
gagaacagatgggcaggtccacagcactgccagattctgcacaagctccatttatcgttggttcttgcttttttccttctgtgtttttaattttttaaaaaacattgtatgttctagagaactagcttcacaaaaggtcggtggctgatgatctttcagctaagatttcaaatgtagaagaacaattcaaaatgctatcactgtgtatgtaagaaggatggggcagatttcattttaccctctagtctccctcaatgcatgcacggatttatctgtacgctaagctctctgctctgcatctgtagctccttgtggattatattgtctcagtgatcagaaatgattttctcggatatgaacaccgtttctggctcccctaaagtgcatcctcctaatgggacccggttttacacttttcaagaatttgctgcactgacaaaagaattaaatgcctgcagggaacaacttctagaaaaggaagaagaaatctctgaacttaaagctgaaagaaacaacacaagactattactggagcatttggagtgccttgtgtcacgacatgaaagatcactaagaatgacggtggtaaaacggcaagcccagtctccctcaggagtatccagtgaagttgaagttctcaaggcactgaaatctttgtttgagcaccacaaggccttggatgaaaagattgttgccttgcgtgaacaaaatgttcatatacaaagaaaaatggcatcaagcgagggatccacagagtcagaacatcttgaagggatggaacctggacagaaagtccatgagaagcgtttgtccaatggttctatagactcaaccgatgaaactagtcaaatagttgaactacaagaattgcttgaaaagcaaaactatgaaatggcccagatgaaagaacgtttagcagccctttcttcccgagtgggagaggtggaacaggaagcagagacagcaagaaaggatctcattaaaacagaagaaatgaacaccaagtatcaaagggacattagggaggccatggcacaaaaggaagatatggaagaaagaattacaacccttgaaaagcgttacctcagtgctcagagagaatctacctccatacatgacatgaatgataaactagaaaatgagttagcaaataaagaagctatcctgcggcagatggaagagaaaaacagacagttacaagaacgtcttgagctagctgaacaaaagttgcagcagaccatgagaaaggctgaaaccttgcctgaagtagaggctgaactggctcagagaattgcagccctaaccaaggctgaagagagacatggaaatattgaagaacgtatgagacatttagagggtcaacttgaagagaagaatcaagaacttcaaagagctaggcaaagagagaaaatgaatgaggagcataacaagagattatcggatacggttgatagacttctgactgaatccaatgaacgcctacaactacacttaaaggaaagaatggctgctctagaagaaaagaatgttttaattcaagaatcagaaactttcagaaagaatcttgaagaatctttacatgataaggaaagattagcagaagaaattgaaaagctgagatctgaacttgaccaattgaaaatgagaactggctctttaattgaacccacaataccaagaactcatctagacacctcagctgagttgcggtactcagtgggatccctagtggacagccagtctgattacagaacaactaaagtaataagaagaccaaggagaggccgcatgggtgtgcgaagagatgagccaaaggtgaaatctcttggggatcacgagtggaatagaactcaacagattggagtactaagcagccacccttttgaaagtgacactgaaatgtctgatattgatgatgatgacagagaaacaatttttagctcaatggatcttctctctccaagtggtcattccgatgcccagacgctagccatgatgcttcaggaacaattggatgccatcaacaaagaaatcaggctaattcaggaagaaaaagaatctacagagttgcgtgctgaagaaattgaaaatagagtggctagtgtgagcctcgaaggcctgaatttggcaagggtccacccaggtacctccattactgcctctgttacagcttcatcgctggccagttcatctccccccagtggacactcaactccaaagctcacccctcgaagccctgccagggaaatggatcggatgggagtcatgacactgccaagtgatctgaggaaacatcggagaaagattgcagttgtggaagaagatggtcgagaggacaaagcaacaattaaatgtgaaacttctcctcctcctacccctagagccctcagaatgactcacactctcccttcttcctaccacaatgatgctcgaagtagtttatctgtctctcttgagccagaaagcctcgggcttggtagtgccaacagcagccaagactctcttcacaaagcccccaagaagaaaggaatcaagtcttcaataggacgtttgtttggtaaaaaagaaaaagctcgacttgggcagctccgaggctttatggagactgaagctgcagctcaggagtccctggggttaggcaaactcggaactcaagctgagaaggatcgaagactaaagaaaaagcatgaacttcttgaagaagctcggagaaagggattaccttttgcccagtgggatgggccaactgtggtcgcatggctagagctttggttgggaatgcctgcgtggtacgtggcagcctgccgagccaacgtgaagagtggtgccatcatgtctgctttatctgacactgagatccagagagaaattggaatcagcaatccactgcatcgcttaaaacttcgattagcaatccaggagatggtttccctaacaagtccttcagctcctccaacatctcgaactccttcaggcaacgtttgggtgactcatgaagaaatggaaaatcttgcagctccagcaaaaacgaaagaatctgaggaaggaagctgggcccagaccctggcttatggagatatgaatcatgagtggattggaaatgaatggcttcccagcttggggttacctcagtacagaagttactttatggaatgcttggtagatgcaagaatgttagatcacctaacaaaaaaagatctccgtgtccatttaaaaatggtggatagtttccatcgaacaagtttacaatatggaattatgtgcttaaagaggttgaattatgacagaaaagaactagaaagaagacgggaagcaagccaacatgaaataaaagacgtgttggtgtggagcaatgaccgagttattcgctggatacaagcaattggacttcgagaatatgcaaataatatacttgagagcggtgtgcatggctcacttatagccctggatgaaaactttgactacagcagcttagctttattattacagattccaacacagaacacccaggcaaggcagattcttgaaagagaatacaataacctcttggccctgggaactgaaaggcgactggatgaaagtgatgacaagaacttcagacgtggatcaacctggagaaggcagtttcctcctcgtgaagtacatggaatcagcatgatgcctgggtcctcagaaacattaccagctggatttaggttaaccacaacctctgggcagtcaagaaaaatgacaacagatgttgcttcatcaagactgcagaggttagacaactccactgttcgcacatactcatgttgaccagccactcaaaggaggcagcactgacctgctatggcgtcttttcagtctactctacctaaagtgcactaccatctaagaagacgagcagtgaaaacctttgtgaaaactgaattctaaggaaataatgacgtcatgacttattaaaagctgaaaaatgtgatttttggggggagtcagatattacatttgattagtttactacaaattgtaataaaatgcttaagtcatttgaataataaacatcatctacatcataaactctgtacaacagatgcttttatgaaatgaagccagttgtttttcatgttttattgtaatatactaggcatttatgtattaccgtgcatttctttttaaatgtgtaagtcttatgtaaatggatataaatatgattttttaaaaaataaaatatatggttcatggagtctcgagtgcaaacatttgacaattccaagtactgtttgtattttaccattccaccatttttacagtttttggattgttaatagtcaaatcaatatgtttccttgaagcatgtttcatgcttcaacgtgtttctccttcaagtctgtcaatacttaaagctgaacaacctgcctctgatcatgtaaaaaagaatgatttaacctggaaccggagccaaaaatagagctttaaaggcaatcagggatgtcctatatctttagaaatagcactgtgatggcttgatctccttttcaatacaaaacaaagccaagctgtttacaagggtcaaaagcaattatttaaaaatttatattaaaaaaccataatcttctcttgttacctgtggaccaagaaaaaaaaaaagataaaaaaacttctttactaagaaccacatgttcattcaaatatcttgaaatgccagccagtactggacagtgaatgtcaaccaccgcagagtctgaggctcatttccactagagaaaacgaaacccaagatacctttcccttttgtcaatgtaacagggcattagccagactcatgtctaatgttataagcttttagccgagatggccttgttgcgacttccctgaagtcagttttatcagaggaaataaatgaaagacagaatgattaacatatatagtgtataaaagtatagaagagtaatctcttccctgtggctttatttggtggtgttactgttgtttattctttgtttatatgggagattcaaagtaaagcctatttaataataccatttatctaactgctgattttctgctgcttgatcttattaagcgcaagacctgtcattagtaatttcttttctgtattttaatttgctatgtttgcacgtacattacatttgttttgatgtctatttttatttaacagattcagtcaaaaggtaatgataacagaaaccctttccattgtcaataaaaaaaataataattccagttctctgtttaagctttgttttctagtcacataaggctcgacaatttacttaaactatcaggaaatgtgttctttgggtgacccaaatatttagcttcaaaattgagtctgccacaagagggagatctaaacttgcttatgggagtgatcttaaaatttttttctaaaaatgtggcctgagtaggaacaatgagaagtagctttctaagctcatctaaacatgggcatcttgattcatagaaatgaaatagaatataggaactacgacattataatgccataactagatt

SEQ ID NO: 171796 - DNA, 3903 bp, Homo sapiens
  Payload ID: 13763
  Gene Symbol: PPFIA2
  Gene Name: protein tyrosine phosphatase, receptor type, f polypeptide (PTPRF), interacting protein (liprin), alpha 2
  Uniprot ID: O75334
  ENST ID: ENST00000407050
  CDS Start-End: 340-3810
gagaacagatgggcaggtccacagcactgccagattctgcacaagctccatttatcgttggttcttgcttttttccttctgtgtttttaattttttaaaaaacattgtatgttctagagaactagcttcacaaaaggtcggtggctgatgatctttcagctaagatttcaaatgtagaagaacaattcaaaatgctatcactgtgtatgtaagaaggatggggcagatttcattttaccctctagtctccctcaatgcatgcacggatttatctgtacgctaagctctctgctctgcatctgtagctccttgtggattatattgtctcagtgatcagaaatgattttctcggatatgaacaccgtttctggctcccctaaagtgcatcctcctaatgggacccggttttacacttttcaagaatttgctgcactgacaaaagaattaaatgcctgcagggaacaacttctagaaaaggaagaagaaatctctgaacttaaagctgaaagaaacaacacaagactattactggagcatttggagtgccttgtgtcacgacatgaaagatcactaagaatgacggtggtaaaacggcaagcccagtctccctcaggagtatccagtgaagttgaagttctcaaggcactgaaatctttgtttgagcaccacaaggccttggatgaaaaggtaagggagcgactgagggtttctttagaaagagtctctgcactggaagaagaactagctgctgctaatcaggagattgttgccttgcgtgaacaaaatgttcatatacaaagaaaaatggcatcaagcgagggatccacagagtcagaacatcttgaagggatggaacctggacagaaagtccatgagaagcgtttgtccaatggttctatagactcaaccgatgaaactagtcaaatagttgaactacaagaattgcttgaaaagcaaaactatgaaatggcccagatgaaagaacgtttagcagccctttcttcccgagtgggagaggtggaacaggaagcagagacagcaagaaaggatctcattaaaacagaagaaatgaacaccaagtatcaaagggacattagggaggccatggcacaaaaggaagatatggaagaaagaattacaacccttgaaaagcgttacctcagtgctcagagagaatctacctccatacatgacatgaatgataaactagaaaatgagttagcaaataaagaagctatcctgcggcagatggaagagaaaaacagacagttacaagaacgtcttgagctagctgaacaaaagttgcagcagaccatgagaaaggctgaaaccttgcctgaagtagaggctgaactggctcagagaattgcagccctaaccaaggctgaagagagacatggaaatattgaagaacgtatgagacatttagagggtcaacttgaagagaagaatcaagaacttcaaagagctaggcaaagagagaaaatgaatgaggagcataacaagagattatcggatacggttgatagacttctgactgaatccaatgaacgcctacaactacacttaaaggaaagaatggctgctctagaagaaaagaatgttttaattcaagaatcagaaactttcagaaagaatcttgaagaatctttacatgataaggaaagattagcagaagaaattgaaaagctgagatctgaacttgaccaattgaaaatgagaactggctctttaattgaacccacaataccaagaactcatctagacacctcagctgagttgcggtactcagtgggatccctagtggacagccagtctgattacagaacaactaaagtaataagaagaccaaggagaggccgcatgggtgtgcgaagagatgagccaaaggtgaaatctcttggggatcacgagtggaatagaactcaacagattggagtactaagcagccacccttttgaaagtgacactgaaatgtctgatattgatgatgatgacagagaaacaatttttagctcaatggatcttctctctccaagtggtcattccgatgcccagacgctagccatgatgcttcaggaacaattggatgccatcaacaaagaaatcaggctaattcaggaagaaaaagaatctacagagttgcgtgctgaagaaattgaaaatagagtggctagtgtgagcctcgaaggcctgaatttggcaagggtccacccaggtacctccattactgcctctgttacagcttcatcgctggccagttcatctccccccagtggacactcaactccaaagctcacccctcgaagccctgccagggaaatggatcggatgggagtcatgacactgccaagtgatctgaggaaacatcggagaaagattgcagttgtggaagaagatggtcgagaggacaaagcaacaattaaatgtgaaacttctcctcctcctacccctagagccctcagaatgactcacactctcccttcttcctaccacaatgatgctcgaagtagtttatctgtctctcttgagccagaaagcctcgggcttggtagtgccaacagcagccaagactctcttcacaaagcccccaagaagaaaggaatcaagtcttcaataggacgtttgtttggtaaaaaagaaaaagctcgacttgggcagctccgaggctttatggagactgaagctgcagctcaggagtccctggggttaggcaaactcggaactcaagctgagaaggatcgaagactaaagaaaaagcatgaacttcttgaagaagctcggagaaagggattaccttttgcccagtgggatgggccaactgtggtcgcatggctagagctttggttgggaatgcctgcgtggtacgtggcagcctgccgagccaacgtgaagagtggtgccatcatgtctgctttatctgacactgagatccagagagaaattggaatcagcaatccactgcatcgcttaaaacttcgattagcaatccaggagatggtttccctaacaagtccttcagctcctccaacatctcgaactaaagaatctgaggaaggaagctgggcccagaccctggcttatggagatatgaatcatgagtggattggaaatgaatggcttcccagcttggggttacctcagtacagaagttactttatggaatgcttggtagatgcaagaatgttagatcacctaacaaaaaaagatctccgtgtccatttaaaaatggtggatagtttccatcgaacaagtttacaatatggaattatgtgcttaaagaggttgaattatgacagaaaagaactagaaagaagacgggaagcaagccaacatgaaataaaagacgtgttggtgtggagcaatgaccgagttattcgctggatacaagcaattggacttcgagaatatgcaaataatatacttgagagcggtgtgcatggctcacttatagccctggatgaaaactttgactacagcagcttagctttattattacagattccaacacagaacacccaggcaaggcagattcttgaaagagaatacaataacctcttggccctgggaactgaaaggcgactggatgaaagtgatgacaagaacttcagacgtggatcaacctggagaaggcagtttcctcctcgtgaagtacatggaatcagcatgatgcctgggtcctcagaaacattaccagctggatttaggttaaccacaacctctgggcagtcaagaaaaatgacaacagatgttgcttcatcaagactgcagaggttagacaactccactgttcgcacatactcatgttgaccagccactcaaaggaggcagcactgacctgctatggcgtcttttcagtctactctacctaaagtgcactaccatctaagaagacgagcagtg

SEQ ID NO: 171797 - DNA, 3782 bp, Homo sapiens
  Payload ID: 13763
  Gene Symbol: PPFIA2
  Gene Name: protein tyrosine phosphatase, receptor type, f polypeptide (PTPRF), interacting protein (liprin), alpha 2
  Uniprot ID: O75334
  ENST ID: ENST00000443686
  CDS Start-End: 309-3767
agattctgcacaagctccatttatcgttggttcttgcttttttccttctgtgtttttaattttttaaaaaacattgtatgttctagagaactagcttcacaaaaggtcggtggctgatgatctttcagctaagatttcaaatgtagaagaacaattcaaaatgctatcactgtgtatgtaagaaggatggggcagatttcattttaccctctagtctccctcaatgcatgcacggatttatctgtacgctaagctctctgctctgcatctgtagctccttgtggattatattgtctcagtgatcagaaatgattttctcggatatgaacaccgtttctggctcccctaaagtgcatcctcctaatgggacccggttttacacttttcaagaatttgctgcactgacaaaagaattaaatgcctgcagggaacaacttctagaaaaggaagaagaaatctctgaacttaaagctgaaagaaacaacacaagactattactggagcatttggagtgccttgtgtcacgacatgaaagatcactaagaatgacggtggtaaaacggcaagcccagtctccctcaggagtatccagtgaagttgaagttctcaaggcactgaaatctttgtttgagcaccacaaggccttggatgaaaagattgttgccttgcgtgaacaaaatgttcatatacaaagaaaaatggcatcaagcgagggatccacagagtcagaacatcttgaagggatggaacctggacagaaagtccatgagaagcgtttgtccaatggttctatagactcaaccgatgaaactagtcaaatagttgaactacaagaattgcttgaaaagcaaaactatgaaatggcccagatgaaagaacgtttagcagccctttcttcccgagtgggagaggtggaacaggaagcagagacagcaagaaaggatctcattaaaacagaagaaatgaacaccaagtatcaaagggacattagggaggccatggcacaaaaggaagatatggaagaaagaattacaacccttgaaaagcgttacctcagtgctcagagagaatctacctccatacatgacatgaatgataaactagaaaatgagttagcaaataaagaagctatcctgcggcagatggaagagaaaaacagacagttacaagaacgtcttgagctagctgaacaaaagttgcagcagaccatgagaaaggctgaaaccttgcctgaagtagaggctgaactggctcagagaattgcagccctaaccaaggctgaagagagacatggaaatattgaagaacgtatgagacatttagagggtcaacttgaagagaagaatcaagaacttcaaagagctaggcaaagagagaaaatgaatgaggagcataacaagagattatcggatacggttgatagacttctgactgaatccaatgaacgcctacaactacacttaaaggaaagaatggctgctctagaagaaaagaatgttttaattcaagaatcagaaactttcagaaagaatcttgaagaatctttacatgataaggaaagattagcagaagaaattgaaaagctgagatctgaacttgaccaattgaaaatgagaactggctctttaattgaacccacaataccaagaactcatctagacacctcagctgagttgcggtactcagtgggatccctagtggacagccagtctgattacagaacaactaaagtaataagaagaccaaggagaggccgcatgggtgtgcgaagagatgagccaaaggtgaaatctcttggggatcacgagtggaatagaactcaacagattggagtactaagcagccacccttttgaaagtgacactgaaatgtctgatattgatgatgatgacagagaaacaatttttagctcaatggatcttctctctccaagtggtcattccgatgcccagacgctagccatgatgcttcaggaacaattggatgccatcaacaaagaaatcaggctaattcaggaagaaaaagaatctacagagttgcgtgctgaagaaattgaaaatagagtggctagtgtgagcctcgaaggcctgaatttggcaagggtccacccaggtacctccattactgcctctgttacagcttcatcgctggccagttcatctccccccagtggacactcaactccaaagctcacccctcgaagccctgccagggaaatggatcggatgggagtcatgacactgccaagtgatctgaggaaacatcggagaaagattgcagttgtggaagaagatggtcgagaggacaaagcaacaattaaatgtgaaacttctcctcctcctacccctagagccctcagaatgactcacactctcccttcttcctaccacaatgatgctcgaagtagtttatctgtctctcttgagccagaaagcctcgggcttggtagtgccaacagcagccaagactctcttcacaaagcccccaagaagaaaggaatcaagtcttcaataggacgtttgtttggtaaaaaagaaaaagctcgacttgggcagctccgaggctttatggagactgaagctgcagctcaggagtccctggggttaggcaaactcggaactcaagctgagaaggatcgaagactaaagaaaaagcatgaacttcttgaagaagctcggagaaagggattaccttttgcccagtgggatgggccaactgtggtcgcatggctagagctttggttgggaatgcctgcgtggtacgtggcagcctgccgagccaacgtgaagagtggtgccatcatgtctgctttatctgacactgagatccagagagaaattggaatcagcaatccactgcatcgcttaaaacttcgattagcaatccaggagatggtttccctaacaagtccttcagctcctccaacatctcgaactccttcaggcaacgtttgggtgactcatgaagaaatggaaaatcttgcagctccagcaaaaacgaaagaatctgaggaaggaagctgggcccagaccctggcttatggagatatgaatcatgagtggattggaaatgaatggcttcccagcttggggttacctcagtacagaagttactttatggaatgcttggtagatgcaagaatgttagatcacctaacaaaaaaagatctccgtgtccatttaaaaatggtggatagtttccatcgaacaagtttacaatatggaattatgtgcttaaagaggttgaattatgacagaaaagaactagaaagaagacgggaagcaagccaacatgaaataaaagacgtgttggtgtggagcaatgaccgagttattcgctggatacaagcaattggacttcgagaatatgcaaataatatacttgagagcggtgtgcatggctcacttatagccctggatgaaaactttgactacagcagcttagctttattattacagattccaacacagaacacccaggcaaggcagattcttgaaagagaatacaataacctcttggccctgggaactgaaaggcgactggatgaaagtgatgacaagaacttcagacgtggatcaacctggagaaggcagtttcctcctcgtgaagtacatggaatcagcatgatgcctgggtcctcagaaacattaccagctggatttaggttaaccacaacctctgggcagtcaagaaaaatgacaacagatgttgcttcatcaagactgcagaggttagacaactccactgttcgcacatactcatgttgaccagccactcaaagg

SEQ ID NO: 171798 - DNA, 2976 bp, Homo sapiens
  Payload ID: 13763
  Gene Symbol: PPFIA2
  Gene Name: protein tyrosine phosphatase, receptor type, f polypeptide (PTPRF), interacting protein (liprin), alpha 2
  Uniprot ID: O75334
  ENST ID: ENST00000541570
  CDS Start-End: 159-2510
aaataactccaatgttttgctgatgcttggatgtaacaggcctttgtagctgacacatttcaagcaatgctgttcagctgcctgtttgaagaaagtttattttttaaaaactatgtttgcagttggctgaagagagacatggaaatattgaagaacgtatgagacatttagagggtcaacttgaagagaagaatcaagaacttcaaagagctaggcaaagagagaaaatgaatgaggagcataacaagagattatcggatacggttgatagacttctgactgaatccaatgaacgcctacaactacacttaaaggaaagaatggctgctctagaagaaaagaatgttttaattcaagaatcagaaactttcagaaagaatcttgaagaatctttacatgataaggaaagattagcagaagaaattgaaaagctgagatctgaacttgaccaattgaaaatgagaactggctctttaattgaacccacaataccaagaactcatctagacacctcagctgagttgcggtactcagtgggatccctagtggacagccagtctgattacagaacaactaaagtaataagaagaccaaggagaggccgcatgggtgtgcgaagagatgagccaaaggtgaaatctcttggggatcacgagtggaatagaactcaacagattggagtactaagcagccacccttttgaaagtgacactgaaatgtctgatattgatgatgatgacagagaaacaatttttagctcaatggatcttctctctccaagtggtcattccgatgcccagacgctagccatgatgcttcaggaacaattggatgccatcaacaaagaaatcaggctaattcaggaagaaaaagaatctacagagttgcgtgctgaagaaattgaaaatagagtggctagtgtgagcctcgaaggcctgaatttggcaagggtccacccaggtacctccattactgcctctgttacagcttcatcgctggccagttcatctccccccagtggacactcaactccaaagctcacccctcgaagccctgccagggaaatggatcggatgggagtcatgacactgccaagtgatctgaggaaacatcggagaaagattgcagttgtggaagaagatggtcgagaggacaaagcaacaattaaatgtgaaacttctcctcctcctacccctagagccctcagaatgactcacactctcccttcttcctaccacaatgatgctcgaagtagtttatctgtctctcttgagccagaaagcctcgggcttggtagtgccaacagcagccaagactctcttcacaaagcccccaagaagaaaggaatcaagtcttcaataggacgtttgtttggtaaaaaagaaaaagctcgacttgggcagctccgaggctttatggagactgaagctgcagctcaggagtccctggggttaggcaaactcggaactcaagctgagaaggatcgaagactaaagaaaaagcatgaacttcttgaagaagctcggagaaagggattaccttttgcccagtgggatgggccaactgtggtcgcatggctagagctttggttgggaatgcctgcgtggtacgtggcagcctgccgagccaacgtgaagagtggtgccatcatgtctgctttatctgacactgagatccagagagaaattggaatcagcaatccactgcatcgcttaaaacttcgattagcaatccaggagatggtttccctaacaagtccttcagctcctccaacatctcgaacttgtccggtttttctacagaccctggcttatggagatatgaatcatgagtggattggaaatgaatggcttcccagcttggggttacctcagtacagaagttactttatggaatgcttggtagatgcaagaatgttagatcacctaacaaaaaaagatctccgtgtccatttaaaaatggtggatagtttccatcgaacaagtttacaatatggaattatgtgcttaaagaggttgaattatgacagaaaagaactagaaagaagacgggaagcaagccaacatgaaataaaagacgtgttggtgtggagcaatgaccgagttattcgctggatacaagcaattggacttcgagaatatgcaaataatatacttgagagcggtgtgcatggctcacttatagccctggatgaaaactttgactacagcagcttagctttattattacagattccaacacagaacacccaggcaaggcagattcttgaaagagaatacaataacctcttggccctgggaactgaaaggcgactggatgaaagtgatgacaagaacttcagacgtggatcaacctggagaaggcagtttcctcctcgtgaagtacatggaatcagcatgatgcctgggtcctcagaaacattaccagctggatttaggttaaccacaacctctgggcagtcaagaaaaatgacaacagatgatggcgtcttttcagtctactctacctaaagtgcactaccatctaagaagacgagcagtgaaaacctttgtgaaaactgaattctaaggaaataatgacgtcatgacttattaaaagctgaaaaatgtgatttttggggggagtcagatattacatttgattagtttactacaaattgtaataaaatgcttaagtcatttgaataataaacatcatctacatcataaactctgtacaacagatgcttttatgaaatgaagccagttgtttttcatgttttattgtaatatactaggcatttatgtattaccgtgcatttctttttaaatgtgtaagtcttatgtaaatggatataaatatgattttttaaaaaataaaatatatggttcatggagtctcgagtgcaaacatttgacaattccaagtactgtttgtattttaccattccaccatttttacagtttttggattgttaatagtcaaatcaatatgttt

SEQ ID NO: 171799 - DNA, 4192 bp, Homo sapiens
  Payload ID: 13763
  Gene Symbol: PPFIA2
  Gene Name: protein tyrosine phosphatase, receptor type, f polypeptide (PTPRF), interacting protein (liprin), alpha 2
  Uniprot ID: O75334
  ENST ID: ENST00000541017
  CDS Start-End: 1142-2473
aaataactccaatgttttgctgatgcttggatgtaacaggcctttgtagctgacacatttcaagcaatgctgttcagctgcctgtttgaagaaagtttattttttaaaaactatgtttgcagttggctgaagagagacatggaaatattgaagaacgtatgagacatttagagggtcaacttgaagagaagaatcaagaacttcaaagagctaggcaaagagagaaaatgaatgaggagcataacaagagattatcggatacggttgatagacttctgactgaatccaatgaacgcctacaactacacttaaaggaaagaatggctgctctagaagaaaagttggcagctaccagaccagcaagagttatgagagctggttaccaattccagagcataaattaagaatgttttaattcaagaatcagaaactttcagaaagaatcttgaagaatctttacatgataaggaaagattagcagaagaaattgaaaagctgagatctgaacttgaccaattgaaaatgagaactggctctttaattgaacccacaataccaagaactcatctagacacctcagctgagttgcggtactcagtgggatccctagtggacagccagtctgattacagaacaactaaagtaataagaagaccaaggagaggccgcatgggtgtgcgaagagatgagccaaaggtgaaatctcttggggatcacgagtggaatagaactcaacagattggagtactaagcagccacccttttgaaagtgacactgaaatgtctgatattgatgatgatgacagagaaacaatttttagctcaatggatcttctctctccaagtggtcattccgatgcccagacgctagccatgatgcttcaggaacaattggatgccatcaacaaagaaatcaggctaattcaggaagaaaaagaatctacagagttgcgtgctgaagaaattgaaaatagagtggctagtgtgagcctcgaaggcctgaatttggcaagggtccacccagccaagtgatctgaggaaacatcggagaaagattgcagttgtggaagaagatggtcgagaggacaaagcaacaattaaatgtgaaacttctcctcctcctacccctagagccctcagaatgactcacactctcccttcttcctaccacaatgatgctcgaagtagtttatctgtctctcttgagccagaaagcctcgggcttggtagtgccaacagcagccaagactctcttcacaaagcccccaagaagaaaggaatcaagtcttcaataggacgtttgtttggtaaaaaagaaaaagctcgacttgggcagctccgaggctttatggagactgaagctgcagctcaggagtccctggggttaggcaaactcggaactcaagctgagaaggatcgaagactaaagaaaaagcatgaacttcttgaagaagctcggagaaagggattaccttttgcccagtgggatgggccaactgtggtcgcatggctagagctttggttgggaatgcctgcgtggtacgtggcagcctgccgagccaacgtgaagagtggtgccatcatgtctgctttatctgacactgagatccagagagaaattggaatcagcaatccactgcatcgcttaaaacttcgattagcaatccaggagatggtttccctaacaagtccttcagctcctccaacatctcgaacttgtccggtttttctacagaccctggcttatggagatatgaatcatgagtggattggaaatgaatggcttcccagcttggggttacctcagtacagaagttactttatggaatgcttggtagatgcaagaatgttagatcacctaacaaaaaaagatctccgtgtccatttaaaaatggtggatagtttccatcgaacaagtttacaatatggaattatgtgcttaaagaggttgaattatgacagaaaagaactagaaagaagacgggaagcaagccaacatgaaataaaagacgtgttggtgtggagcaatgaccgagttattcgctggatacaagcaattggacttcgagaatatgcaaataatatacttgagagcggtgtgcatggctcacttatagccctggatgaaaactttgactacagcagcttagctttattattacagattccaacacagaacacccaggcaaggcagattcttgaaagagaatacaataacctcttggccctgggaactgaaaggcgactggatgaaagtgatgacaagaacttcagacgtggatcaacctggagaaggcagtttcctcctcgtgaagtacatggaatcagcatgatgcctgggtcctcagaaacattaccagctggatttaggttaaccacaacctctgggcagtcaagaaaaatgacaacagatgttgcttcatcaagactgcagaggttagacaactccactgttcgcacatactcatgttgaccagccactcaaaggaggcagcactgacctgctatggcgtcttttcagtctactctacctaaagtgcactaccatctaagaagacgagcagtgaaaacctttgtgaaaactgaattctaaggaaataatgacgtcatgacttattaaaagctgaaaaatgtgatttttggggggagtcagatattacatttgattagtttactacaaattgtaataaaatgcttaagtcatttgaataataaacatcatctacatcataaactctgtacaacagatgcttttatgaaatgaagccagttgtttttcatgttttattgtaatatactaggcatttatgtattaccgtgcatttctttttaaatgtgtaagtcttatgtaaatggatataaatatgattttttaaaaaataaaatatatggttcatggagtctcgagtgcaaacatttgacaattccaagtactgtttgtattttaccattccaccatttttacagtttttggattgttaatagtcaaatcaatatgtttccttgaagcatgtttcatgcttcaacgtgtttctccttcaagtctgtcaatacttaaagctgaacaacctgcctctgatcatgtaaaaaagaatgatttaacctggaaccggagccaaaaatagagctttaaaggcaatcagggatgtcctatatctttagaaatagcactgtgatggcttgatctccttttcaatacaaaacaaagccaagctgtttacaagggtcaaaagcaattatttaaaaatttatattaaaaaaccataatcttctcttgttacctgtggaccaagaaaaaaaaaaagataaaaaaacttctttactaagaaccacatgttcattcaaatatcttgaaatgccagccagtactggacagtgaatgtcaaccaccgcagagtctgaggctcatttccactagagaaaacgaaacccaagatacctttcccttttgtcaatgtaacagggcattagccagactcatgtctaatgttataagcttttagccgagatggccttgttgcgacttccctgaagtcagttttatcagaggaaataaatgaaagacagaatgattaacatatatagtgtataaaagtatagaagagtaatctcttccctgtggctttatttggtggtgttactgttgtttattctttgtttatatgggagattcaaagtaaagcctatttaataataccatttatctaactgctgattttctgctgcttgatcttattaagcgcaagacctgtcattagtaatttcttttctgtattttaatttgctatgtttgcacgtacattacatttgttttgatgtctatttttatttaacagattcagtcaaaaggtaatgataacagaaaccctttccattgtcaataaaaaaaataataattccagttctctgtttaagctttgttttctagtcacataaggctcgacaatttacttaaactatcaggaaatgtgttctttgggtgacccaaatatttagcttcaaaattgagtctgccacaagagggagatctaaacttgcttatgggagtgatcttaaaatttttttctaaaaatgtggcctgagtaggaacaatgagaagtagctttctaagctcatctaaacatgggcatcttgattcatagaaatgaaatagaatataggaactacgacattataatgccataactagatt

SEQ ID NO: 171800 - DNA, 852 bp, Homo sapiens
  Payload ID: 13763
  Gene Symbol: PPFIA2
  Gene Name: protein tyrosine phosphatase, receptor type, f polypeptide (PTPRF), interacting protein (liprin), alpha 2
  ENST ID: ENST00000548790
  CDS Start-End: 1-852
accacaaggccttggatgaaaaggtaagggagcgactgagggtttctttagaaagagtctctgcactggaagaagaactagctgctgctaatcaggagattgttgccttgcgtgaacaaaatgttcatatacaaagaaaaatggcatcaagcgagggatccacagagtcagaacatcttgaagggatggaacctggacagaaagtccatgagaagcgtttgtccaatggttctatagactcaaccgatgaaactagtcaaatagttgaactacaagaattgcttgaaaagcaaaactatgaaatggcccagatgaaagaacgtttagcagccctttcttcccgagtgggagaggtggaacaggaagcagagacagcaagaaaggatctcattaaaacagaagaaatgaacaccaagtatcaaagggacattagggaggccatggcacaaaaggaagatatggaagaaagaattacaacccttgaaaagcgttacctcagtgctcagagagaatctacctccatacatgacatgaatgataaactagaaaatgagttagcaaataaagaagctatcctgcggcaggttcagtatctctgtcttggttttcttctggtctgtgcgttctcatcattctcacaaaacggaatggaagagaaaaacagacagttacaagaacgtcttgagctagctgaacaaaagttgcagcagaccatgagaaaggctgaaaccttgcctgaagtagaggctgaactggctcagagaattgcagccctaaccaaggctgaagagagacatggaaatattgaagaacgtatgagacatttagagggtcaacttgaagagaagaatc

SEQ ID NO: 171801 - DNA, 563 bp, Homo sapiens
  Payload ID: 13763
  Gene Symbol: PPFIA2
  Gene Name: protein tyrosine phosphatase, receptor type, f polypeptide (PTPRF), interacting protein (liprin), alpha 2
  ENST ID: ENST00000550018
  CDS Start-End: 1-563
ctcaagctgagaaggatcgaagactaaagaaaaacacatctgggcatgaacttcttgaagaagctcggagaaagggattaccttttgcccagtgggatgggccaactgtggtcgcatggctagagctttggttgggaatgcctgcgtggtacgtggcagcctgccgagccaacgtgaagagtggtgccatcatgtctgctttatctgacactgagatccagagagaaattggaatcagcaatccactgcatcgcttaaaacttcgattagcaatccaggagatggtttccctaacaagtccttcagctcctccaacatctcgaacttgtccggtttttctacagaccctggcttatggagatatgaatcatgagtggattggaaatgaatggcttcccagcttggggttacctcagtacagaagttactttatggaatgcttggtagatgcaagaatgttagatcacctaacaaaaaaagatctccgtgtccatttaaaaatggtggatagtttccatcgaacaagtttacaatatggaattatgtgcttaaagaggttgaat

SEQ ID NO: 171802 - DNA, 3808 bp, Homo sapiens
  Payload ID: 13763
  Gene Symbol: PPFIA2
  Gene Name: protein tyrosine phosphatase, receptor type, f polypeptide (PTPRF), interacting protein (liprin), alpha 2
  ENST ID: ENST00000550359
  CDS Start-End: 236-3550
aatttgttttggctgcaggtacataagagatagcagtgggagatgggaagggagagccagaggccgaccaggacatcaggaatttgctgcactgacaaaagaattaaatgcctgcagggaacaacttctagaaaaggaagaagaaatctctgaacttaaagctgaaagaaacaacacaagactattactggagcatttggagtgccttgtgtcacgacatgaaagatcactaagaatgacggtggtaaaacggcaagcccagtctccctcaggagtatccagtgaagttgaagttctcaaggcactgaaatctttgtttgagcaccacaaggccttggatgaaaaggtaagggagcgactgagggtttctttagaaagagtctctgcactggaagaagaactagctgctgctaatcaggagattgttgccttgcgtgaacaaaatgttcatatacaaagaaaaatggcatcaagcgagggatccacagagtcagaacatcttgaagggatggaacctggacagaaagtccatgagaagcgtttgtccaatggttctatagactcaaccgatgaaactagtcaaatagttgaactacaagaattgcttgaaaagcaaaactatgaaatggcccagatgaaagaacgtttagcagccctttcttcccgagtgggagaggtggaacaggaagcagagacagcaagaaaggatctcattaaaacagaagaaatgaacaccaagtatcaaagggacattagggaggccatggcacaaaaggaagatatggaagaaagaattacaacccttgaaaagcgttacctcagtgctcagagagaatctacctccatacatgacatgaatgataaactagaaaatgagttagcaaataaagaagctatcctgcggcagatggaagagaaaaacagacagttacaagaacgtcttgagctagctgaacaaaagttgcagcagaccatgagaaaggctgaaaccttgcctgaagtagaggctgaactggctcagagaattgcagccctaaccaaggctgaagagagacatggaaatattgaagaacgtatgagacatttagagggtcaacttgaagagaagaatcaagaacttcaaagagctaggcaaagagagaaaatgaatgaggagcataacaagagattatcggatacggttgatagacttctgactgaatccaatgaacgcctacaactacacttaaaggaaagaatggctgctctagaagaaaagaatgttttaattcaagaatcagaaactttcagaaagaatcttgaagaatctttacatgataaggaaagattagcagaagaaattgaaaagctgagatctgaacttgaccaattgaaaatgagaactggctctttaattgaacccacaataccaagaactcatctagacacctcagctgagttgcggtactcagtgggatccctagtggacagccagtctgattacagaacaactaaagtaataagaagaccaaggagaggccgcatgggtgtgcgaagagatgagccaaaggtgaaatctcttggggatcacgagtggaatagaactcaacagattggagtactaagcagccacccttttgaaagtgacactgaaatgtctgatattgatgatgatgacagagaaacaatttttagctcaatggatcttctctctccaagtggtcattccgatgcccagacgctagccatgatgcttcaggaacaattggatgccatcaacaaagaaatcaggctaattcaggaagaaaaagaatctacagagttgcgtgctgaagaaattgaaaatagagtggctagtgtgagcctcgaaggcctgaatttggcaagggtccacccaggtacctccattactgcctctgttacagcttcatcgctggccagttcatctccccccagtggacactcaactccaaagctcacccctcgaagccctgccagggaaatggatcggatgggagtcatgacactgccaagtgatctgaggaaacatcggagaaagattgcagttgtggaagaagatggtcgagaggacaaagcaacaattaaatgtgaaacttctcctcctcctacccctagagccctcagaatgactcacactctcccttcttcctaccacaatgatgctcgaagtagtttatctgtctctcttgagccagaaagcctcgggcttggtagtgccaacagcagccaagactctcttcacaaagcccccaagaagaaaggaatcaagtcttcaataggacgtttgtttggtaaaaaagaaaaagctcgacttgggcagctccgaggctttatggagactgaagctgcagctcaggagtccctggggttaggcaaactcggaactcaagctgagaaggatcgaagactaaagaaaaagcatgaacttcttgaagaagctcggagaaagggattaccttttgcccagtgggatgggccaactgtggtcgcatggctagagctttggttgggaatgcctgcgtggtacgtggcagcctgccgagccaacgtgaagagtggtgccatcatgtctgctttatctgacactgagatccagagagaaattggaatcagcaatccactgcatcgcttaaaacttcgattagcaatccaggagatggtttccctaacaagtccttcagctcctccaacatctcgaactccttcaggcaacgtttgggtgactcatgaagaaatggaaaatcttgcagctccagcaaaaacgaaagaatctgaggaaggaagctgggcccagtgtccggtttttctacagaccctggcttatggagatatgaatcatgagtggattggaaatgaatggcttcccagcttggggttacctcagtacagaagttactttatggaatgcttggtagatgcaagaatgttagatcacctaacaaaaaaagatctccgtgtccatttaaaaatggtggatagtttccatcgaacaagtttacaatatggaattatgtgcttaaagaggttgaattatgacagaaaagaactagaaagaagacgggaagcaagccaacatgaaataaaagacgtgttggtgtggagcaatgaccgagttattcgctggatacaagcaattggacttcgagaatatgcaaataatatacttgagagcggtgtgcatggctcacttatagccctggatgaaaactttgactacagcagcttagctttattattacagattccaacacagaacacccaggcaaggcagattcttgaaagagaatacaataacctcttggccctgggaactgaaaggcgactggatgaaagtgatgacaagaacttcagacgtggatcaacctggagaaggcagtttcctcctcgtgaagtacatggaatcagcatgatgcctgggtcctcagaaacattaccagctggatttaggttaaccacaacctctgggcagtcaagaaaaatgacaacagatgttgcttcatcaagactgcagaggttagacaactccactgttcgcacatactcatgttgaccagccactcaaaggaggcagcactgacctgctatggcgtcttttcagtctactctacctaaagtgcactaccatctaagaagacgagcagtgaaaacctttgtgaaaactgaattctaaggaaataatgacgtcatgacttattaaaagctgaaaaatgtgatttttggggggagtcagatattacatttgattagtttactacaaattgtaataaaatgcttaagtcatttgaataataaacatcatctacatcat

SEQ ID NO: 171803 - DNA, 617 bp, Homo sapiens
  Payload ID: 13763
  Gene Symbol: PPFIA2
  Gene Name: protein tyrosine phosphatase, receptor type, f polypeptide (PTPRF), interacting protein (liprin), alpha 2
  ENST ID: ENST00000548670
  CDS Start-End: 245-617
caatgttttgctgatgcttggatgtaacaggcctttgtagctgacacatttcaagcaatgctgttcagctgcctgtttgaagaaagtttattttttaaaaactatgtttgcagttggtagtagcttgctttacattttatttcaatttatttagaggaaaagtgttaaccaaatcttacatttcaggtgtattcttcatatttcttaacaggctgaagagagacatggaaatattgaagaacgtatgagacatttagagggtcaacttgaagagaagaatcaagaacttcaaagagctaggcaaagagagaaaatgaatgaggagcataacaagagattatcggatacggttgatagacttctgactgaatccaatgaacgcctacaactacacttaaaggaaagaatggctgctctagaagaaaagaatgttttaattcaagaatcagaaactttcagaaagaatcttgaagaatctttacatgataaggaaagattagcagaagaaattgaaaagctgagatctgaacttgaccaattgaaaatgagaactggctctttaattgaacccacaataccaagaactcatctagacacctcagctgagttgcggtact

SEQ ID NO: 171804 - DNA, 3976 bp, Homo sapiens
  Payload ID: 13763
  Gene Symbol: PPFIA2
  Gene Name: protein tyrosine phosphatase, receptor type, f polypeptide (PTPRF), interacting protein (liprin), alpha 2
  Uniprot ID: O75334
  ENST ID: ENST00000552948
  CDS Start-End: 251-3961
cgatggacgcttctccttttggctgctgacggagccacgggaagatgccgagctcctgccacgccaccgggccggggcacgttccgggagggcgccggggcacgcgtgtgtctgagctgcctttctcctcccgttgctagggaaatggtccaggagtgctgggtgtgagcctcccttctcctcaagccggagactgcggttgtcattgatcaattgaagaagcaaggacccgaaatcacagacattagcaatgatgtgtgaagtgatgcccacgattaatgaggacaccccaatgagccaaagggggtcccaaagcagtggctcggactcagactcccattttgagcagctgatggtgaatatgctagatgaaagggatcgtcttctagacacccttcgggagacccaggaaagcctctcacttgcccagcaaagacttcaggatgtcatctatgaccgagactcactccagagacagctcaattcagccctgccacaggatatcgaatccctaacaggagggctggctggttctaagggggctgatccaccggaatttgctgcactgacaaaagaattaaatgcctgcagggaacaacttctagaaaaggaagaagaaatctctgaacttaaagctgaaagaaacaacacaagactattactggagcatttggagtgccttgtgtcacgacatgaaagatcactaagaatgacggtggtaaaacggcaagcccagtctccctcaggagtatccagtgaagttgaagttctcaaggcactgaaatctttgtttgagcaccacaaggccttggatgaaaaggtaagggagcgactgagggtttctttagaaagagtctctgcactggaagaagaactagctgctgctaatcaggagattgttgccttgcgtgaacaaaatgttcatatacaaagaaaaatggcatcaagcgagggatccacagagtcagaacatcttgaagggatggaacctggacagaaagtccatgagaagcgtttgtccaatggttctatagactcaaccgatgaaactagtcaaatagttgaactacaagaattgcttgaaaagcaaaactatgaaatggcccagatgaaagaacgtttagcagccctttcttcccgagtgggagaggtggaacaggaagcagagacagcaagaaaggatctcattaaaacagaagaaatgaacaccaagtatcaaagggacattagggaggccatggcacaaaaggaagatatggaagaaagaattacaacccttgaaaagcgttacctcagtgctcagagagaatctacctccatacatgacatgaatgataaactagaaaatgagttagcaaataaagaagctatcctgcggcagatggaagagaaaaacagacagttacaagaacgtcttgagctagctgaacaaaagttgcagcagaccatgagaaaggctgaaaccttgcctgaagtagaggctgaactggctcagagaattgcagccctaaccaaggctgaagagagacatggaaatattgaagaacgtatgagacatttagagggtcaacttgaagagaagaatcaagaacttcaaagagctaggcaaagagagaaaatgaatgaggagcataacaagagattatcggatacggttgatagacttctgactgaatccaatgaacgcctacaactacacttaaaggaaagaatggctgctctagaagaaaagaatgttttaattcaagaatcagaaactttcagaaagaatcttgaagaatctttacatgataaggaaagattagcagaagaaattgaaaagctgagatctgaacttgaccaattgaaaatgagaactggctctttaattgaacccacaataccaagaactcatctagacacctcagctgagttgcggtactcagtgggatccctagtggacagccagtctgattacagaacaactaaagtaataagaagaccaaggagaggccgcatgggtgtgcgaagagatgagccaaaggtgaaatctcttggggatcacgagtggaatagaactcaacagattggagtactaagcagccacccttttgaaagtgacactgaaatgtctgatattgatgatgatgacagagaaacaatttttagctcaatggatcttctctctccaagtggtcattccgatgcccagacgctagccatgatgcttcaggaacaattggatgccatcaacaaagaaatcaggctaattcaggaagaaaaagaatctacagagttgcgtgctgaagaaattgaaaatagagtggctagtgtgagcctcgaaggcctgaatttggcaagggtccacccaggtacctccattactgcctctgttacagcttcatcgctggccagttcatctccccccagtggacactcaactccaaagctcacccctcgaagccctgccagggaaatggatcggatgggagtcatgacactgccaagtgatctgaggaaacatcggagaaagattgcagttgtggaagaagatggtcgagaggacaaagcaacaattaaatgtgaaacttctcctcctcctacccctagagccctcagaatgactcacactctcccttcttcctaccacaatgatgctcgaagtagtttatctgtctctcttgagccagaaagcctcgggcttggtagtgccaacagcagccaagactctcttcacaaagcccccaagaagaaaggaatcaagtcttcaataggacgtttgtttggtaaaaaagaaaaagctcgacttgggcagctccgaggctttatggagactgaagctgcagctcaggagtccctggggttaggcaaactcggaactcaagctgagaaggatcgaagactaaagaaaaagcatgaacttcttgaagaagctcggagaaagggattaccttttgcccagtgggatgggccaactgtggtcgcatggctagagctttggttgggaatgcctgcgtggtacgtggcagcctgccgagccaacgtgaagagtggtgccatcatgtctgctttatctgacactgagatccagagagaaattggaatcagcaatccactgcatcgcttaaaacttcgattagcaatccaggagatggtttccctaacaagtccttcagctcctccaacatctcgaactaaagaatctgaggaaggaagctgggcccagtgtccggtttttctacagaccctggcttatggagatatgaatcatgagtggattggaaatgaatggcttcccagcttggggttacctcagtacagaagttactttatggaatgcttggtagatgcaagaatgttagatcacctaacaaaaaaagatctccgtgtccatttaaaaatggtggatagtttccatcgaacaagtttacaatatggaattatgtgcttaaagaggttgaattatgacagaaaagaactagaaagaagacgggaagcaagccaacatgaaataaaagacgtgttggtgtggagcaatgaccgagttattcgctggatacaagcaattggacttcgagaatatgcaaataatatacttgagagcggtgtgcatggctcacttatagccctggatgaaaactttgactacagcagcttagctttattattacagattccaacacagaacacccaggcaaggcagattcttgaaagagaatacaataacctcttggccctgggaactgaaaggcgactggatgaaagtgatgacaagaacttcagacgtggatcaacctggagaaggcagtttcctcctcgtgaagtacatggaatcagcatgatgcctgggtcctcagaaacattaccagctggatttaggttaaccacaacctctgggcagtcaagaaaaatgacaacagatgttgcttcatcaagactgcagaggttagacaactccactgttcgcacatactcatgttgaccagccactcaaagg

SEQ ID NO: 171805 - DNA, 574 bp, Homo sapiens
  Payload ID: 13763
  Gene Symbol: PPFIA2
  Gene Name: protein tyrosine phosphatase, receptor type, f polypeptide (PTPRF), interacting protein (liprin), alpha 2
  ENST ID: ENST00000547623
  CDS Start-End: 211-574
aagatgctgtagcgtcctcaccggctgccagcaggttggttcttccggccaattgaagcaagcaaagaggcttgcagaaaggccgggaggagaaaaatggggaaatggtccaggagtgctgggtgtgagcctcccttctcctcaagccggagactgcggttgtcattgatcaattgaagaagcaaggacccgaaatcacagacattagcaatgatgtgtgaagtgatgcccacgattaatgaggacaccccaatgagccaaagggggtcccaaagcagtggctcggactcagactcccattttgagcagctgatggtgaatatgctagatgaaagggatcgtcttctagacacccttcgggagacccaggaaagcctctcacttgcccagcaaagacttcaggatgtcatctatgaccgagactcactccagagacagctcaattcagccctgccacaggatatcgaatccctaacaggagggctggctggttctaagggggctgatccaccggaatttgctgcactgacaaaagaattaaatgcctgcagggaacaacttctagaaaaggaag

SEQ ID NO: 171806 - DNA, 917 bp, Homo sapiens
  Payload ID: 13763
  Gene Symbol: PPFIA2
  Gene Name: protein tyrosine phosphatase, receptor type, f polypeptide (PTPRF), interacting protein (liprin), alpha 2
  ENST ID: ENST00000553058
  CDS Start-End: 122-917
attgctcataaataactccaatgttttgctgatgcttggatgtaacaggcctttgtagctgacacatttcaagcaatgctgttcagctgcctgtttgaagaaagtttattttttaaaaactatgtttgcagctgaagagagacatggaaatattgaagaacgtatgagacatttagagggtcaacttgaagagaagaatcaagaacttcaaagagctaggcaaagagagaaaatgaatgaggagcataacaagagattatcggatacggttgatagacttctgactgaatccaatgaacgcctacaactacacttaaaggaaagaatggctgctctagaagaaaagaatgttttaattcaagaatcagaaactttcagaaagaatcttgaagaatctttacatgataaggaaagattagcagaagaaattgaaaagctgagatctgaacttgaccaattgaaaatgagaactggctctttaattgaacccacaataccaagaactcatctagacacctcagctgagttgcggtactcagtgggatccctagtggacagccagtctgattacagaacaactaaagtaataagaagaccaaggagaggccgcatgggtgtgcgaagagatgagccaaaggtgaaatctcttggggatcacgagtggaatagaactcaacagattggagtactaagcagccacccttttgaaagtgacactgaaatgtctgatattgatgatgatgacagagaaacaatttttagctcaatggatcttctctctccaagtggtcattccgatgcccagacgctagccatgatgcttcaggaacaattggatgccatcaacaaagaaatcaggctaattcaggaagaaaaagaatctacagagttgcgtgctgaagaaattgaaaatagag

SEQ ID NO: 171807 - DNA, 4033 bp, Homo sapiens
  Payload ID: 13763
  Gene Symbol: PPFIA2
  Gene Name: protein tyrosine phosphatase, receptor type, f polypeptide (PTPRF), interacting protein (liprin), alpha 2
  Uniprot ID: O75334
  ENST ID: ENST00000548586
  CDS Start-End: 257-4012
tttttccgatggacgcttctccttttggctgctgacggagccacgggaagatgccgagctcctgccacgccaccgggccggggcacgttccgggagggcgccggggcacgcgtgtgtctgagctgcctttctcctcccgttgctagggaaatggtccaggagtgctgggtgtgagcctcccttctcctcaagccggagactgcggttgtcattgatcaattgaagaagcaaggacccgaaatcacagacattagcaatgatgtgtgaagtgatgcccacgattaatgaggacaccccaatgagccaaagggggtcccaaagcagtggctcggactcagactcccattttgagcagctgatggtgaatatgctagatgaaagggatcgtcttctagacacccttcgggagacccaggaaagcctctcacttgcccagcaaagacttcaggatgtcatctatgaccgagactcactccagagacagctcaattcagccctgccacaggatatcgaatccctaacaggagggctggctggttctaagggggctgatccaccggaatttgctgcactgacaaaagaattaaatgcctgcagggaacaacttctagaaaaggaagaagaaatctctgaacttaaagctgaaagaaacaacacaagactattactggagcatttggagtgccttgtgtcacgacatgaaagatcactaagaatgacggtggtaaaacggcaagcccagtctccctcaggagtatccagtgaagttgaagttctcaaggcactgaaatctttgtttgagcaccacaaggccttggatgaaaaggtaagggagcgactgagggtttctttagaaagagtctctgcactggaagaagaactagctgctgctaatcaggagattgttgccttgcgtgaacaaaatgttcatatacaaagaaaaatggcatcaagcgagggatccacagagtcagaacatcttgaagggatggaacctggacagaaagtccatgagaagcgtttgtccaatggttctatagactcaaccgatgaaactagtcaaatagttgaactacaagaattgcttgaaaagcaaaactatgaaatggcccagatgaaagaacgtttagcagccctttcttcccgagtgggagaggtggaacaggaagcagagacagcaagaaaggatctcattaaaacagaagaaatgaacaccaagtatcaaagggacattagggaggccatggcacaaaaggaagatatggaagaaagaattacaacccttgaaaagcgttacctcagtgctcagagagaatctacctccatacatgacatgaatgataaactagaaaatgagttagcaaataaagaagctatcctgcggcagatggaagagaaaaacagacagttacaagaacgtcttgagctagctgaacaaaagttgcagcagaccatgagaaaggctgaaaccttgcctgaagtagaggctgaactggctcagagaattgcagccctaaccaaggctgaagagagacatggaaatattgaagaacgtatgagacatttagagggtcaacttgaagagaagaatcaagaacttcaaagagctaggcaaagagagaaaatgaatgaggagcataacaagagattatcggatacggttgatagacttctgactgaatccaatgaacgcctacaactacacttaaaggaaagaatggctgctctagaagaaaagaatgttttaattcaagaatcagaaactttcagaaagaatcttgaagaatctttacatgataaggaaagattagcagaagaaattgaaaagctgagatctgaacttgaccaattgaaaatgagaactggctctttaattgaacccacaataccaagaactcatctagacacctcagctgagttgcggtactcagtgggatccctagtggacagccagtctgattacagaacaactaaagtaataagaagaccaaggagaggccgcatgggtgtgcgaagagatgagccaaaggtgaaatctcttggggatcacgagtggaatagaactcaacagattggagtactaagcagccacccttttgaaagtgacactgaaatgtctgatattgatgatgatgacagagaaacaatttttagctcaatggatcttctctctccaagtggtcattccgatgcccagacgctagccatgatgcttcaggaacaattggatgccatcaacaaagaaatcaggctaattcaggaagaaaaagaatctacagagttgcgtgctgaagaaattgaaaatagagtggctagtgtgagcctcgaaggcctgaatttggcaagggtccacccaggtacctccattactgcctctgttacagcttcatcgctggccagttcatctccccccagtggacactcaactccaaagctcacccctcgaagccctgccagggaaatggatcggatgggagtcatgacactgccaagtgatctgaggaaacatcggagaaagattgcagttgtggaagaagatggtcgagaggacaaagcaacaattaaatgtgaaacttctcctcctcctacccctagagccctcagaatgactcacactctcccttcttcctaccacaatgatgctcgaagtagtttatctgtctctcttgagccagaaagcctcgggcttggtagtgccaacagcagccaagactctcttcacaaagcccccaagaagaaaggaatcaagtcttcaataggacgtttgtttggtaaaaaagaaaaagctcgacttgggcagctccgaggctttatggagactgaagctgcagctcaggagtccctggggttaggcaaactcggaactcaagctgagaaggatcgaagactaaagaaaaagcatgaacttcttgaagaagctcggagaaagggattaccttttgcccagtgggatgggccaactgtggtcgcatggctagagctttggttgggaatgcctgcgtggtacgtggcagcctgccgagccaacgtgaagagtggtgccatcatgtctgctttatctgacactgagatccagagagaaattggaatcagcaatccactgcatcgcttaaaacttcgattagcaatccaggagatggtttccctaacaagtccttcagctcctccaacatctcgaactccttcaggcaacgtttgggtgactcatgaagaaatggaaaatcttgcagctccagcaaaaacgaaagaatctgaggaaggaagctgggcccagaccctggcttatggagatatgaatcatgagtggattggaaatgaatggcttcccagcttggggttacctcagtacagaagttactttatggaatgcttggtagatgcaagaatgttagatcacctaacaaaaaaagatctccgtgtccatttaaaaatggtggatagtttccatcgaacaagtttacaatatggaattatgtgcttaaagaggttgaattatgacagaaaagaactagaaagaagacgggaagcaagccaacatgaaataaaagacgtgttggtgtggagcaatgaccgagttattcgctggatacaagcaattggacttcgagaatatgcaaataatatacttgagagcggtgtgcatggctcacttatagccctggatgaaaactttgactacagcagcttagctttattattacagattccaacacagaacacccaggcaaggcagattcttgaaagagaatacaataacctcttggccctgggaactgaaaggcgactggatgaaagtgatgacaagaacttcagacgtggatcaacctggagaaggcagtttcctcctcgtgaagtacatggaatcagcatgatgcctgggtcctcagaaacattaccagctggatttaggttaaccacaacctctgggcagtcaagaaaaatgacaacagatgttgcttcatcaagactgcagaggttagacaactccactgttcgcacatactcatgttgaccagccactcaaaggaggcag

SEQ ID NO: 171808 - DNA, 825 bp, Homo sapiens
  Payload ID: 13763
  Gene Symbol: PPFIA2
  Gene Name: protein tyrosine phosphatase, receptor type, f polypeptide (PTPRF), interacting protein (liprin), alpha 2
  ENST ID: ENST00000551442
  CDS Start-End: 385-825
ctcggcagcccgggagcggctctgggggagacgagtgtatccgcgggcgcgtgtgcgtgaggaggagagcaaagacgtgattacttcagaatttatttaagggccggtggaaaccactgcagcagcttccaggggaagcccttgttccagaggaagaggaggtggtggctgccaaggaggaggaggggaggagacggaggaggaggagtagcagccaccgcacgaggcaagtgaggagagaagatgctgtagcgtcctcaccggctgccagcagggaaatggtccaggagtgctgggtgtgagcctcccttctcctcaagccggagactgcggttgtcattgatcaattgaagaagcaaggacccgaaatcacagacattagcaatgatgtgtgaagtgatgcccacgattaatgaggacaccccaatgagccaaagggggtcccaaagcagtggctcggactcagactcccattttgagcagctgatggtgaatatgctagatgaaagggatcgtcttctagacacccttcgggagacccaggaaagcctctcacttgcccagcaaagacttcaggatgtcatctatgaccgagactcactccagagacagctcaattcagccctgccacaggaatttgctgcactgacaaaagaattaaatgcctgcagggaacaacttctagaaaaggaagaagaaatctctgaacttaaagctgaaagaaacaacacaagactattactggagcatttggagtgccttgtgtcacgacatgaaagatcactaagaatgacggtggtaaaacggcaagcccagtctccctca

SEQ ID NO: 171809 - DNA, 564 bp, Homo sapiens
  Payload ID: 13763
  Gene Symbol: PPFIA2
  Gene Name: protein tyrosine phosphatase, receptor type, f polypeptide (PTPRF), interacting protein (liprin), alpha 2
  ENST ID: ENST00000551147
  CDS Start-End: 1-564
tggtaaaaaagaaaaagctcgacttgggcagctccgaggctttatggagactgaagctgcagctcaggagtccctggggttaggcaaactcggaactcaagctgagaaggatcgaagactaaagaaaaacacatctgggcatgaacttcttgaagaagctcggagaaagggattaccttttgcccagtgggatgggccaactgtggtcgcatggctagagctttggttgggaatgcctgcgtggtacgtggcagcctgccgagccaacgtgaagagtggtgccatcatgtctgctttatctgacactgagatccagagagaaattggaatcagcaatccactgcatcgcttaaaacttcgattagcaatccaggagatggtttccctaacaagtccttcagctcctccaacatctcgaactaaagaatctgaggaaggaagctgggcccagtgtccggtttttctacagaccctggcttatggagatatgaatcatgagtggattggaaatgaatggcttcccagcttggggttacctcagtacagaagttactttatggaatg

SEQ ID NO: 171810 - DNA, 5405 bp, Homo sapiens
  Payload ID: 13763
  Gene Symbol: PPFIA2
  Gene Name: protein tyrosine phosphatase, receptor type, f polypeptide (PTPRF), interacting protein (liprin), alpha 2
  ENST ID: ENST00000550584
  CDS Start-End: 297-4040
accgagctttgcttcccaaagcaaaatttgtaatatgccatttttccgatggacgcttctccttttggctgctgacggagccacgggaagatgccgagctcctgccacgccaccgggccggggcacgttccgggagggcgccggggcacgcgtgtgtctgagctgcctttctcctcccgttgctagggaaatggtccaggagtgctgggtgtgagcctcccttctcctcaagccggagactgcggttgtcattgatcaattgaagaagcaaggacccgaaatcacagacattagcaatgatgtgtgaagtgatgcccacgattaatgaggacaccccaatgagccaaagggggtcccaaagcagtggctcggactcagactcccattttgagcagctgatggtgaatatgctagatgaaagggatcgtcttctagacacccttcgggagacccaggaaagcctctcacttgcccagcaaagacttcaggatgtcatctatgaccgagactcactccagagacagctcaattcagccctgccacaggatatcgaatccctaacaggagggctggctggttctaagggggctgatccaccggaatttgctgcactgacaaaagaattaaatgcctgcagggaacaacttctagaaaaggaagaagaaatctctgaacttaaagctgaaagaaacaacacaagactattactggagcatttggagtgccttgtgtcacgacatgaaagatcactaagaatgacggtggtaaaacggcaagcccagtctccctcaggagtatccagtgaagttgaagttctcaaggcactgaaatctttgtttgagcaccacaaggccttggatgaaaaggtaagggagcgactgagggtttctttagaaagagtctctgcactggaagaagaactagctgctgctaatcaggagattgttgccttgcgtgaacaaaatgttcatatacaaagaaaaatggcatcaagcgagggatccacagagtcagaacatcttgaagggatggaacctggacagaaagtccatgagaagcgtttgtccaatggttctatagactcaaccgatgaaactagtcaaatagttgaactacaagaattgcttgaaaagcaaaactatgaaatggcccagatgaaagaacgtttagcagccctttcttcccgagtgggagaggtggaacaggaagcagagacagcaagaaaggatctcattaaaacagaagaaatgaacaccaagtatcaaagggacattagggaggccatggcacaaaaggaagatatggaagaaagaattacaacccttgaaaagcgttacctcagtgctcagagagaatctacctccatacatgacatgaatgataaactagaaaatgagttagcaaataaagaagctatcctgcggcagatggaagagaaaaacagacagttacaagaacgtcttgagctagctgaacaaaagttgcagcagaccatgagaaaggctgaaaccttgcctgaagtagaggctgaactggctcagagaattgcagccctaaccaaggctgaagagagacatggaaatattgaagaacgtatgagacatttagagggtcaacttgaagagaagaatcaagaacttcaaagagctaggcaaagagagaaaatgaatgaggagcataacaagagattatcggatacggttgatagacttctgactgaatccaatgaacgcctacaactacacttaaaggaaagaatggctgctctagaagaaaagaatgttttaattcaagaatcagaaactttcagaaagaatcttgaagaatctttacatgataaggaaagattagcagaagaaattgaaaagctgagatctgaacttgaccaattgaaaatgagaactggctctttaattgaacccacaataccaagaactcatctagacacctcagctgagttgcggtactcagtgggatccctagtggacagccagtctgattacagaacaactaaagtaataagaagaccaaggagaggccgcatgggtgtgcgaagagatgagccaaaggtgaaatctcttggggatcacgagtggaatagaactcaacagattggagtactaagcagccacccttttgaaagtgacactgaaatgtctgatattgatgatgatgacagagaaacaatttttagctcaatggatcttctctctccaagtggtcattccgatgcccagacgctagccatgatgcttcaggaacaattggatgccatcaacaaagaaatcaggctaattcaggaagaaaaagaatctacagagttgcgtgctgaagaaattgaaaatagagtggctagtgtgagcctcgaaggcctgaatttggcaagggtccacccaggtacctccattactgcctctgttacagcttcatcgctggccagttcatctccccccagtggacactcaactccaaagctcacccctcgaagccctgccagggaaatggatcggatgggagtcatgacactgccaagtgatctgaggaaacatcggagaaagattgcagttgtggaagaagatggtcgagaggacaaagcaacaattaaatgtgaaacttctcctcctcctacccctagagccctcagaatgactcacactctcccttcttcctaccacaatgatgctcgaagtagtttatctgtctctcttgagccagaaagcctcgggcttggtagtgccaacagcagccaagactctcttcacaaagcccccaagaagaaaggaatcaagtcttcaataggacgtttgtttggtaaaaaagaaaaagctcgacttgggcagctccgaggctttatggagactgaagctgcagctcaggagtccctggggttaggcaaactcggaactcaagctgagaaggatcgaagactaaagaaaaagcatgaacttcttgaagaagctcggagaaagggattaccttttgcccagtgggatgggccaactgtggtcgcatggctagagctttggttgggaatgcctgcgtggtacgtggcagcctgccgagccaacgtgaagagtggtgccatcatgtctgctttatctgacactgagatccagagagaaattggaatcagcaatccactgcatcgcttaaaacttcgattagcaatccaggagatggtttccctaacaagtccttcagctcctccaacatctcgaactccttcaggcaacgtttgggtgactcatgaagaaatggaaaatcttgcagctccagcaaaaacgaaagaatctgaggaaggaagctgggcccagtgtccggtttttctacagaccctggcttatggagatatgaatcatgagtggattggaaatgaatggcttcccagcttggggttacctcagtacagaagttactttatggaatgcttggtagatgcaagaatgttagatcacctaacaaaaaaagatctccgtgtccatttaaaaatggtggatagtttccatcgaacaagtttacaatatggaattatgtgcttaaagaggttgaattatgacagaaaagaactagaaagaagacgggaagcaagccaacatgaaataaaagacgtgttggtgtggagcaatgaccgagttattcgctggatacaagcaattggacttcgagaatatgcaaataatatacttgagagcggtgtgcatggctcacttatagccctggatgaaaactttgactacagcagcttagctttattattacagattccaacacagaacacccaggcaaggcagattcttgaaagagaatacaataacctcttggccctgggaactgaaaggcgactggatgaaagtgatgacaagaacttcagacgtggatcaacctggagaaggcagtttcctcctcgtgaagtacatggaatcagcatgatgcctgggtcctcagaaacattaccagctggatttaggttaaccacaacctctgggcagtcaagaaaaatgacaacagatgatggcgtcttttcagtctactctacctaaagtgcactaccatctaagaagacgagcagtgaaaacctttgtgaaaactgaattctaaggaaataatgacgtcatgacttattaaaagctgaaaaatgtgatttttggggggagtcagatattacatttgattagtttactacaaattgtaataaaatgcttaagtcatttgaataataaacatcatctacatcataaactctgtacaacagatgcttttatgaaatgaagccagttgtttttcatgttttattgtaatatactaggcatttatgtattaccgtgcatttctttttaaatgtgtaagtcttatgtaaatggatataaatatgattttttaaaaaataaaatatatggttcatggagtctcgagtgcaaacatttgacaattccaagtactgtttgtattttaccattccaccatttttacagtttttggattgttaatagtcaaatcaatatgtttccttgaagcatgtttcatgcttcaacgtgtttctccttcaagtctgtcaatacttaaagctgaacaacctgcctctgatcatgtaaaaaagaatgatttaacctggaaccggagccaaaaatagagctttaaaggcaatcagggatgtcctatatctttagaaatagcactgtgatggcttgatctccttttcaatacaaaacaaagccaagctgtttacaagggtcaaaagcaattatttaaaaatttatattaaaaaaccataatcttctcttgttacctgtggaccaagaaaaaaaaaaagataaaaaaacttctttactaagaaccacatgttcattcaaatatcttgaaatgccagccagtactggacagtgaatgtcaaccaccgcagagtctgaggctcatttccactagagaaaacgaaacccaagatacctttcccttttgtcaatgtaacagggcattagccagactcatgtctaatgttataagcttttagccgagatggccttgttgcgacttccctgaagtcagttttatcagaggaaataaatgaaagacagaatgattaacatatatagtgtataaaagtatagaagagtaatctcttccctgtggctttatttggtggtgttactgttgtttattctttgtttatatgggagattcaaagtaaagcctatttaataataccatttatctaactgctgattttctgctgcttgatcttattaagcgcaagacctgtcattagtaatttcttttctgtattttaatttgctatgtttgcacgtacattacatttgttttgatgtctatttttatttaacagattcagtcaaaaggtaatgataacagaaaccctttccattgtcaataaaaaaaataataattcc

SEQ ID NO: 171811 - DNA, 2834 bp, Homo sapiens
  Payload ID: 13763
  Gene Symbol: PPFIA2
  Gene Name: protein tyrosine phosphatase, receptor type, f polypeptide (PTPRF), interacting protein (liprin), alpha 2
  ENST ID: ENST00000551461
  CDS Start-End: 94-339
aatgctgttcagctgcctgtttgaagaaagtttattttttaaaaactatgtttgcagttggctgaagagagacatggaaatattgaagaacgtatgagacatttagagggtcaacttgaagagaagaatcaagaacttcaaagagctaggcaaagagagaaaatgaatgaggagcataacaagagattatcggatacggttgatagacttctgactgaatccaatgaacgcctacaactacacttaaaggaaagaatggctgctctagaagaaaagttggcagctaccagaccagcaagagttatgagagctggttaccaattccagagcataaattaagaatgttttaattcaagaatcagaaactttcagaaagaatcttgaagaatctttacatgataaggaaagattagcagaagaaattgaaaagctgagatctgaacttgaccaattgaaaatgagaactggctctttaattgaacccacaataccaagaactcatctagacacctcagctgagttgcggtactcagtgggatccctagtggacagccagtctgattacagaacaactaaagtaataagaagaccaaggagaggccgcatgggtgtgcgaagagatgagccaaaggtgaaatctcttggggatcacgagtggaatagaactcaacagattggagtactaagcagccacccttttgaaagtgacactgaaatgtctgatattgatgatgatgacagagaaacaatttttagctcaatggatcttctctctccaagtggtcattccgatgcccagacgctagccatgatgcttcaggaacaattggatgccatcaacaaagaaatcaggctaattcaggaagaaaaagaatctacagagttgcgtgctgaagaaattgaaaatagagtggctagtgtgagcctcgaaggcctgaatttggcaagggtccacccagccaagtgatctgaggaaacatcggagaaagattgcagttgtggaagaagatggtcgagaggacaaagcaacaattaaatgtgaaacttctcctcctcctacccctagagccctcagaatgactcacactctcccttcttcctaccacaatgatgctcgaagtagtttatctgtctctcttgagccagaaagcctcgggcttggtagtgccaacagcagccaagactctcttcacaaagcccccaagaagaaaggaatcaagtcttcaataggacgtttgtttggtaaaaaagaaaaagctcgacttgggcagctccgaggctttatggagactgaagctgcagctcaggagtccctggggttaggcaaactcggaactcaagctgagaaggatcgaagactaaagaaaaagcatgaacttcttgaagaagctcggagaaagggattaccttttgcccagtgggatgggccaactgtggtcgcatggctagagctttggttgggaatgcctgcgtggtacgtggcagcctgccgagccaacgtgaagagtggtgccatcatgtctgctttatctgacactgagatccagagagaaattggaatcagcaatccactgcatcgcttaaaacttcgattagcaatccaggagatggtttccctaacaagtccttcagctcctccaacatctcgaacttgtccggtttttctacagaccctggcttatggagatatgaatcatgagtggattggaaatgaatggcttcccagcttggggttacctcagtacagaagttactttatggaatgcttggtagatgcaagaatgttagatcacctaacaaaaaaagatctccgtgtccatttaaaaatggtggatagtttccatcgaacaagtttacaatatggaattatgtgcttaaagaggttgaattatgacagaaaagaactagaaagaagacgggaagcaagccaacatgaaataaaagacgtgttggtgtggagcaatgaccgagttattcgctggatacaagcaattggacttcgagaatatgcaaataatatacttgagagcggtgtgcatggctcacttatagccctggatgaaaactttgactacagcagcttagctttattattacagattccaacacagaacacccaggcaaggcagattcttgaaagagaatacaataacctcttggccctgggaactgaaaggcgactggatgaaagtgatgacaagaacttcagacgtggatcaacctggagaaggcagtttcctcctcgtgaagtacatggaatcagcatgatgcctgggtcctcagaaacattaccagctggatttaggttaaccacaacctctgggcagtcaagaaaaatgacaacagatgttgcttcatcaagactgcagaggttagacaactccactgttcgcacatactcatgttgaccagccactcaaaggaggcagcactgacctgctatggcgtcttttcagtctactctacctaaagtgcactaccatctaagaagacgagcagtgaaaacctttgtgaaaactgaattctaaggaaataatgacgtcatgacttattaaaagctgaaaaatgtgatttttggggggagtcagatattacatttgattagtttactacaaattgtaataaaatgcttaagtcatttgaataataaacatcatctacatcataaactctgtacaacagatgcttttatgaaatgaagccagttgtttttcatgttttattgtaatatactaggcatttatgtattaccgtgcatttctttttaaatgtgtaagtcttatgtaaatggatataaatatgattttttaaaaaataaaatatatggttcatgg

SEQ ID NO: 171812 - DNA, 4727 bp, Homo sapiens
  Payload ID: 13763
  Gene Symbol: PPFIA2
  Gene Name: protein tyrosine phosphatase, receptor type, f polypeptide (PTPRF), interacting protein (liprin), alpha 2
  Uniprot ID: O75334
  ENST ID: ENST00000549325
  CDS Start-End: 274-3972
aaatttgtaatatgccatttttccgatggacgcttctccttttggctgctgacggagccacgggaagatgccgagctcctgccacgccaccgggccggggcacgttccgggagggcgccggggcacgcgtgtgtctgagctgcctttctcctcccgttgctagggaaatggtccaggagtgctgggtgtgagcctcccttctcctcaagccggagactgcggttgtcattgatcaattgaagaagcaaggacccgaaatcacagacattagcaatgatgtgtgaagtgatgcccacgattaatgaggacaccccaatgagccaaagggggtcccaaagcagtggctcggactcagactcccattttgagcagctgatggtgaatatgctagatgaaagggatcgtcttctagacacccttcgggagacccaggaaagcctctcacttgcccagcaaagacttcaggatgtcatctatgaccgagactcactccagagacagctcaattcagccctgccacaggaatttgctgcactgacaaaagaattaaatgcctgcagggaacaacttctagaaaaggaagaagaaatctctgaacttaaagctgaaagaaacaacacaagactattactggagcatttggagtgccttgtgtcacgacatgaaagatcactaagaatgacggtggtaaaacggcaagcccagtctccctcaggagtatccagtgaagttgaagttctcaaggcactgaaatctttgtttgagcaccacaaggccttggatgaaaaggtaagggagcgactgagggtttctttagaaagagtctctgcactggaagaagaactagctgctgctaatcaggagattgttgccttgcgtgaacaaaatgttcatatacaaagaaaaatggcatcaagcgagggatccacagagtcagaacatcttgaagggatggaacctggacagaaagtccatgagaagcgtttgtccaatggttctatagactcaaccgatgaaactagtcaaatagttgaactacaagaattgcttgaaaagcaaaactatgaaatggcccagatgaaagaacgtttagcagccctttcttcccgagtgggagaggtggaacaggaagcagagacagcaagaaaggatctcattaaaacagaagaaatgaacaccaagtatcaaagggacattagggaggccatggcacaaaaggaagatatggaagaaagaattacaacccttgaaaagcgttacctcagtgctcagagagaatctacctccatacatgacatgaatgataaactagaaaatgagttagcaaataaagaagctatcctgcggcagatggaagagaaaaacagacagttacaagaacgtcttgagctagctgaacaaaagttgcagcagaccatgagaaaggctgaaaccttgcctgaagtagaggctgaactggctcagagaattgcagccctaaccaaggctgaagagagacatggaaatattgaagaacgtatgagacatttagagggtcaacttgaagagaagaatcaagaacttcaaagagctaggcaaagagagaaaatgaatgaggagcataacaagagattatcggatacggttgatagacttctgactgaatccaatgaacgcctacaactacacttaaaggaaagaatggctgctctagaagaaaagaatgttttaattcaagaatcagaaactttcagaaagaatcttgaagaatctttacatgataaggaaagattagcagaagaaattgaaaagctgagatctgaacttgaccaattgaaaatgagaactggctctttaattgaacccacaataccaagaactcatctagacacctcagctgagttgcggtactcagtgggatccctagtggacagccagtctgattacagaacaactaaagtaataagaagaccaaggagaggccgcatgggtgtgcgaagagatgagccaaaggtgaaatctcttggggatcacgagtggaatagaactcaacagattggagtactaagcagccacccttttgaaagtgacactgaaatgtctgatattgatgatgatgacagagaaacaatttttagctcaatggatcttctctctccaagtggtcattccgatgcccagacgctagccatgatgcttcaggaacaattggatgccatcaacaaagaaatcaggctaattcaggaagaaaaagaatctacagagttgcgtgctgaagaaattgaaaatagagtggctagtgtgagcctcgaaggcctgaatttggcaagggtccacccaggtacctccattactgcctctgttacagcttcatcgctggccagttcatctccccccagtggacactcaactccaaagctcacccctcgaagccctgccagggaaatggatcggatgggagtcatgacactgccaagtgatctgaggaaacatcggagaaagattgcagttgtggaagaagatggtcgagaggacaaagcaacaattaaatgtgaaacttctcctcctcctacccctagagccctcagaatgactcacactctcccttcttcctaccacaatgatgctcgaagtagtttatctgtctctcttgagccagaaagcctcgggcttggtagtgccaacagcagccaagactctcttcacaaagcccccaagaagaaaggaatcaagtcttcaataggacgtttgtttggtaaaaaagaaaaagctcgacttgggcagctccgaggctttatggagactgaagctgcagctcaggagtccctggggttaggcaaactcggaactcaagctgagaaggatcgaagactaaagaaaaacacatctgggcatgaacttcttgaagaagctcggagaaagggattaccttttgcccagtgggatgggccaactgtggtcgcatggctagagctttggttgggaatgcctgcgtggtacgtggcagcctgccgagccaacgtgaagagtggtgccatcatgtctgctttatctgacactgagatccagagagaaattggaatcagcaatccactgcatcgcttaaaacttcgattagcaatccaggagatggtttccctaacaagtccttcagctcctccaacatctcgaactccttcaggcaacgtttgggtgactcatgaagaaatggaaaatcttgcagctccagcaaaaacgaaagaatctgaggaaggaagctgggcccagtgtccggtttttctacagaccctggcttatggagatatgaatcatgagtggattggaaatgaatggcttcccagcttggggttacctcagtacagaagttactttatggaatgcttggtagatgcaagaatgttagatcacctaacaaaaaaagatctccgtgtccatttaaaaatggtggatagtttccatcgaacaagtttacaatatggaattatgtgcttaaagaggttgaattatgacagaaaagaactagaaagaagacgggaagcaagccaacatgaaataaaagacgtgttggtgtggagcaatgaccgagttattcgctggatacaagcaattggacttcgagaatatgcaaataatatacttgagagcggtgtgcatggctcacttatagccctggatgaaaactttgactacagcagcttagctttattattacagattccaacacagaacacccaggcaaggcagattcttgaaagagaatacaataacctcttggccctgggaactgaaaggcgactggatgaaagtgatgacaagaacttcagacgtggatcaacctggagaaggcagtttcctcctcgtgaagtacatggaatcagcatgatgcctgggtcctcagaaacattaccagctggatttaggttaaccacaacctctgggcagtcaagaaaaatgacaacagatgatggcgtcttttcagtctactctacctaaagtgcactaccatctaagaagacgagcagtgaaaacctttgtgaaaactgaattctaaggaaataatgacgtcatgacttattaaaagctgaaaaatgtgatttttggggggagtcagatattacatttgattagtttactacaaattgtaataaaatgcttaagtcatttgaataataaacatcatctacatcataaactctgtacaacagatgcttttatgaaatgaagccagttgtttttcatgttttattgtaatatactaggcatttatgtattaccgtgcatttctttttaaatgtgtaagtcttatgtaaatggatataaatatgattttttaaaaaataaaatatatggttcatggagtctcgagtgcaaacatttgacaattccaagtactgtttgtattttaccattccaccatttttacagtttttggattgttaatagtcaaatcaatatgtttccttgaagcatgtttcatgcttcaacgtgtttctccttcaagtctgtcaatacttaaagctgaacaacctgcctctgatcatgtaaaaaagaatgatttaacctggaaccggagccaaaaatagagctttaaaggcaatcagggatgtcctatatctttagaaatagcactgtgatggcttgatctccttttcaatacaaaacaaagccaagctgtttacaagggtcaaaagcaattatttaaaaatttatattaaaaaaccataatcttctcttgttacctgtggacc

SEQ ID NO: 171813 - DNA, 5363 bp, Homo sapiens
  Payload ID: 13763
  Gene Symbol: PPFIA2
  Gene Name: protein tyrosine phosphatase, receptor type, f polypeptide (PTPRF), interacting protein (liprin), alpha 2
  Uniprot ID: O75334
  ENST ID: ENST00000549396
  CDS Start-End: 162-3935
gaggcaagtgaggagagaagatgctgtagcgtcctcaccggctgccagcagggaaatggtccaggagtgctgggtgtgagcctcccttctcctcaagccggagactgcggttgtcattgatcaattgaagaagcaaggacccgaaatcacagacattagcaatgatgtgtgaagtgatgcccacgattaatgaggacaccccaatgagccaaagggggtcccaaagcagtggctcggactcagactcccattttgagcagctgatggtgaatatgctagatgaaagggatcgtcttctagacacccttcgggagacccaggaaagcctctcacttgcccagcaaagacttcaggatgtcatctatgaccgagactcactccagagacagctcaattcagccctgccacaggatatcgaatccctaacaggagggctggctggttctaagggggctgatccaccggaatttgctgcactgacaaaagaattaaatgcctgcagggaacaacttctagaaaaggaagaagaaatctctgaacttaaagctgaaagaaacaacacaagactattactggagcatttggagtgccttgtgtcacgacatgaaagatcactaagaatgacggtggtaaaacggcaagcccagtctccctcaggagtatccagtgaagttgaagttctcaaggcactgaaatctttgtttgagcaccacaaggccttggatgaaaaggtaagggagcgactgagggtttctttagaaagagtctctgcactggaagaagaactagctgctgctaatcaggagattgttgccttgcgtgaacaaaatgttcatatacaaagaaaaatggcatcaagcgagggatccacagagtcagaacatcttgaagggatggaacctggacagaaagtccatgagaagcgtttgtccaatggttctatagactcaaccgatgaaactagtcaaatagttgaactacaagaattgcttgaaaagcaaaactatgaaatggcccagatgaaagaacgtttagcagccctttcttcccgagtgggagaggtggaacaggaagcagagacagcaagaaaggatctcattaaaacagaagaaatgaacaccaagtatcaaagggacattagggaggccatggcacaaaaggaagatatggaagaaagaattacaacccttgaaaagcgttacctcagtgctcagagagaatctacctccatacatgacatgaatgataaactagaaaatgagttagcaaataaagaagctatcctgcggcagatggaagagaaaaacagacagttacaagaacgtcttgagctagctgaacaaaagttgcagcagaccatgagaaaggctgaaaccttgcctgaagtagaggctgaactggctcagagaattgcagccctaaccaaggctgaagagagacatggaaatattgaagaacgtatgagacatttagagggtcaacttgaagagaagaatcaagaacttcaaagagctaggcaaagagagaaaatgaatgaggagcataacaagagattatcggatacggttgatagacttctgactgaatccaatgaacgcctacaactacacttaaaggaaagaatggctgctctagaagaaaagaatgttttaattcaagaatcagaaactttcagaaagaatcttgaagaatctttacatgataaggaaagattagcagaagaaattgaaaagctgagatctgaacttgaccaattgaaaatgagaactggctctttaattgaacccacaataccaagaactcatctagacacctcagctgagttgcggtactcagtgggatccctagtggacagccagtctgattacagaacaactaaagtaataagaagaccaaggagaggccgcatgggtgtgcgaagagatgagccaaaggtgaaatctcttggggatcacgagtggaatagaactcaacagattggagtactaagcagccacccttttgaaagtgacactgaaatgtctgatattgatgatgatgacagagaaacaatttttagctcaatggatcttctctctccaagtggtcattccgatgcccagacgctagccatgatgcttcaggaacaattggatgccatcaacaaagaaatcaggctaattcaggaagaaaaagaatctacagagttgcgtgctgaagaaattgaaaatagagtggctagtgtgagcctcgaaggcctgaatttggcaagggtccacccaggtacctccattactgcctctgttacagcttcatcgctggccagttcatctccccccagtggacactcaactccaaagctcacccctcgaagccctgccagggaaatggatcggatgggagtcatgacactgccaagtgatctgaggaaacatcggagaaagattgcagttgtggaagaagatggtcgagaggacaaagcaacaattaaatgtgaaacttctcctcctcctacccctagagccctcagaatgactcacactctcccttcttcctaccacaatgatgctcgaagtagtttatctgtctctcttgagccagaaagcctcgggcttggtagtgccaacagcagccaagactctcttcacaaagcccccaagaagaaaggaatcaagtcttcaataggacgtttgtttggtaaaaaagaaaaagctcgacttgggcagctccgaggctttatggagactgaagctgcagctcaggagtccctggggttaggcaaactcggaactcaagctgagaaggatcgaagactaaagaaaaagcatgaacttcttgaagaagctcggagaaagggattaccttttgcccagtgggatgggccaactgtggtcgcatggctagagctttggttgggaatgcctgcgtggtacgtggcagcctgccgagccaacgtgaagagtggtgccatcatgtctgctttatctgacactgagatccagagagaaattggaatcagcaatccactgcatcgcttaaaacttcgattagcaatccaggagatggtttccctaacaagtccttcagctcctccaacatctcgaactccttcaggcaacgtttgggtgactcatgaagaaatggaaaatcttgcagctccagcaaaaacgaaagaatctgaggaaggaagctgggcccagtgtccggtttttctacagaccctggcttatggagatatgaatcatgagtggattggaaatgaatggcttcccagcttggggttacctcagtacagaagttactttatggaatgcttggtagatgcaagaatgttagatcacctaacaaaaaaagatctccgtgtccatttaaaaatggtggatagtttccatcgaacaagtttacaatatggaattatgtgcttaaagaggttgaattatgacagaaaagaactagaaagaagacgggaagcaagccaacatgaaataaaagacgtgttggtgtggagcaatgaccgagttattcgctggatacaagcaattggacttcgagaatatgcaaataatatacttgagagcggtgtgcatggctcacttatagccctggatgaaaactttgactacagcagcttagctttattattacagattccaacacagaacacccaggcaaggcagattcttgaaagagaatacaataacctcttggccctgggaactgaaaggcgactggatgaaagtgatgacaagaacttcagacgtggatcaacctggagaaggcagtttcctcctcgtgaagtacatggaatcagcatgatgcctgggtcctcagaaacattaccagctggatttaggttaaccacaacctctgggcagtcaagaaaaatgacaacagatgttgcttcatcaagactgcagaggttagacaactccactgttcgcacatactcatgttgaccagccactcaaaggaggcagcactgacctgctatggcgtcttttcagtctactctacctaaagtgcactaccatctaagaagacgagcagtgaaaacctttgtgaaaactgaattctaaggaaataatgacgtcatgacttattaaaagctgaaaaatgtgatttttggggggagtcagatattacatttgattagtttactacaaattgtaataaaatgcttaagtcatttgaataataaacatcatctacatcataaactctgtacaacagatgcttttatgaaatgaagccagttgtttttcatgttttattgtaatatactaggcatttatgtattaccgtgcatttctttttaaatgtgtaagtcttatgtaaatggatataaatatgattttttaaaaaataaaatatatggttcatggagtctcgagtgcaaacatttgacaattccaagtactgtttgtattttaccattccaccatttttacagtttttggattgttaatagtcaaatcaatatgtttccttgaagcatgtttcatgcttcaacgtgtttctccttcaagtctgtcaatacttaaagctgaacaacctgcctctgatcatgtaaaaaagaatgatttaacctggaaccggagccaaaaatagagctttaaaggcaatcagggatgtcctatatctttagaaatagcactgtgatggcttgatctccttttcaatacaaaacaaagccaagctgtttacaagggtcaaaagcaattatttaaaaatttatattaaaaaaccataatcttctcttgttacctgtggaccaagaaaaaaaaaaagataaaaaaacttctttactaagaaccacatgttcattcaaatatcttgaaatgccagccagtactggacagtgaatgtcaaccaccgcagagtctgaggctcatttccactagagaaaacgaaacccaagatacctttcccttttgtcaatgtaacagggcattagccagactcatgtctaatgttataagcttttagccgagatggccttgttgcgacttccctgaagtcagttttatcagaggaaataaatgaaagacagaatgattaacatatatagtgtataaaagtatagaagagtaatctcttccctgtggctttatttggtggtgttactgttgtttattctttgtttatatgggagattcaaagtaaagcctatttaataataccatttatctaactgctgattttctgctgcttgatcttattaagcgcaagacctgtcattagtaatttcttttctgtattttaatttgctatgtttgcacgtacattacatttgttttgatgtctatttttatttaacagattcagtcaaaaggtaatgataacagaaaccctttccattgtcaataaaaaaaataataattcca

SEQ ID NO: 171814 - DNA, 4733 bp, Homo sapiens
  Payload ID: 13764
  Gene Symbol: PPFIA3
  Gene Name: protein tyrosine phosphatase, receptor type, f polypeptide (PTPRF), interacting protein (liprin), alpha 3
  Uniprot ID: O75145
  ENST ID: ENST00000334186
  CDS Start-End: 350-3934
atttttttggggggaaggtgggatttggggggcgctggtgggcacccctggatctggcggctgcggcctcgcggggggaggctgatcggtgacaggggcagggggctattttgggggtagaaggcagtgagagcgtgagggggaggggggtccccagcgcccaagccggagccagagacgcggagcccgcgcgagcgtcggagacagggctccagggctccgaagcgacagagccgggccccggccgctgccaggggccccgcccggcccccccactccaccccacgtccctcctgcagcccagctccgcccgcagccgccgcggaccaggcaggcccgcaccgccgccatgatgtgcgaggtgatgcccaccatcagcgaggatggccggcggggctcggcgctgggcccggacgaggcgggcggggagctggagcgcctcatggtcacgatgctcacggagcgcgagcgcctgctggagacgctgcgcgaggcacaggacgggttggctacagcgcagctgcggctgcgcgagctcggccacgagaaggactcgctgcagcgccagctcagcatcgcgctgccccaggagtttgcagctctgacgaaggagctgaacttatgtcgggagcagctgctggagagggaggaagagattgcagagctgaaggcggaacggaacaacacgcggctgctcctggaacacctggagtgcctggtgtccaggcacgagaggtcactgcgcatgaccgtggtgaagcgccaggcccagtccccgggtggggtctcctcggaggtagaagtgctcaaagctctaaagtctctcttcgagcaccacaaggccctggatgagaaggtccgggagcggctgcggatggcgctggagcgcgtggcagtgctcgaggaggagctggaactgagcaatcaggagactctgaaccttcgagaacagctgtctaggcggcggtcagggctggaagagccgggcaaggatggggatgggcagactcttgccaatggcctgggtcctggcggggattccaaccggcgcacagcagagctggaggaggccctggagcggcagcgcgccgaggtgtgccagctgcgggagcgcctggcggtgctgtgccgtcagatgagccagctggaggaggagttgggcaccgcgcaccgtgagctgggcaaggcagaggaagccaactccaagctgcagcgcgacctcaaggaggcgctggcgcagcgggaagatatggaggagcggattacaacactggagaagcgctacctgagcgcccagcgggaggccacgtctctgcacgacgccaacgacaaactggagaacgagttagctagcaaggagtcgttgtatcggcagagtgaagagaagagccgtcagctggccgagtggttggacgacgccaagcagaagctgcagcagacgctgcagaaagcggagaccttgcccgagatagaggcgcagctggcgcagcgcgtggcggcgctcaacaaggccgaggaacgtcatgggaattttgaggagcggcttcggcagctggaggcccagctggaagagaagaatcaagagctgcagcgggcccggcagcgggagaagatgaacgatgaccacaataagcggctgtccgagacggtggacaagctgctgagcgagtccaacgagcgcttacagcttcacctcaaggagcgcatgggggcgctggaggagaagaactccctgagcgaggagatagccaacatgaagaagcttcaggatgagttgctgctaaacaaggagcagctcttggccgaaatggagcggatgcagatggagatcgaccagctgcgggggaggccaccatcctcctactccaggtctctccctggcagtgccctggagctccgttactctcaggcacccactttaccttctggtgcccacctggatccctatgtggctggcagtggtcgggcaggcaagaggggccgctggtcaggggtcaaggaggagccctccaaggattgggagcggtctgcccctgcgggctccataccacccccattccctggggaactggacggctccgatgaggaggaggcagaggggatgtttggggccgagctgctgtcccccagtgggcaggctgacgtgcagacgctggccatcatgcttcaggagcagctggaggccatcaacaaggagatcaagctgatccaagaggagaaggagacaacagaacagagggcagaggagctggagagtcgggtgtccagctctggcttggactcgttgggccgctaccgcagcagctgctccctgcccccctccctcaccacctctacccttgccagcccctcccctcccagctctggccactcaacaccccgcctggcaccccctagccctgcccgtgagggcaccgacaaggctaatcatgtccctaaggaggaagctggagctccacgaggggaggggccggccatcccaggagacaccccaccacccactccccgctctgcccgtcttgagagaatgacccaggccttggcactgcaggcggggtccctggaagatgggggacccccacggggaagtgagggcaccccagattctctgcacaaagcccccaagaagaagagcatcaagtcatccataggccgtctctttggcaagaaagagaagggacgaatgggacccccaggccgggacagctcttctctggctggaacaccctcagatgagacactggccactgaccctctggggctagccaagctgacaggcccaggagacaaggaccgaaggaacaagaggaagcatgaactcctggaggaggcctgccgccagggcctaccttttgctgcctgggacgggcccaccgtggtgtcctggctggagctgtgggtgggcatgcctgcctggtatgtggccgcctgccgggccaatgtcaagagcggtgccatcatggccaacctgtcagacacggagatccagcgcgagatcggcatcagcaacccgctgcaccgactcaagctacgcctcgccatccaggagatggtctcgctcacctcgccctcagcccccgcctcctcccgcacttccacaggaaacgtgtggatgacacacgaggagatggagtcccttacggccacgaccaagcccgagaccaaggagatcagctgggagcagatcctggcatatggcgacatgaaccacgagtgggtggggaacgactggctgcccagcctggggctgccccaataccgcagctacttcatggagtcgctggtggacgctcgaatgttagatcaccttaacaagaaggagctccggggccaactcaagatggtggacagctttcacagggtgagtctacattatgggattatgtgcctgaaacggctcaactatgaccggaaggacctggagcggaggcgggaagaaagtcagacccagatccgagacgtgatggtgtggtccaatgagcgggtcatgggttgggtgtccgggctgggcctgaaggaatttgccacgaacctcacggagagcggggtacacggggcactgctcgccctggacgagaccttcgactactccgacctggccttgctcctgcagatccccacgcagaatgcacaggcccggcagcttctggagaaggaattcagcaaccttatctccttaggcacagacaggcggctggacgaggacagcgccaagtctttcagccgctccccatcctggcggaagatgttccgggagaaggacctccgaggcgtaactcccgactcagctgagatgttgccccccaactttcgttcggctgcagcgggagccctgggctctccggggctccctctccgcaagctgcagccagaaggccagacttctgggagttcccgggcagacggcgtttcggtccggacctattcctgctagtgcaggcctccaggtgacctcactcggacggaagaatcttcccgaggctgggctgttccctctcctgcccggactgtggcctcgccggggagagcgggcgggggagctcgcgccgaggactggaccatctgtacagaccagcgggagtgcgcgcgcccgcctcgcacagggccggggcctggaccaaaccacatgaactggactgagagggggaagaagcggggaggaagaaatcccgccccaaacgtccgctttccttttctctactttgtaatttattgatcagtttctgttgggagacgggtgtcctttacccgcgggaagggggcggggcttccctcccgggccgcatgcggggagaggctgctccctcccctttttcctgcccagtcgcggggcccaagtcttccttcttcgtccgaaaggaggggaggggggactcgctgctacaagcctcgccccctgtgccactcagctccgccccgccgcgtccggtcgccggtcccccgggtcatctgcgggcgggttcccctctccctcccccgtgtctcgtgtccccggggcctcaccgccccccgtgctgtggccgtgtccgtgccccgggggtagggggcgcagaatggcgcttccccttctcctctggctccggggtttgcatgggagaatcctctttccacgatgccgctgggcgacgtggcgtgggggcagggggacggtgggggagccctcgcccccgactctcggtcggcctccccgccccaggcgtcactcagtgatcacgggtaaagagaactgtttc

SEQ ID NO: 171815 - DNA, 1638 bp, Homo sapiens
  Payload ID: 13764
  Gene Symbol: PPFIA3
  Gene Name: protein tyrosine phosphatase, receptor type, f polypeptide (PTPRF), interacting protein (liprin), alpha 3
  ENST ID: ENST00000602848
  CDS Start-End: 1-834
gcccccgcctcctcccgcacttccacaggaaacgtgtggatgacacacgaggagatggagtcccttacggccacgaccaagcccatcctggcatatggcgacatgaaccacgagtgggtggggaacgactggctgcccagcctggggctgccccaataccgcagctacttcatggagtcgctggtggacgctcgaatgttagatcaccttaacaagaaggagctccggggccaactcaagatggtggacagctttcacagggtgagtctacattatgggattatgtgcctgaaacggctcaactatgaccggaaggacctggagcggaggcgggaagaaagtcagacccagatccgagacgtgatggtgtggtccaatgagcgggtcatgggttgggtgtccgggctgggcctgaaggaatttgccacgaacctcacggagagcggggtacacggggcactgctcgccctggacgagaccttcgactactccgacctggccttgctcctgcagatccccacgcagaatgcacaggcccggcagcttctggagaaggaattcagcaaccttatctccttaggcacagacaggcggctggacgaggacagcgccaagtctttcagccgctccccatcctggcggaagatgttccgggagaaggacctccgaggcgtaactcccgactcagctgagatgttgccccccaactttcgttcggctgcagcgggagccctgggctctccggggctccctctccgcaagctgcagccagaaggccagacttctgggagttcccgggcagacggcgtttcggtccggacctattcctgctagtgcaggcctccaggtgacctcactcggacggaagaatcttcccgaggctgggctgttccctctcctgcccggactgtggcctcgccggggagagcgggcgggggagctcgcgccgaggactggaccatctgtacagaccagcgggagtgcgcgcgcccgcctcgcacagggccggggcctggaccaaaccacatgaactggactgagagggggaagaagcggggaggaagaaatcccgccccaaacgtccgctttccttttctctactttgtaatttattgatcagtttctgttgggagacgggtgtcctttacccgcgggaagggggcggggcttccctcccgggccgcatgcggggagaggctgctccctcccctttttcctgcccagtcgcggggcccaagtcttccttcttcgtccgaaaggaggggaggggggactcgctgctacaagcctcgccccctgtgccactcagctccgccccgccgcgtccggtcgccggtcccccgggtcatctgcgggcgggttcccctctccctcccccgtgtctcgtgtccccggggcctcaccgccccccgtgctgtggccgtgtccgtgccccgggggtagggggcgcagaatggcgcttccccttctcctctggctccggggtttgcatgggagaatcctctttccacgatgccgctgggcgacgtggcgtgggggcagggggacggtgggggagccctcgcccccgactctcggtcggcctccccgccccaggcgtcactcagtgatcacgggtaaagagaactgtttcaaaaa

SEQ ID NO: 171816 - DNA, 1615 bp, Homo sapiens
  Payload ID: 13764
  Gene Symbol: PPFIA3
  Gene Name: protein tyrosine phosphatase, receptor type, f polypeptide (PTPRF), interacting protein (liprin), alpha 3
  ENST ID: ENST00000602897
  CDS Start-End: 1-732
atgaaccacgagtgggtggggaacgactggctgcccagcctggggctgccccaataccgcagctacttcatggagtcgctggtggacgctcgaatgttagatcaccttaacaagaaggagctccggggccaactcaagatggtggacagctttcacagggtgagtctacattatgggattatgtgcctgaaacggctcaactatgaccggaaggacctggagcggaggcgggaagaaagtcagacccagatccgagacgtgatggtgtggtccaatgagcgggtcatgggttgggtgtccgggctgggcctgaaggaatttgccacgaacctcacggagagcggggtacacggggcactgctcgccctggacgagaccttcgactactccgacctggccttgctcctgcagatccccacgcagaatgcacaggcccggcagcttctggagaaggaattcagcaaccttatctccttaggcacagacaggcggctggacgaggacagcgccaagtctttcagccgctccccatcctggcggaagatgttccgggagaaggacctccgaggcgtaactcccgactcagctgagatgttgccccccaactttcgttcggctgcagcgggagccctgggctctccggggctccctctccgcaagctgcagccagaaggccagacttctgggagttcccgggcagacggcgtttcggtccggacctattcctgctagtgcaggcctccaggtgaggaccgtgctgggcgaccttgggggtgcggggcggcacggtggatcttcactgctccacgcgctgcccggcgtcatgcaggtgacctcactcggacggaagaatcttcccgaggctgggctgttccctctcctgcccggactgtggcctcgccggggagagcgggcgggggagctcgcgccgaggactggaccatctgtacagaccagcgggagtgcgcgcgcccgcctcgcacagggccggggcctggaccaaaccacatgaactggactgagagggggaagaagcggggaggaagaaatcccgccccaaacgtccgctttccttttctctactttgtaatttattgatcagtttctgttgggagacgggtgtcctttacccgcgggaagggggcggggcttccctcccgggccgcatgcggggagaggctgctccctcccctttttcctgcccagtcgcggggcccaagtcttccttcttcgtccgaaaggaggggaggggggactcgctgctacaagcctcgccccctgtgccactcagctccgccccgccgcgtccggtcgccggtcccccgggtcatctgcgggcgggttcccctctccctcccccgtgtctcgtgtccccggggcctcaccgccccccgtgctgtggccgtgtccgtgccccgggggtagggggcgcagaatggcgcttccccttctcctctggctccggggtttgcatgggagaatcctctttccacgatgccgctgggcgacgtggcgtgggggcagggggacggtgggggagccctcgcccccgactctcggtcggcctccccgccccaggcgtcactcagtgatcacgggtaaagagaactgtttc

SEQ ID NO: 171817 - DNA, 3493 bp, Homo sapiens
  Payload ID: 13764
  Gene Symbol: PPFIA3
  Gene Name: protein tyrosine phosphatase, receptor type, f polypeptide (PTPRF), interacting protein (liprin), alpha 3
  ENST ID: ENST00000602655
  CDS Start-End: 75-2033
ctccaccccacgtccctcctgcagcccagctccgcccgcagccgccgcggaccaggcaggcccgcaccgccgccatgatgtgcgaggtgatgcccaccatcagcgaggatggccggcggggctcggcgctgggcccggacgaggcgggcggggagctggagcgcctcatggtcacgatgctcacggagcgcgagcgcctgctggagacgctgcgcgaggcacaggacgggttggctacagcgcagctgcggctgcgcgagctcggccacgagaaggactcgctgcagcgccagctcagcatcgcgctgccccaggagtttgcagctctgacgaaggagctgaacttatgtcgggagcagctgctggagagggaggaagagattgcagagctgaaggcggaacggaacaacacgcggctgctcctggaacacctggagtgcctggtgtccaggcacgagaggtcactgcgcatgaccgtggtgaagcgccaggcccagtccccgggtggggtctcctcggaggtagaagtgctcaaagctctaaagtctctcttcgagcaccacaaggccctggatgagaaggtccgggagcggctgcggatggcgctggagcgcgtggcagtgctcgaggaggagctggaactgagcaatcaggagactctgaaccttcgagaacagctgtctaggcggcggtcagggctggaagagccgggcaaggatggggatgggcagactcttgccaatggcctgggtcctggcggggattccaaccggcgcacagcagagctggaggaggccctggagcggcagcgcgccgaggtgtgccagctgcgggagcgcctggcggtgctgtgccgtcagatgagccagctggaggaggagttgggcaccgcgcaccgtgagctgggcaaggcagaggaagccaactccaagctgcagcgcgacctcaaggaggcgctggcgcagcgggaagatatggaggagcggattacaacactggagaagcgctacctgagcgcccagcgggaggccacgtctctgcacgacgccaacgacaaactggagaacgagttagctagcaaggagtcgttgtatcggcagagtgaagagaagagccgtcagctggccgagtggttggacgacgccaagcagaagctgcagcagacgctgcagaaagcggagaccttgcccgagatagaggcgcagctggcgcagcgcgtggcggcgctcaacaaggccgaggaacgtcatgggaattttgaggagcggcttcggcagctggaggcccagctggaagagaagaatcaagagctgcagcgggcccggcagcgggagaagatgaacgatgaccacaataagcggctgtccgagacggtggacaagctgctgagcgagtccaacgagcgcttacagcttcacctcaaggagcgcatgggggcgctggaggagaagaactccctgagcgaggagatagccaacatgaagaagcttcaggatgagttgctgctaaacaaggagcagctcttggccgaaatggagcggatgcagatggagatcgaccagctgcgggggaggccaccatcctcctactccaggtctctccctggcagtgccctggagctccgttactctcaggcacccactttaccttctggtgcccacctggatccctatgtggctggcagtggtcgggcaggcaagaggggccgctggtcaggggtcaaggaggagccctccaaggattgggagcggtctgcccctgcgggctccataccacccccattccctggggaactggacggctccgatgaggaggaggcagaggggatgtttggggccgagctgctgtcccccagtgggcaggctgacgtgcagacgctggccatcatgcttcaggagcagctggaggccatcaacaaggagatcaaaatcatgtccctaaggaggaagctggagctccacgaggggaggggccggccatcccaggagacaccccaccacccactccccgctctgcccgtcttgagagaatgacccaggccttggcactgcaggcggggtccctggaagatgggggacccccacggggaagtgagggcaccccagattctctgcacaaagcccccaagaagaagagcatcaagtcatccataggccgtctctttggcaagaaagagaagggacgaatgggacccccaggccgggacagctcttctctggctggaacaccctcagatgagacactggccactgaccctctggggctagccaagctgacaggcccaggagacaaggaccgaaggaacaagaggaagcatgaactcctggaggaggcctgccgccagggcctaccttttgctgcctgggacgggcccaccgtggtgtcctggctggagctgtgggtgggcatgcctgcctggtatgtggccgcctgccgggccaatgtcaagagcggtgccatcatggccaacctgtcagacacggagatccagcgcgagatcggcatcagcaacccgctgcaccgactcaagctacgcctcgccatccaggagatggtctcgctcacctcgccctcagcccccgcctcctcccgcacttccacaggaaacgtgtggatgacacacgaggagatggagtcccttacggccacgaccaagcccgagaccaaggagatcagctgggagcagatcctggcatatggcgacatgaaccacgagtgggtggggaacgactggctgcccagcctggggctgccccaataccgcagctacttcatggagtcgctggtggacgctcgaatgttagatcaccttaacaagaaggagctccggggccaactcaagatggtggacagctttcacagggtgagtctacattatgggattatgtgcctgaaacggctcaactatgaccggaaggacctggagcggaggcgggaagaaagtcagacccagatccgagacgtgatggtgtggtccaatgagcgggtcatgggttgggtgtccgggctgggcctgaaggaatttgccacgaacctcacggagagcggggtacacggggcactgctcgccctggacgagaccttcgactactccgacctggccttgctcctgcagatccccacgcagaatgcacaggcccggcagcttctggagaaggaattcagcaaccttatctccttaggcacagacaggcggctggacgaggacagcgccaagtctttcagccgctccccatcctggcggaagatgttccgggagaaggacctccgaggcgtaactcccgactcagctgagatgttgccccccaactttcgttcggctgcagcgggagccctgggctctccggggctccctctccgcaagctgcagccagaaggccagacttctgggagttcccgggcagacggcgtttcggtccggacctattcctgctagtgcaggcctccaggtgacctcactcggacggaagaatcttcccgaggctgggctgtt

SEQ ID NO: 171818 - DNA, 547 bp, Homo sapiens
  Payload ID: 13764
  Gene Symbol: PPFIA3
  Gene Name: protein tyrosine phosphatase, receptor type, f polypeptide (PTPRF), interacting protein (liprin), alpha 3
  ENST ID: ENST00000602509
  CDS Start-End: 108-547
atgcgttgcccgcagggagagaaggaaaagaaggaactgagtgaaagtccctcctgctttccgccgggccagctggacccgtcggacctgatgcccgcaccgccgccatgatgtgcgaggtgatgcccaccatcagcgaggatggccggcggggctcggcgctgggcccggacgaggcgggcggggagctggagcgcctcatggtcacgatgctcacggagcgcgagcgcctgctggagacgctgcgcgaggcacaggacgggttggctacagcgcagctgcggctgcgcgagctcggccacgagaaggactcgctgcagcgccagctcagcatcgcgctgccccaggagtttgcagctctgacgaaggagctgaacttatgtcgggagcagctgctggagagggaggaagagattgcagagctgaaggcggaacggaacaacacgcggctgctcctggaacacctggagtgcctggtgtccaggcacgagaggtcactgcgcatgaccgtggtgaagcgccaggcccagtccccgggtggggtctc

SEQ ID NO: 171819 - DNA, 4341 bp, Homo sapiens
  Payload ID: 13764
  Gene Symbol: PPFIA3
  Gene Name: protein tyrosine phosphatase, receptor type, f polypeptide (PTPRF), interacting protein (liprin), alpha 3
  Uniprot ID: O75145
  ENST ID: ENST00000602351
  CDS Start-End: 1-3558
atgatgtgcgaggtgatgcccaccatcagcgaggatggccggcggggctcggcgctgggcccggacgaggcgggcggggagctggagcgcctcatggtcacgatgctcacggagcgcgagcgcctgctggagacgctgcgcgaggcacaggacgggttggctacagcgcagctgcggctgcgcgagctcggccacgagaaggactcgctgcagcgccagctcagcatcgcgctgccccaggagtttgcagctctgacgaaggagctgaacttatgtcgggagcagctgctggagagggaggaagagattgcagagctgaaggcggaacggaacaacacgcggctgctcctggaacacctggagtgcctggtgtccaggcacgagaggtcactgcgcatgaccgtggtgaagcgccaggcccagtccccgggtggggtctcctcggaggtagaagtgctcaaagctctaaagtctctcttcgagcaccacaaggccctggatgagaaggtccgggagcggctgcggatggcgctggagcgcgtggcagtgctcgaggaggagctggaactgagcaatcaggagactctgaaccttcgagaacagctgtctaggcggcggtcagggctggaagagccgggcaaggatggggatgggcagactcttgccaatggcctgggtcctggcggggattccaaccggcgcacagcagagctggaggaggccctggagcggcagcgcgccgaggtgtgccagctgcgggagcgcctggcggtgctgtgccgtcagatgagccagctggaggaggagttgggcaccgcgcaccgtgagctgggcaaggcagaggaagccaactccaagctgcagcgcgacctcaaggaggcgctggcgcagcgggaagatatggaggagcggattacaacactggagaagcgctacctgagcgcccagcgggaggccacgtctctgcacgacgccaacgacaaactggagaacgagttagctagcaaggagtcgttgtatcggcagagtgaagagaagagccgtcagctggccgagtggttggacgacgccaagcagaagctgcagcagacgctgcagaaagcggagaccttgcccgagatagaggcgcagctggcgcagcgcgtggcggcgctcaacaaggccgaggaacgtcatgggaattttgaggagcggcttcggcagctggaggcccagctggaagagaagaatcaagagctgcagcgggcccggcagcgggagaagatgaacgatgaccacaataagcggctgtccgagacggtggacaagctgctgagcgagtccaacgagcgcttacagcttcacctcaaggagcgcatgggggcgctggaggagaagaactccctgagcgaggagatagccaacatgaagaagcttcaggatgagttgctgctaaacaaggagcagctcttggccgaaatggagcggatgcagatggagatcgaccagctgcgggggaggccaccatcctcctactccaggtctctccctggcagtgccctggagctccgttactctcaggcacccactttaccttctggtgcccacctggatccctatgtggctggcagtggtcgggcaggcaagaggggccgctggtcaggggtcaaggaggagccctccaaggattgggagcggtctgcccctgcgggctccataccacccccattccctggggaactggacggctccgatgaggaggaggcagaggggatgtttggggccgagctgctgtcccccagtgggcaggctgacgtgcagacgctggccatcatgcttcaggagcagctggaggccatcaacaaggagatcaagctgatccaagaggagaaggagacaacagaacagagggcagaggagctggagagtcgggtgtccagctctggcttggactcgttgggccgctaccgcagcagctgctccctgcccccctccctcaccacctctacccttgccagcccctcccctcccagctctggccactcaacaccccgcctggcaccccctagccctgcccgtgagggcaccgacaaggctaatcatgtccctaaggaggaagctggagctccacgaggggaggggccggccatcccaggagacaccccaccacccactccccgctctgcccgtcttgagagaatgacccaggccttggcactgcaggcggggtccctggaagatgggggacccccacggggaagtgagggcaccccagattctctgcacaaagcccccaagaagaagagcatcaagtcatccataggccgtctctttggcaagaaagagaagggacgaatgggacccccaggccgggacagctcttctctggctggaacaccctcagatgagacactggccactgaccctctggggctagccaagctgacaggcccaggagacaaggaccgaaggaacaagaggaagcatgaactcctggaggaggcctgccgccagggcctaccttttgctgcctgggacgggcccaccgtggtgtcctggctggagctgtgggtgggcatgcctgcctggtatgtggccgcctgccgggccaatgtcaagagcggtgccatcatggccaacctgtcagacacggagatccagcgcgagatcggcatcagcaacccgctgcaccgactcaagctacgcctcgccatccaggagatggtctcgctcacctcgccctcagcccccgcctcctcccgcacttccacaggaaacgtgtggatgacacacgaggagatggagtcccttacggccacgaccaagcccatcctggcatatggcgacatgaaccacgagtgggtggggaacgactggctgcccagcctggggctgccccaataccgcagctacttcatggagtcgctggtggacgctcgaatgttagatcaccttaacaagaaggagctccggggccaactcaagatggtggacagctttcacagggtgagtctacattatgggattatgtgcctgaaacggctcaactatgaccggaaggacctggagcggaggcgggaagaaagtcagacccagatccgagacgtgatggtgtggtccaatgagcgggtcatgggttgggtgtccgggctgggcctgaaggaatttgccacgaacctcacggagagcggggtacacggggcactgctcgccctggacgagaccttcgactactccgacctggccttgctcctgcagatccccacgcagaatgcacaggcccggcagcttctggagaaggaattcagcaaccttatctccttaggcacagacaggcggctggacgaggacagcgccaagtctttcagccgctccccatcctggcggaagatgttccgggagaaggacctccgaggcgtaactcccgactcagctgagatgttgccccccaactttcgttcggctgcagcgggagccctgggctctccggggctccctctccgcaagctgcagccagaaggccagacttctgggagttcccgggcagacggcgtttcggtccggacctattcctgctagtgcaggcctccagaatcttcccgaggctgggctgttccctctcctgcccggactgtggcctcgccggggagagcgggcgggggagctcgcgccgaggactggaccatctgtacagaccagcgggagtgcgcgcgcccgcctcgcacagggccggggcctggaccaaaccacatgaactggactgagagggggaagaagcggggaggaagaaatcccgccccaaacgtccgctttccttttctctactttgtaatttattgatcagtttctgttgggagacgggtgtcctttacccgcgggaagggggcggggcttccctcccgggccgcatgcggggagaggctgctccctcccctttttcctgcccagtcgcggggcccaagtcttccttcttcgtccgaaaggaggggaggggggactcgctgctacaagcctcgccccctgtgccactcagctccgccccgccgcgtccggtcgccggtcccccgggtcatctgcgggcgggttcccctctccctcccccgtgtctcgtgtccccggggcctcaccgccccccgtgctgtggccgtgtccgtgccccgggggtagggggcgcagaatggcgcttccccttctcctctggctccggggtttgcatgggagaatcctctttccacgatgccgctgggcgacgtggcgtgggggcagggggacggtgggggagccctcgcccccgactctcggtcggcctccccgccccaggcgtcactcagtgatcacgggtaaagagaactgtttcaaaaa

SEQ ID NO: 171820 - DNA, 5045 bp, Homo sapiens
  Payload ID: 13765
  Gene Symbol: PPFIA4
  Gene Name: protein tyrosine phosphatase, receptor type, f polypeptide (PTPRF), interacting protein (liprin), alpha 4
  Uniprot ID: O75335
  ENST ID: ENST00000272198
  CDS Start-End: 594-2699
attttctctggcttgtgtttctgacagtgttagggcctcctaaagcttcctaggcataggggtatgcctggcttgaattttaaccagggactcagtccagattatggggagacccgaggaaaagtgctgggtagaagaccaaaaaacaaagaccctcagagtgaaaagggcctctagacatcatcccttccaacatctcccagtgcctggagccctcctgcgccacgtgtgtcagatggccggagagcctctgctcgaatacctctttgatggggagctcaactttttaaaagccaccagttgcatcgtaagccaactcttgccattagaagatccttcttatgccagacggaaaaccgctctctggaactttctcccctggctcattctgacccctggagcaccagggcatacgtctgctctcttgcttacacggcagcccttcagacatttgtgacagctctgtgtcctgctaagatgtctcttctctgagctgaagatcccttgactctttgggcccactgggtgtgagctgggggtctcagtcctcagggcctgtcttttctctcccccatcaccgctcaaggtcgcacatgggcagtgcagcagacgtgcggttctccctgggcacaaccacacacgcacccccaggcgtgcatcgccgctactcggcattgagggaagagtctgccaaggactgggagacttctccactgcctgggatgctggccccggcagctggccctgcctttgacagtgaccctgagatctccgacgtggatgaggatgagccagggggtctggtgggctctgcggatgttgtctcccccagcggccactcagatgcccagaccctggccatgatgctgcaggagcagctggatgccatcaatgaggaaatcaggatgattcaggaagagaaggagtccacggagctccgcgcggaggagattgagacgcgtgtaaccagtggcagcatggaagccctaaacctgaagcagctgcgcaagcgtggttccatccccacctctctgacggccctgtccctggccagcgcgtccccaccactcagcggccgctccacacctaagctcacctcccgcagtgctgcccaggacctggaccgaatgggggtcatgaccctgcccagtgacttaagaaagcataggaggaagctgctgtcgccagtgtctcgggaagagaaccgagaggataaagccaccataaaatgtgagacttctcctccttcctcacccaggacgctgcggctagagaagcttggccacccagccctgagccaggaagaaggcaagagtgccttggaggatcagggcagcaaccccagcagcagcaacagcagccaggactccctgcacaagggcgccaagcgcaagggcatcaagtcgtccattggccgcctgtttgggaagaaggagaagggcaggctgatccagctgagtcgggatggagccacaggccatgttctgctaacagactccgaattcagtatgcaggagcctatggtgcctgccaagctggggacccaggcagagaaggaccggcggctaaagaagaaacaccagctgcttgaagatgcccgcaggaaaggaatgccctttgcccagtgggatggtcctactgtggtctcctggttggagctctgggtggggatgcctgcctggtatgtggcagcctgccgggccaacgtcaagagtggtgccatcatgtccgctctgtcggacacagagatccagcgggagatcggcatcagcaatgccctgcaccggctcaagctccgcctggccattcaggagatggtgtcattgaccagcccctctgccccacccacctccaggacttcttctgggaatgtctgggtcacccatgaagagatggaaactctggaaacatctactaaaacagacagtgaggagggcagctgggctcagaccctggcctatggggacatgaaccatgagtggattgggaatgaatggctacccagcctggggctcccgcagtaccgcagctacttcatggagtgcctggtggacgcccgcatgctggaccacctcaccaagaaggacctgcgggtccacctgaagatggtggacagcttccatcgaaccagtcttcagtatggcatcatgtgtctgaagaggctgaattatgaccggaaggagctggagaagaggcgagaggagagccagcatgagatcaaggatgtgttagtctggaccaacgaccaggtggttcattgggtccagtctattgggctccgggactacgcaggaaacctgcatgagagtggtgtgcatggagccttgctggccctggacgagaacttcgaccacaacacactggccctgatcctccagatccccacacagaacacccaggcacgccaagtgatggaaagagagttcaataacctgttggccttgggcacagaccggaagctggatgacggggatgacaaggtgtttcgccgcgcgccctcctggaggaagcgcttccggccgcgggagcaccacggtcgcggcggcatgctcagcgcttccgcggagaccctcccggcgggcttccgtgtgtccaccctggggaccctgcagcccccaccggccccgccaaagaagatcatgcctgaagctcactcccactatctctacggacacatgctctccgccttccgggactagccatggcccccagggctggcttcctccttctgggtttcacaggctcctctggccctgacccctcttgctcgttccccttccttccgcagctcctagtctcgtccgtgactttccggttgccctggatctcagaatatattcgtccaccccctcggcaccccattaccccgagtcccaccgtgtgtccgttgtaagtccggtggatgtggctggggtttcctggtattgtggaggcacccaggttgtccatgcttgggattctgggggaaggagagaagggcagctcagggtggatgtgaagccacccttcctcttctggacccagcctggtctgcactgcaacctccaccaggaccaggatcctgggccacaggctgggatggtccttccaagaaagggtcatttcagacgcagccctgcttgggctattcaatcttagggtgtctatccacgtctggctgtgccaaatggtctggcagctggttttggcatccccagcatcaccactctcccaacccatcaccgtgactgcagttcctgcccccattctcttggggtcagggaggggctgggaagggctactgaaggccccattctcccacaggatggtgaggctgggaggaggaagactgaggtagagattccaggccctggcataagctgaatcccaaatttgagtttgggaagaaccagagagaaatggatccctgagctctgagccaagggtgaggatggggaaactctaagctcccacctaataagaagcataggcagaccagccagagggagagccaatggcctctggtagccttaagcccaaagggcagtgggaatgtcccctgccccaaccatcgggtggagctcctgctgggctatggggaagggaggttgtgcggatcttgactctagggcagaacagatctaaccatgcattgctagctctgctcccagcatcccttccccttctctcctcctctgcctcacttctttagtaatcccaaccctataaaaatgaacctaatgggtggattgaatatacattgagcccaaagtcaagtttggggaaaaggcagactaaggcctcctttctctgacctcccaggaagaaaatagcttctcctacagtgattcatgtcccaggtccaggaaatccaatgttggtgaaggcagccactctcttgcttgtccccaaatcacctaaccctcatccagggctattttggtgggcagggactgcctcctcccggaattcctaagatccgcccagctgccaccattttcattgctttccccagcagcatgatgggaacccaagctgagggatacaggtcctgatttggtaggaatattattcccaagaaatacccgctcctcacctactccctcatcctaccaaggtgcctgaaaatgttcaagacttatgttcagggtgggatgatggaaccgagggcttcatcaaagtgagaggaaaggaaaagcatctggcatgtgtttcttggataggggccagtgcagtgccatcctacaggtggctggagcagctgctttgcaacctgatcaccttgagttctgagcagggactaggcttgcaggtgagataatgggccagggcacccagtccagaaggagcaatggcacctgggcagtgccagggcttaaagcccgctgctccttttcggtagaggagaggcccatcactggtgtggtggggtgggctctcccttaggcttgggcaaggcagccacctgcccttgctctcccttagtgttccctggcctccctgccatcaggttgctgggagtggagatggagggattattgagcagaaaatgagttggatggagataaacagctcccatccctgggtaatggatggtaagatgatggagattcctaagattggtggagttgggcaatgcatagccatctgactccttcagggtgctcttgatgggctggctgtaagggagactcagtcccagcctctcccctctacaactcctgccactgttggccatgtcgtaaggcagcagctgtgccaggatagctgggtccattcagagcaccttgagaagtgttgcagggaggtgttaagaagagaactctgtgcaaacagtgatggaaggctgttgtcttggtgtatcccttgcctcatagtcaatatattttttttttggcgagtcaccagtgacccgagccctccacaccagcctcctgtatctcatcaggtcccttctcagtactgtatttgctcagtgcatcaggaatgggtgtatgggtgtgtgtgggtgggtgtgagtgtgggtgtgtacgtaccaataaacaacctggttttaagacaatgta

SEQ ID NO: 171821 - DNA, 6395 bp, Homo sapiens
  Payload ID: 13765
  Gene Symbol: PPFIA4
  Gene Name: protein tyrosine phosphatase, receptor type, f polypeptide (PTPRF), interacting protein (liprin), alpha 4
  Uniprot ID: O75335
  ENST ID: ENST00000295706
  CDS Start-End: 1972-4050
atgtctgagagccccaaggacgagggctccgaagagtgtctgtttctgcagcgcctatgggagtggggggcagtggggggaactcagggaagctgcctacaacttgaggccttccccaggctggaggaggaggacagggaaggccgaggggagctgtcctccggctgccatcaccctgatgaggcggccctgccccgggctgtggtctccgcaggggctggcaaccttgcctttgtccagctctctccgtggccaggcctgccatctgcctgcccacactcctccccggcaaagccccttgcaaatgcttgctttggggactggcagctttcgcctctgaatcaggacctagcatcagtactctggggagggggtccaggtgccaaccctgtgagtccctccctgtcccctgacgctgagaaggccctgccaacccccaccatgtgtgaggtgatgcccacaatcaatgagggggaccgcctgggtccccctcatggcgccgatgctgacgccaacttcgagcagctgatggtgaacatgctggacgagcgggagaagttgctggagtctcttcgggagagtcaggagaccttggcggccacacagagccggctccaggatgccatacacgagcgggaccagctccagcgccaccttaactccgccctcccccaggaatttgccaccttaacccgggagctgagcatgtgtcgggagcagcttctagagcgggaggaagagatatcagaactgaaagcagaacggaataacacacggctgcttctggaacatctggagtgcctggtgtcccgccatgaacggtcactgcggatgactgtggtgaagcgccaggcccagtcaccttcgggggtctccagtgaggtggaggtgctgaaggccctcaagtcactgtttgagcaccacaaggccctggatgagaaggtgcgagagcggctccgggcagcgctggagcgagtcaccaccttggaggagcagctggcaggtgcccaccagcaggtgtctgccctgcagcagggggcaggggtgcgggatggagcggcagaagaggaggggactgtggagctggggccgaaacgcctgtggaaggaggatacgggccgggtagaggagctgcaggagctcctggagaagcagaactttgagttgagccaggcccgggagcgactggtcaccctaacaacaaccgtgactgaactcgaggaggacctgggcacggcccgccgggacctcatcaagtcggaggagctgagcagcaagcatcagcgggacctccgggaggctctggcccagaaggaggacatggaagagcggattactacactggagaagcgctacctggctgctcagcgtgaggcaacatccatccatgacctcaatgacaagctggagaatgagctggccaacaaggagtccctgcaccgccagtgtgaggagaaggcccgacacctgcaggagctgctggaggtggcagagcagaagctgcagcagacgatgcgcaaggcagagacgctgccagaggtggaggctgagctggcccagagaattgcagccctcaccaaggctgaagaacggcatggcaacattgaggagcacctgcggcagctggagggacagctggaggagaagaaccaggagctggcacggacggctgtgcaggtgcgccagcgggaaaagatgaatgaggaccacaacaagcggctgtcggacacagtggaccggctgctcagcgagtccaacgagcgtctgcagctccacctgaaggagcgcatggctgccctggaggagaagaacacgttgatccaggagttggagagctcccagcggcagattgaggagcagcaccaccacaagggccgcctgtctgaagagattgagaagctgcgccaagaggtggaccagctgaagggccgaggggggccgtttgtggatggcgtccactccaggtcgcacatgggcagtgcagcagacgtgcggttctccctgggcacaaccacacacgcacccccaggcgtgcatcgccgctactcggcattgagggaagagtctgccaaggactgggagacttctccactgcctgggatgctggccccggcagctggccctgcctttgacagtgaccctgagatctccgacgtggatgaggatgagccagggggtctggtgggctctgcggatgttgtctcccccagcggccactcagatgcccagaccctggccatgatgctgcaggagcagctggatgccatcaatgaggaaatcaggatgattcaggaagagaaggagtccacggagctccgcgcggaggagattgagacgcgtgtaaccagtggcagcatggaagccctaaacctgaagcagctgcgcaagcgtggttccatccccacctctctgacggccctgtccctggccagcgcgtccccaccactcagcggccgctccacacctaagctcacctcccgcagtgctgcccaggacctggaccgaatgggggtcatgaccctgcccagtgacttaagaaagcataggaggaagctgctgtcgccagtgtctcgggaagagaaccgagaggataaagccaccataaaatgtgagacttctcctccttcctcacccaggacgctgcggctagagaagcttggccacccagccctgagccaggaagaaggcaagagtgccttggaggatcagggcagcaaccccagcagcagcaacagcagccaggactccctgcacaagggcgccaagcgcaagggcatcaagtcgtccattggccgcctgtttgggaagaaggagaagggcaggctgatccagctgagtcgggatggagccacaggccatgttctgctaacagactccgaattcagtatgcaggagcctatggtgcctgccaagctggggacccaggcagagaaggaccggcggctaaagaagaaacaccagctgcttgaagatgcccgcaggaaaggaatgccctttgcccagtgggatggtcctactgtggtctcctggttggagctctgggtggggatgcctgcctggtatgtggcagcctgccgggccaacgtcaagagtggtgccatcatgtccgctctgtcggacacagagatccagcgggagatcggcatcagcaatgccctgcaccggctcaagctccgcctggccattcaggagatggtgtcattgaccagcccctctgccccacccacctccaggacttcttctgggaatgtctgggtcacccatgaagagatggaaactctggaaacatctactaaaacaaccctggcctatggggacatgaaccatgagtggattgggaatgaatggctacccagcctggggctcccgcagtaccgcagctacttcatggagtgcctggtggacgcccgcatgctggaccacctcaccaagaaggacctgcgggtccacctgaagatggtggacagcttccatcgaaccagtcttcagtatggcatcatgtgtctgaagaggctgaattatgaccggaaggagctggagaagaggcgagaggagagccagcatgagatcaaggatgtgttagtctggaccaacgaccaggtggttcattgggtccagtctattgggctccgggactacgcaggaaacctgcatgagagtggtgtgcatggagccttgctggccctggacgagaacttcgaccacaacacactggccctgatcctccagatccccacacagaacacccaggcacgccaagtgatggaaagagagttcaataacctgttggccttgggcacagaccggaagctggatgacggggatgacaaggtgtttcgccgcgcgccctcctggaggaagcgcttccggccgcgggagcaccacggtcgcggcggcatgctcagcgcttccgcggagaccctcccggcgggcttccgtgtgtccaccctggggaccctgcagcccccaccggccccgccaaagaagatcatgcctgaagctcactcccactatctctacggacacatgctctccgccttccgggactagccatggcccccagggctggcttcctccttctgggtttcacaggctcctctggccctgacccctcttgctcgttccccttccttccgcagctcctagtctcgtccgtgactttccggttgccctggatctcagaatatattcgtccaccccctcggcaccccattaccccgagtcccaccgtgtgtccgttgtaagtccggtggatgtggctggggtttcctggtattgtggaggcacccaggttgtccatgcttgggattctgggggaaggagagaagggcagctcagggtggatgtgaagccacccttcctcttctggacccagcctggtctgcactgcaacctccaccaggaccaggatcctgggccacaggctgggatggtccttccaagaaagggtcatttcagacgcagccctgcttgggctattcaatcttagggtgtctatccacgtctggctgtgccaaatggtctggcagctggttttggcatccccagcatcaccactctcccaacccatcaccgtgactgcagttcctgcccccattctcttggggtcagggaggggctgggaagggctactgaaggccccattctcccacaggatggtgaggctgggaggaggaagactgaggtagagattccaggccctggcataagctgaatcccaaatttgagtttgggaagaaccagagagaaatggatccctgagctctgagccaagggtgaggatggggaaactctaagctcccacctaataagaagcataggcagaccagccagagggagagccaatggcctctggtagccttaagcccaaagggcagtgggaatgtcccctgccccaaccatcgggtggagctcctgctgggctatggggaagggaggttgtgcggatcttgactctagggcagaacagatctaaccatgcattgctagctctgctcccagcatcccttccccttctctcctcctctgcctcacttctttagtaatcccaaccctataaaaatgaacctaatgggtggattgaatatacattgagcccaaagtcaagtttggggaaaaggcagactaaggcctcctttctctgacctcccaggaagaaaatagcttctcctacagtgattcatgtcccaggtccaggaaatccaatgttggtgaaggcagccactctcttgcttgtccccaaatcacctaaccctcatccagggctattttggtgggcagggactgcctcctcccggaattcctaagatccgcccagctgccaccattttcattgctttccccagcagcatgatgggaacccaagctgagggatacaggtcctgatttggtaggaatattattcccaagaaatacccgctcctcacctactccctcatcctaccaaggtgcctgaaaatgttcaagacttatgttcagggtgggatgatggaaccgagggcttcatcaaagtgagaggaaaggaaaagcatctggcatgtgtttcttggataggggccagtgcagtgccatcctacaggtggctggagcagctgctttgcaacctgatcaccttgagttctgagcagggactaggcttgcaggtgagataatgggccagggcacccagtccagaaggagcaatggcacctgggcagtgccagggcttaaagcccgctgctccttttcggtagaggagaggcccatcactggtgtggtggggtgggctctcccttaggcttgggcaaggcagccacctgcccttgctctcccttagtgttccctggcctccctgccatcaggttgctgggagtggagatggagggattattgagcagaaaatgagttggatggagataaacagctcccatccctgggtaatggatggtaagatgatggagattcctaagattggtggagttgggcaatgcatagccatctgactccttcagggtgctcttgatgggctggctgtaagggagactcagtcccagcctctcccctctacaactcctgccactgttggccatgtcgtaaggcagcagctgtgccaggatagctgggtccattcagagcaccttgagaagtgttgcagggaggtgttaagaagagaactctgtgcaaacagtgatggaaggctgttgtcttggtgtatcccttgcctcatagtcaatatattttttttttggcgagtcaccagtgacccgagccctccacaccagcctcctgtatctcatcaggtcccttctcagtactgtatttgctcagtgcatcaggaatgggtgtatgggtgtgtgtgggtgggtgtgagtgtgggtgtgtacgtaccaataaacaacctggttttaagacaatgt

SEQ ID NO: 171822 - DNA, 6434 bp, Homo sapiens
  Payload ID: 13765
  Gene Symbol: PPFIA4
  Gene Name: protein tyrosine phosphatase, receptor type, f polypeptide (PTPRF), interacting protein (liprin), alpha 4
  ENST ID: ENST00000367240
  CDS Start-End: 528-4088
cgcgcttgggcggcggaggctgcagctacctcggcgccggctcggctctaggacgtgtcgggctgcacgggtcgggggcggctccctgctgcttccgagcctagccgcctggccttcggcatttgcagacacactgccctccagaaacgatgggtgtcgctagatccagctgggactctgccagcctccggcactcagtctaagagaagggccatcttccagccctgctgtccctgcctgtcatggccacattcggctgctgtctgcatgtctggggacacagggcacccagccccagccctgagaagttaagccaggccttctggctcagttccacaggggcactccagaccccaggcccctttcagagcaaaagcaactgatgctatgggagaagcccctgcccacctgtccactcgcctggcactgcccactctgagacccatgcactgggttcccctggaggtgccaaccctgtgagtccctccctgtcccctgacgctgagaaggccctgccaacccccaccatgtgtgaggtgatgcccacaatcaatgagggggaccgcctgggtccccctcatggcgccgatgctgacgccaacttcgagcagctgatggtgaacatgctggacgagcgggagaagttgctggagtctcttcgggagagtcaggagaccttggcggccacacagagccggctccaggatgccatacacgagcgggaccagctccagcgccaccttaactccgccctcccccaggaatttgccaccttaacccgggagctgagcatgtgtcgggagcagcttctagagcgggaggaagagatatcagaactgaaagcagaacggaataacacacggctgcttctggaacatctggagtgcctggtgtcccgccatgaacggtcactgcggatgactgtggtgaagcgccaggcccagtcaccttcgggggtctccagtgaggtggaggtgctgaaggccctcaagtcactgtttgagcaccacaaggccctggatgagaaggtgcgagagcggctccgggcagcgctggagcgagtcaccaccttggaggagcagctggcaggtgcccaccagcaggtgtctgccctgcagcagggggcaggggtgcgggatggagcggcagaagaggaggggactgtggagctggggccgaaacgcctgtggaaggaggatacgggccgggtagaggagctgcaggagctcctggagaagcagaactttgagttgagccaggcccgggagcgactggtcaccctaacaacaaccgtgactgaactcgaggaggacctgggcacggcccgccgggacctcatcaagtcggaggagctgagcagcaagcatcagcgggacctccgggaggctctggcccagaaggaggacatggaagagcggattactacactggagaagcgctacctggctgctcagcgtgaggcaacatccatccatgacctcaatgacaagctggagaatgagctggccaacaaggagtccctgcaccgccagtgtgaggagaaggcccgacacctgcaggagctgctggaggtggcagagcagaagctgcagcagacgatgcgcaaggcagagacgctgccagaggtggaggctgagctggcccagagaattgcagccctcaccaaggctgaagaacggcatggcaacattgaggagcacctgcggcagctggagggacagctggaggagaagaaccaggagctggcacgggtgcgccagcgggaaaagatgaatgaggaccacaacaagcggctgtcggacacagtggaccggctgctcagcgagtccaacgagcgtctgcagctccacctgaaggagcgcatggctgccctggaggagaagggccgcctgtctgaagagattgagaagctgcgccaagaggtggaccagctgaagggccgaggggggccgtttgtggatggcgtccactccaggtcgcacatgggcagtgcagcagacgtgcggttctccctgggcacaaccacacacgcacccccaggcgtgcatcgccgctactcggcattgagggaagagtctgccaaggactgggagacttctccactgcctgggatgctggccccggcagctggccctgcctttgacagtgaccctgagatctccgacgtggatgaggatgagccagggggtctggtgggctctgcggatgttgtctcccccagcggccactcagatgcccagaccctggccatgatgctgcaggagcagctggatgccatcaatgaggaaatcaggatgattcaggaagagaaggagtccacggagctccgcgcggaggagattgagacgcgtgtaaccagtggcagcatggaagccctaaacctgaagcagctgcgcaagcgtggttccatccccacctctctgacggccctgtccctggccagcgcgtccccaccactcagcggccgctccacacctaagctcacctcccgcagtgctgcccaggacctggaccgaatgggggtcatgaccctgcccagtgacttaagaaagcataggaggaagctgctgtcgccagtgtctcgggaagagaaccgagaggataaagccaccataaaatgtgagacttctcctccttcctcacccaggacgctgcggctagagaagcttggccacccagccctgagccaggaagaaggcaagagtgccttggaggatcagggcagcaaccccagcagcagcaacagcagccaggactccctgcacaagggcgccaagcgcaagggcatcaagtcgtccattggccgcctgtttgggaagaaggagaagggcaggctgatccagctgagtcgggatggagccacaggccatgttctgctaacagactccgaattcagtatgcaggagcctatggtgcctgccaagctggggacccaggcagagaaggaccggcggctaaagaagaaacaccagctgcttgaagatgcccgcaggaaaggaatgccctttgcccagtgggatggtcctactgtggtctcctggttggagctctgggtggggatgcctgcctggtatgtggcagcctgccgggccaacgtcaagagtggtgccatcatgtccgctctgtcggacacagagatccagcgggagatcggcatcagcaatgccctgcaccggctcaagctccgcctggccattcaggagatggtgtcattgaccagcccctctgccccacccacctccaggacttcttctgggaatgtctgggtcacccatgaagagatggaaactctggaaacatctactaaaacagacagtgaggagggcagctgggctcagaccctggcctatggggacatgaaccatgagtggattgggaatgaatggctacccagcctggggctcccgcagtaccgcagctacttcatggagtgcctggtggacgcccgcatgctggaccacctcaccaagaaggacctgcgggtccacctgaagatggtggacagcttccatcgaaccagtcttcagtatggcatcatgtgtctgaagaggctgaattatgaccggaaggagctggagaagaggcgagaggagagccagcatgagatcaaggatgtgttagtctggaccaacgaccaggtggttcattgggtccagtctattgggctccgggactacgcaggaaacctgcatgagagtggtgtgcatggagccttgctggccctggacgagaacttcgaccacaacacactggccctgatcctccagatccccacacagaacacccaggcacgccaagtgatggaaagagagttcaataacctgttggccttgggcacagaccggaagctggatgacggggatgacaaggtgtttcgccgcgcgccctcctggaggaagcgcttccggccgcgggagcaccacggtcgcggcggcatgctcagcgcttccgcggagaccctcccggcgggcttccgtgtgtccaccctggggaccctgcagcccccaccggccccgccaaagaagatcatgcctgaagctcactcccactatctctacggacacatgctctccgccttccgggactagccatggcccccagggctggcttcctccttctgggtttcacaggctcctctggccctgacccctcttgctcgttccccttccttccgcagctcctagtctcgtccgtgactttccggttgccctggatctcagaatatattcgtccaccccctcggcaccccattaccccgagtcccaccgtgtgtccgttgtaagtccggtggatgtggctggggtttcctggtattgtggaggcacccaggttgtccatgcttgggattctgggggaaggagagaagggcagctcagggtggatgtgaagccacccttcctcttctggacccagcctggtctgcactgcaacctccaccaggaccaggatcctgggccacaggctgggatggtccttccaagaaagggtcatttcagacgcagccctgcttgggctattcaatcttagggtgtctatccacgtctggctgtgccaaatggtctggcagctggttttggcatccccagcatcaccactctcccaacccatcaccgtgactgcagttcctgcccccattctcttggggtcagggaggggctgggaagggctactgaaggccccattctcccacaggatggtgaggctgggaggaggaagactgaggtagagattccaggccctggcataagctgaatcccaaatttgagtttgggaagaaccagagagaaatggatccctgagctctgagccaagggtgaggatggggaaactctaagctcccacctaataagaagcataggcagaccagccagagggagagccaatggcctctggtagccttaagcccaaagggcagtgggaatgtcccctgccccaaccatcgggtggagctcctgctgggctatggggaagggaggttgtgcggatcttgactctagggcagaacagatctaaccatgcattgctagctctgctcccagcatcccttccccttctctcctcctctgcctcacttctttagtaatcccaaccctataaaaatgaacctaatgggtggattgaatatacattgagcccaaagtcaagtttggggaaaaggcagactaaggcctcctttctctgacctcccaggaagaaaatagcttctcctacagtgattcatgtcccaggtccaggaaatccaatgttggtgaaggcagccactctcttgcttgtccccaaatcacctaaccctcatccagggctattttggtgggcagggactgcctcctcccggaattcctaagatccgcccagctgccaccattttcattgctttccccagcagcatgatgggaacccaagctgagggatacaggtcctgatttggtaggaatattattcccaagaaatacccgctcctcacctactccctcatcctaccaaggtgcctgaaaatgttcaagacttatgttcagggtgggatgatggaaccgagggcttcatcaaagtgagaggaaaggaaaagcatctggcatgtgtttcttggataggggccagtgcagtgccatcctacaggtggctggagcagctgctttgcaacctgatcaccttgagttctgagcagggactaggcttgcaggtgagataatgggccagggcacccagtccagaaggagcaatggcacctgggcagtgccagggcttaaagcccgctgctccttttcggtagaggagaggcccatcactggtgtggtggggtgggctctcccttaggcttgggcaaggcagccacctgcccttgctctcccttagtgttccctggcctccctgccatcaggttgctgggagtggagatggagggattattgagcagaaaatgagttggatggagataaacagctcccatccctgggtaatggatggtaagatgatggagattcctaagattggtggagttgggcaatgcatagccatctgactccttcagggtgctcttgatgggctggctgtaagggagactcagtcccagcctctcccctctacaactcctgccactgttggccatgtcgtaaggcagcagctgtgccaggatagctgggtccattcagagcaccttgagaagtgttgcagggaggtgttaagaagagaactctgtgcaaacagtgatggaaggctgttgtcttggtgtatcccttgcctcatagtcaatatattttttttttggcgagtcaccagtgacccgagccctccacaccagcctcctgtatctcatcaggtcccttctcagtactgtatttgctcagtgcatcaggaatgggtgtatgggtgtgtgtgggtgggtgtgagtgtgggtgtgtacgtaccaataaacaacctggttttaagacaatgta

SEQ ID NO: 171823 - DNA, 6349 bp, Homo sapiens
  Payload ID: 13765
  Gene Symbol: PPFIA4
  Gene Name: protein tyrosine phosphatase, receptor type, f polypeptide (PTPRF), interacting protein (liprin), alpha 4
  Uniprot ID: O75335
  ENST ID: ENST00000447715
  CDS Start-End: 442-3999
atgtctgagagccccaaggacgagggctccgaagagtgtctgtttctgcagcgcctatgggagtggggggcagtggggggaactcagggaagctgcctacaacttgaggccttccccaggctggaggaggaggacagggaaggccgaggggagctgtcctccggctgccatcaccctgatgaggcggccctgccccgggctgtggtctccgcaggggctggcaaccttgcctttgtccagctctctccgtggccaggcctgccatctgcctgcccacactcctccccggcaaagccccttgcaaatgcttgctttggggactggcagctttcgcctctgaatcaggacctagcatcagtactctggggagggggtccaggtgccaaccctgtgagtccctccctgtcccctgacgctgagaaggccctgccaacccccaccatgtgtgaggtgatgcccacaatcaatgagggggaccgcctgggtccccctcatggcgccgatgctgacgccaacttcgagcagctgatggtgaacatgctggacgagcgggagaagttgctggagtctcttcgggagagtcaggagaccttggcggccacacagagccggctccaggatgccatacacgagcgggaccagctccagcgccaccttaactccgccctcccccaggaatttgccaccttaacccgggagctgagcatgtgtcgggagcagcttctagagcgggaggaagagatatcagaactgaaagcagaacggaataacacacggctgcttctggaacatctggagtgcctggtgtcccgccatgaacggtcactgcggatgactgtggtgaagcgccaggcccagtcaccttcgggggtctccagtgaggtggaggtgctgaaggccctcaagtcactgtttgagcaccacaaggccctggatgagaaggtgcgagagcggctccgggcagcgctggagcgagtcaccaccttggaggagcagctggcaggtgcccaccagcaggtgtctgccctgcagcagggggcaggggtgcgggatggagcggcagaagaggaggggactgtggagctggggccgaaacgcctgtggaaggaggatacgggccgggtagaggagctgcaggagctcctggagaagcagaactttgagttgagccaggcccgggagcgactggtcaccctaacaacaaccgtgactgaactcgaggaggacctgggcacggcccgccgggacctcatcaagtcggaggagctgagcagcaagcatcagcgggacctccgggaggctctggcccagaaggaggacatggaagagcggattactacactggagaagcgctacctggctgctcagcgtgaggcaacatccatccatgacctcaatgacaagctggagaatgagctggccaacaaggagtccctgcaccgccagtgtgaggagaaggcccgacacctgcaggagctgctggaggtggcagagcagaagctgcagcagacgatgcgcaaggcagagacgctgccagaggtggaggctgagctggcccagagaattgcagccctcaccaaggctgaagaacggcatggcaacattgaggagcacctgcggcagctggagggacagctggaggagaagaaccaggagctggcacggacggctgtgcaggtgcgccagcgggaaaagatgaatgaggaccacaacaagcggctgtcggacacagtggaccggctgctcagcgagtccaacgagcgtctgcagctccacctgaaggagcgcatggctgccctggaggagaagaacacgttgatccaggagttggagagctcccagcggcagattgaggagcagcaccaccacaagggccgcctgtctgaagagattgagaagctgcgccaagaggtggaccagctgaagggccgaggggggccgtttgtggatggcgtccactccaggtcgcacatgggcagtgcagcagacgtgcggttctccctgggcacaaccacacacgcacccccaggcgtgcatcgccgctactcggcattgagggaagagtctgccaagctggccctgcctttgacagtgaccctgagatctccgacgtggatgaggatgagccagggggtctgctgcaacttagagtaccacagttcagggaccctctgtgggtcatcaggcccgctgccagtgccggagatgattcaggaagagaaggagtccacggagctccgcgcggaggagattgagacgcgtgtaaccagtggcagcatggaagccctaaacctgaagcagctgcgcaagcgtggttccatccccacctctctgacggccctgtccctggccagcgcgtccccaccactcagcggccgctccacacctaagctcacctcccgcagtgctgcccaggacctggaccgaatgggggtcatgaccctgcccagtgacttaagaaagcataggaggaagctgctgtcgccagtgtctcgggaagagaaccgagaggataaagccaccataaaatgtgagacttctcctccttcctcacccaggacgctgcggctagagaagcttggccacccagccctgagccaggaagaaggcaagagtgccttggaggatcagggcagcaaccccagcagcagcaacagcagccaggactccctgcacaagggcgccaagcgcaagggcatcaagtcgtccattggccgcctgtttgggaagaaggagaagggcaggctgatccagctgagtcgggatggagccacaggccatgttctgctaacagactccgaattcagtatgcaggagcctatggtgcctgccaagctggggacccaggcagagaaggaccggcggctaaagaagaaacaccagctgcttgaagatgcccgcaggaaaggaatgccctttgcccagtgggatggtcctactgtggtctcctggttggagctctgggtggggatgcctgcctggtatgtggcagcctgccgggccaacgtcaagagtggtgccatcatgtccgctctgtcggacacagagatccagcgggagatcggcatcagcaatgccctgcaccggctcaagctccgcctggccattcaggagatggtgtcattgaccagcccctctgccccacccacctccaggacttcttctgggaatgtctgggtcacccatgaagagatggaaactctggaaacatctactaaaacagacagtgaggagggcagctgggctcagaccctggcctatggggacatgaaccatgagtggattgggaatgaatggctacccagcctggggctcccgcagtaccgcagctacttcatggagtgcctggtggacgcccgcatgctggaccacctcaccaagaaggacctgcgggtccacctgaagatggtggacagcttccatcgaaccagtcttcagtatggcatcatgtgtctgaagaggctgaattatgaccggaaggagctggagaagaggcgagaggagagccagcatgagatcaaggatgtgttagtctggaccaacgaccaggtggttcattgggtccagtctattgggctccgggactacgcaggaaacctgcatgagagtggtgtgcatggagccttgctggccctggacgagaacttcgaccacaacacactggccctgatcctccagatccccacacagaacacccaggcacgccaagtgatggaaagagagttcaataacctgttggccttgggcacagaccggaagctggatgacggggatgacaaggtgtttcgccgcgcgccctcctggaggaagcgcttccggccgcgggagcaccacggtcgcggcggcatgctcagcgcttccgcggagaccctcccggcgggcttccgtgtgtccaccctggggaccctgcagcccccaccggccccgccaaagaagatcatgcctgaagctcactcccactatctctacggacacatgctctccgccttccgggactagccatggcccccagggctggcttcctccttctgggtttcacaggctcctctggccctgacccctcttgctcgttccccttccttccgcagctcctagtctcgtccgtgactttccggttgccctggatctcagaatatattcgtccaccccctcggcaccccattaccccgagtcccaccgtgtgtccgttgtaagtccggtggatgtggctggggtttcctggtattgtggaggcacccaggttgtccatgcttgggattctgggggaaggagagaagggcagctcagggtggatgtgaagccacccttcctcttctggacccagcctggtctgcactgcaacctccaccaggaccaggatcctgggccacaggctgggatggtccttccaagaaagggtcatttcagacgcagccctgcttgggctattcaatcttagggtgtctatccacgtctggctgtgccaaatggtctggcagctggttttggcatccccagcatcaccactctcccaacccatcaccgtgactgcagttcctgcccccattctcttggggtcagggaggggctgggaagggctactgaaggccccattctcccacaggatggtgaggctgggaggaggaagactgaggtagagattccaggccctggcataagctgaatcccaaatttgagtttgggaagaaccagagagaaatggatccctgagctctgagccaagggtgaggatggggaaactctaagctcccacctaataagaagcataggcagaccagccagagggagagccaatggcctctggtagccttaagcccaaagggcagtgggaatgtcccctgccccaaccatcgggtggagctcctgctgggctatggggaagggaggttgtgcggatcttgactctagggcagaacagatctaaccatgcattgctagctctgctcccagcatcccttccccttctctcctcctctgcctcacttctttagtaatcccaaccctataaaaatgaacctaatgggtggattgaatatacattgagcccaaagtcaagtttggggaaaaggcagactaaggcctcctttctctgacctcccaggaagaaaatagcttctcctacagtgattcatgtcccaggtccaggaaatccaatgttggtgaaggcagccactctcttgcttgtccccaaatcacctaaccctcatccagggctattttggtgggcagggactgcctcctcccggaattcctaagatccgcccagctgccaccattttcattgctttccccagcagcatgatgggaacccaagctgagggatacaggtcctgatttggtaggaatattattcccaagaaatacccgctcctcacctactccctcatcctaccaaggtgcctgaaaatgttcaagacttatgttcagggtgggatgatggaaccgagggcttcatcaaagtgagaggaaaggaaaagcatctggcatgtgtttcttggataggggccagtgcagtgccatcctacaggtggctggagcagctgctttgcaacctgatcaccttgagttctgagcagggactaggcttgcaggtgagataatgggccagggcacccagtccagaaggagcaatggcacctgggcagtgccagggcttaaagcccgctgctccttttcggtagaggagaggcccatcactggtgtggtggggtgggctctcccttaggcttgggcaaggcagccacctgcccttgctctcccttagtgttccctggcctccctgccatcaggttgctgggagtggagatggagggattattgagcagaaaatgagttggatggagataaacagctcccatccctgggtaatggatggtaagatgatggagattcctaagattggtggagttgggcaatgcatagccatctgactccttcagggtgctcttgatgggctggctgtaagggagactcagtcccagcctctcccctctacaactcctgccactgttggccatgtcgtaaggcagcagctgtgccaggatagctgggtccattcagagcaccttgagaagtgttgcagggaggtgttaagaagagaactctgtgcaaacagtgatggaaggctgttgtcttggtgtatcccttgcctcatagtcaatatattttttttttggcgagtcaccagtgacccgagccctccacaccagcctcctgtatctcatcaggtcccttctcagtactgtatttgctcagtgcatcaggaatgggtgtatgggtgtgtgtgggtgggtgtgagtgtgggtgtgtacgtaccaataaacaacctggttttaagacaatgtacaaa

SEQ ID NO: 171824 - DNA, 2967 bp, Homo sapiens
  Payload ID: 13765
  Gene Symbol: PPFIA4
  Gene Name: protein tyrosine phosphatase, receptor type, f polypeptide (PTPRF), interacting protein (liprin), alpha 4
  ENST ID: ENST00000600426
  CDS Start-End: 1-2860
cgtgactgaactcgaggaggacctgggcacggcccgccgggacctcatcaagtcggaggagctgagcagcaagcatcagcgggacctccgggaggctctggcccagaaggaggacatggaagagcggattactacactggagaagcgctacctggctgctcagcgtgaggcaacatccatccatgacctcaatgacaagctggagaatgagctggccaacaaggagtccctgcaccgccagtgtgaggagaaggcccgacacctgcaggagctgctggaggtggcagagcagaagctgcagcagacgatgcgcaaggcagagacgctgccagaggtggaggctgagctggcccagagaattgcagccctcaccaaggctgaagaacggcatggcaacattgaggagcacctgcggcagctggagggacagctggaggagaagaaccaggagctggcacgggtgcgccagcgggaaaagatgaatgaggaccacaacaagcggctgtcggacacagtggaccggctgctcagcgagtccaacgagcgtctgcagctccacctgaaggagcgcatggctgccctggaggagaagaacacgttgatccaggagttggagagctcccagcggcagattgaggagcagcaccaccacaagggccgcctgtctgaagagattgagaagctgcgccaagaggtggaccagctgaagggccgaggggggccgtttgtggatggcgtccactccaggtcgcacatgggcagtgcagcagacgtgcggttctccctgggcacaaccacacacgcacccccaggcgtgcatcgccgctactcggcattgagggaagagtctgccaaggactgggagacttctccactgcctgggatgctggccccggcagctggccctgcctttgacagtgaccctgagatctccgacgtggatgaggatgagccagggggtctggtgggctctgcggatgttgtctcccccagcggccactcagatgcccagaccctggccatgatgctgcaggagcagctggatgccatcaatgaggaaatcaggatgattcaggaagagaaggagtccacggagctccgcgcggaggagattgagacgcgtgtaaccagtggcagcatggaagccctaaacctgaagcagctgcgcaagcgtggttccatccccacctctctgacggccctgtccctggccagcgcgtccccaccactcagcggccgctccacacctaagctcacctcccgcagtgctgcccaggacctggaccgaatgggggtcatgaccctgcccagtgacttaagaaagcataggaggaagctgctgtcgccagtgtctcgggaagagaaccgagaggataaagccaccataaaatgtgagacttctcctccttcctcacccaggacgctgcggctagagaagcttggccacccagccctgagccaggaagaaggcaagagtgccttggaggatcagggcagcaaccccagcagcagcaacagcagccaggactccctgcacaagggcgccaagcgcaagggcatcaagtcgtccattggccgcctgtttgggaagaaggagaagggcaggctgatccagctgagtcgggatggagccacaggccatgttctgctaacagactccgaattcagtatgcaggagcctatggtgcctgccaagctggggacccaggcagagaaggaccggcggctaaagaagaaacaccagctgcttgaagatgcccgcaggaaaggaatgccctttgcccagtgggatggtcctactgtggtctcctggttggagctctgggtggggatgcctgcctggtatgtggcagcctgccgggccaacgtcaagagtggtgccatcatgtccgctctgtcggacacagagatccagcgggagatcggcatcagcaatgccctgcaccggctcaagctccgcctggccattcaggagatggtgtcattgaccagcccctctgccccacccacctccaggacttcttctgggaatgtctgggtcacccatgaagagatggaaactctggaaacatctactaaaacagacagtgaggagggcagctgggctcagaccctggcctatggggacatgaaccatgagtggattgggaatgaatggctacccagcctggggctcccgcagtaccgcagctacttcatggagtgcctggtggacgcccgcatgctggaccacctcaccaagaaggacctgcgggtccacctgaagatggtggacagcttccatcgaaccagtcttcagtatggcatcatgtgtctgaagaggctgaattatgaccggaaggagctggagaagaggcgagaggagagccagcatgagatcaaggatgtgttagtctggaccaacgaccaggtggttcattgggtccagtctattgggctccgggactacgcaggaaacctgcatgagagtggtgtgcatggagccttgctggccctggacgagaacttcgaccacaacacactggccctgatcctccagatccccacacagaacacccaggcacgccaagtgatggaaagagagttcaataacctgttggccttgggcacagaccggaagctggatgacggggatgacaaggtgtttcgccgcgcgccctcctggaggaagcgcttccggccgcgggagcaccacggtcgcggcggcatgctcagcgcttccgcggagaccctcccggcgggcttccgtgtgtccaccctggggaccctgcagcccccaccggccccgccaaagaagatcatgcctgaagctcactcccactatctctacggacacatgctctccgccttccgggactagccatggcccccagggctggcttcctccttctgggtttcacaggctcctctggccctgacccctcttgctcgttccccttccttccgcagctcctagtctcgtccgtg

SEQ ID NO: 171825 - DNA, 3178 bp, Homo sapiens
  Payload ID: 13765
  Gene Symbol: PPFIA4
  Gene Name: protein tyrosine phosphatase, receptor type, f polypeptide (PTPRF), interacting protein (liprin), alpha 4
  Uniprot ID: O75335
  ENST ID: ENST00000599966
  CDS Start-End: 537-2615
aggggtatgcctggcttgaattttaaccagggactcagtccagattatggggagacccgaggaaaagtgctgggtagaagaccaaaaaacaaagaccctcagagtgaaaagggcctctagacatcatcccttccaacatctcccagtgcctggagccctcctgcgccacgtgtgtcagatggccggagagcctctgctcgaatacctctttgatggggagctcaactttttaaaagccaccagttgcatcgtaagccaactcttgccattagaagatccttcttatgccagacggaaaaccgctctctggaactttctcccctggctcattctgacccctggagcaccagggcatacgtctgctctcttgcttacacggcagcccttcagacatttgtgacagctctgtgtcctgctaagatgtctcttctctgagctgaagatcccttgactctttgggcccactgggtgtgagctgggggtctcagtcctcagggcctgtcttttctctcccccatcaccgctcaaggtcgcacatgggcagtgcagcagacgtgcggttctccctgggcacaaccacacacgcacccccaggcgtgcatcgccgctactcggcattgagggaagagtctgccaaggactgggagacttctccactgcctgggatgctggccccggcagctggccctgcctttgacagtgaccctgagatctccgacgtggatgaggatgagccagggggtctggtgggctctgcggatgttgtctcccccagcggccactcagatgcccagaccctggccatgatgctgcaggagcagctggatgccatcaatgaggaaatcaggatgattcaggaagagaaggagtccacggagctccgcgcggaggagattgagacgcgtgtaaccagtggcagcatggaagccctaaacctgaagcagctgcgcaagcgtggttccatccccacctctctgacggccctgtccctggccagcgcgtccccaccactcagcggccgctccacacctaagctcacctcccgcagtgctgcccaggacctggaccgaatgggggtcatgaccctgcccagtgacttaagaaagcataggaggaagctgctgtcgccagtgtctcgggaagagaaccgagaggataaagccaccataaaatgtgagacttctcctccttcctcacccaggacgctgcggctagagaagcttggccacccagccctgagccaggaagaaggcaagagtgccttggaggatcagggcagcaaccccagcagcagcaacagcagccaggactccctgcacaagggcgccaagcgcaagggcatcaagtcgtccattggccgcctgtttgggaagaaggagaagggcaggctgatccagctgagtcgggatggagccacaggccatgttctgctaacagactccgaattcagtatgcaggagcctatggtgcctgccaagctggggacccaggcagagaaggaccggcggctaaagaagaaacaccagctgcttgaagatgcccgcaggaaaggaatgccctttgcccagtgggatggtcctactgtggtctcctggttggagctctgggtggggatgcctgcctggtatgtggcagcctgccgggccaacgtcaagagtggtgccatcatgtccgctctgtcggacacagagatccagcgggagatcggcatcagcaatgccctgcaccggctcaagctccgcctggccattcaggagatggtgtcattgaccagcccctctgccccacccacctccaggacttcttctgggaatgtctgggtcacccatgaagagatggaaactctggaaacatctactaaaacaaccctggcctatggggacatgaaccatgagtggattgggaatgaatggctacccagcctggggctcccgcagtaccgcagctacttcatggagtgcctggtggacgcccgcatgctggaccacctcaccaagaaggacctgcgggtccacctgaagatggtggacagcttccatcgaaccagtcttcagtatggcatcatgtgtctgaagaggctgaattatgaccggaaggagctggagaagaggcgagaggagagccagcatgagatcaaggatgtgttagtctggaccaacgaccaggtggttcattgggtccagtctattgggctccgggactacgcaggaaacctgcatgagagtggtgtgcatggagccttgctggccctggacgagaacttcgaccacaacacactggccctgatcctccagatccccacacagaacacccaggcacgccaagtgatggaaagagagttcaataacctgttggccttgggcacagaccggaagctggatgacggggatgacaaggtgtttcgccgcgcgccctcctggaggaagcgcttccggccgcgggagcaccacggtcgcggcggcatgctcagcgcttccgcggagaccctcccggcgggcttccgtgtgtccaccctggggaccctgcagcccccaccggccccgccaaagaagatcatgcctgaagctcactcccactatctctacggacacatgctctccgccttccgggactagccatggcccccagggctggcttcctccttctgggtttcacaggctcctctggccctgacccctcttgctcgttccccttccttccgcagctcctagtctcgtccgtgactttccggttgccctggatctcagaatatattcgtccaccccctcggcaccccattaccccgagtcccaccgtgtgtccgttgtaagtccggtggatgtggctggggtttcctggtattgtggaggcacccaggttgtccatgcttgggattctgggggaaggagagaagggcagctcagggtggatgtgaagccacccttcctcttctggacccagcctggtctgcactgcaacctccaccaggaccaggatcctgggccacaggctgggatggtccttccaagaaagggtcatttcagacgcagccctgcttgggctattcaatcttagggtgtctatccacgtctggctgtgccaaatggtctggcagctggttttggcatccccagcatcaccactctcccaacccatcaccgtgactgcagttcctgcccccattctcttggggtcaggg

SEQ ID NO: 171826 - DNA, 573 bp, Homo sapiens
  Payload ID: 13765
  Gene Symbol: PPFIA4
  Gene Name: protein tyrosine phosphatase, receptor type, f polypeptide (PTPRF), interacting protein (liprin), alpha 4
  ENST ID: ENST00000599514
  CDS Start-End: 1-573
tgctaaggactgggagacttctccactgcctgggatgctggccccggcagctggccctgcctttgacagtgaccctgagatctccgacgtggatgaggatgagccagggggtctggtgggctctgcggatgttgtctcccccagcggccactcagatgcccagaccctggccatgatgctgcaggagcagctggatgccatcaatgaggaaatcaggatgattcaggaagagaaggagtccacggagctccgcgcggaggagattgagacgcgtgtaaccagtggcagcatggaagccctaaacctgaagcagctgcgcaagcgtggttccatccccacctctctgacggccctgtccctggccagcgcgtccccaccactcagcggccgctccacacctaagctcacctcccgcagtgctgcccaggacctggaccgaatgggggtcatgaccctgcccagtgacttaagaaagcataggaggaagctgctggacgctgcggctagagaagcttggccacccagccctgagccaggaagaaggcaagagtgccttggaggatcagggcagca

SEQ ID NO: 171827 - DNA, 4650 bp, Homo sapiens
  Payload ID: 13766
  Gene Symbol: PTPRG
  Gene Name: protein tyrosine phosphatase, receptor type, G
  Uniprot ID: P23470
  ENST ID: ENST00000295874
  CDS Start-End: 378-4628
ctcaagttggggatcctcggctgctcgccgccgccgcccgcggtccctgcctgccccaggcccggggcatcgccgccggccgccgactccgcgccctgcccgatcggctctctcctttttaaacggaaagcagcctttctccgccgagaggatcgtccccagcgtggctctgcgttcccggtcactttttgagattttccggggggcgctcggcggcttcccggattccaaggggactcgggccgccgagcgcggggggcccgtggagcgggcgagccggggaagcgccccggcttagcggaggctcgcacggaggcaagaacttattcaacaagtttacctccctgctttcctcttttcgatgtgcgttttcggacatgcggaggttactggaaccgtgttggtggattttgttcctgaaaatcaccagttccgtgctccattatgtcgtgtgcttccccgcgttgacagaaggctacgttggggccctgcacgagaatagacacggcagcgcagtgcagatccgcaggcgcaaggcttcaggcgacccgtactgggcctactctggtgcctatggtcctgagcactgggtcacgtctagtgtcagctgtgggggccgtcaccagtctcctattgacattttagaccagtatgcgcgtgttggggaagaataccaggaactgcaactcgatggcttcgacaatgagtcttctaacaaaacctggatgaaaaacacagggaaaacagtcgccatccttctgaaagacgactattttgtcagtggagctggtctacctggcagattcaaagctgagaaggtggaatttcactggggccacagcaatggctcagcgggctctgaacacagcatcaatggcaggaggtttcctgttgagatgcagattttcttttacaatccagatgactttgacagctttcaaaccgcaatttctgagaacagaataatcggagccatggccatattttttcaagtcagtccgagggacaattctgcactggatcctattatccacgggttgaagggtgtcgtacatcatgagaaggagacctttctggatcctttcgtcctccgggacctcctgcctgcatccctgggcagctattatcggtacacaggttccttgaccacaccaccgtgtagcgaaatagtggagtggatagtcttccggagacccgtccccatctcttaccatcagcttgaggctttttattccatcttcaccacggagcagcaagaccatgtcaagtcggtggagtatctgagaaataactttcgaccacagcagcgtctgcatgacagggtggtgtccaagtccgccgtccgtgactcctggaaccacgacatgacagacttcttagaaaacccactggggacagaagcctctaaagtttgcagctctccacccatccacatgaaggtgcagcctctgaaccagacggcactgcaggtgtcctggagccagccggagactatctaccacccacccatcatgaactacatgatctcctacagctggaccaagaatgaggacgagaaggagaagacgtttacaaaggacagcgacaaagacttgaaagccaccattagccatgtctcacccgatagcctttacctgttccgagtccaggccgtgtgtcggaacgacatgcgcagcgactttagccagacgatgctgtttcaagctaataccactcgaatattccaagggaccagaatagtgaaaacaggagtgcccacagcgtctcctgcctcttcagccgacatggcccccatcagctcggggtcttctacctggacgtcctctggcatcccattctcatttgtttccatggcaactgggatgggcccctcctccagtggcagccaggccacagtggcctcggtggtcaccagcacgctgctcgccggcctggggttcggcggtggtggcatctcctctttccccagcactgtgtggcccacgcgcctcccgacggccgcctcagccagcaagcaggcggctaggccagtcctagccaccacagaggccttggcttctccagggcccgatggtgattcgtcaccaaccaaggacggcgagggcaccgaggaaggagagaaggatgagaaaagcgagagtgaggatggggagcgggagcacgaggaggatggagagaaggactccgaaaagaaggagaagagtggggtgacccacgctgccgaggagcggaatcagacggagcccagccccacaccctcgtctcctaacaggactgccgagggagggcatcagactatacctgggcatgagcaggatcacactgccgtccccacagaccagacgggcggaaggagggatgccggcccaggcctggaccccgacatggtcacctccacccaagtgccccccaccgccacagaggagcagtatgcagggagtgatcccaagaggcccgaaatgccatctaaaaagcctatgtcccgcggggaccgattttctgaagacagcagatttatcactgttaatccagcggaaaaaaacacctctggaatgataagccgccctgctccagggaggatggagtggatcatccctctgattgtggtatcagccttgaccttcgtgtgcctcatccttctcattgctgtgctcgtttactggagaaaatgttttcagactgctcatttctatgtggaagacagcagttcacctcgagtggtccctaatgaaagtatccctattattcctattccggatgacatggaagccattcctgtcaaacagtttgtcaaacacatcggtgagctctattctaataaccagcatgggttctctgaggattttgaggaagtccagcgctgtactgctgatatgaacatcactgcagagcattccaatcatccagaaaacaagcacaaaaacagatacatcaacattttagcatatgatcacagtagggtgaagttaagacctttaccaggaaaagactctaagcacagcgactacattaatgcaaactatgttgatggttacaacaaagcaaaagcctacattgccacccaaggacctttgaagtctacatttgaagatttctggaggatgatttgggaacaaaacactggaatcattgtgatgattacgaaccttgtggaaaaaggaagacgaaaatgtgatcagtattggccaacagagaacagtgaggaatatggaaacattattgtcacgctgaagagcacaaaaatacatgcctgctacactgttcgtcgtttttcaatcagaaatacaaaagtgaaaaagggtcagaagggaaatcccaagggtcgtcagaatgaaagggtagtgatccagtatcactatacacagtggcctgacatgggagttcccgagtatgcccttccagtactgactttcgtgaggagatcctcagcagctcggatgccagaaacgggccctgtgttggtgcactgcagtgctggtgtgggcagaacaggcacctatattgtaatagacagcatgctgcaacagataaaagacaaaagcacagttaacgtcctgggattcctgaagcatatcaggacacagcgtaactacctcgtccagactgaggagcagtacattttcatccatgatgccttgttggaagccattcttggaaaggagactgaagtatcttcaaatcagctgcacagctatgttaacagcatccttataccaggagtaggaggaaagacacgactggaaaagcaattcaagctggtcacacagtgtaatgcaaaatatgtggaatgtttcagtgctcagaaagagtgtaacaaagaaaagaacagaaactcttcagttgtgccatctgagcgtgctcgagtgggtcttgcaccattgcctggaatgaaaggaacagattacattaatgcttcttatatcatgggctattataggagcaatgaatttattataactcagcatcctctgccacatactacgaaagatttctggcgaatgatttgggatcataacgcacagatcattgtcatgctgccagacaaccagagcttggcagaagatgagtttgtgtactggccaagtcgagaagaatccatgaactgtgaggcctttaccgtcacccttatcagcaaagacagactgtgcctctctaatgaagaacaaattatcatccatgactttatccttgaagctacacaggatgactatgtcttagaagttcggcactttcagtgtcccaaatggcctaacccagatgcccccataagtagtacctttgaacttatcaacgtcatcaaggaagaggccttaacaagggatggtcccaccattgttcatgatgagtatggagcagtttcagcaggaatgttatgtgcccttaccaccctgtcccagcaactggagaatgaaaatgctgtggatgttttccaggttgcaaaaatgatcaatcttatgaggcctggagtattcacagacattgaacaataccagttcatctataaagcaatgcttagcttggtcagcactaaagaaaatggaaatggtcccatgacagtagacaaaaatggtgctgttcttattgcagatgaatcagaccctgctgagagcatggagtccctagtgtgactggaatcctgaaagggcactt

SEQ ID NO: 171828 - DNA, 9021 bp, Homo sapiens
  Payload ID: 13766
  Gene Symbol: PTPRG
  Gene Name: protein tyrosine phosphatase, receptor type, G
  Uniprot ID: P23470
  ENST ID: ENST00000474889
  CDS Start-End: 378-4715
ctcaagttggggatcctcggctgctcgccgccgccgcccgcggtccctgcctgccccaggcccggggcatcgccgccggccgccgactccgcgccctgcccgatcggctctctcctttttaaacggaaagcagcctttctccgccgagaggatcgtccccagcgtggctctgcgttcccggtcactttttgagattttccggggggcgctcggcggcttcccggattccaaggggactcgggccgccgagcgcggggggcccgtggagcgggcgagccggggaagcgccccggcttagcggaggctcgcacggaggcaagaacttattcaacaagtttacctccctgctttcctcttttcgatgtgcgttttcggacatgcggaggttactggaaccgtgttggtggattttgttcctgaaaatcaccagttccgtgctccattatgtcgtgtgcttccccgcgttgacagaaggctacgttggggccctgcacgagaatagacacggcagcgcagtgcagatccgcaggcgcaaggcttcaggcgacccgtactgggcctactctggtgcctatggtcctgagcactgggtcacgtctagtgtcagctgtgggggccgtcaccagtctcctattgacattttagaccagtatgcgcgtgttggggaagaataccaggaactgcaactcgatggcttcgacaatgagtcttctaacaaaacctggatgaaaaacacagggaaaacagtcgccatccttctgaaagacgactattttgtcagtggagctggtctacctggcagattcaaagctgagaaggtggaatttcactggggccacagcaatggctcagcgggctctgaacacagcatcaatggcaggaggtttcctgttgagatgcagattttcttttacaatccagatgactttgacagctttcaaaccgcaatttctgagaacagaataatcggagccatggccatattttttcaagtcagtccgagggacaattctgcactggatcctattatccacgggttgaagggtgtcgtacatcatgagaaggagacctttctggatcctttcgtcctccgggacctcctgcctgcatccctgggcagctattatcggtacacaggttccttgaccacaccaccgtgtagcgaaatagtggagtggatagtcttccggagacccgtccccatctcttaccatcagcttgaggctttttattccatcttcaccacggagcagcaagaccatgtcaagtcggtggagtatctgagaaataactttcgaccacagcagcgtctgcatgacagggtggtgtccaagtccgccgtccgtgactcctggaaccacgacatgacagacttcttagaaaacccactggggacagaagcctctaaagtttgcagctctccacccatccacatgaaggtgcagcctctgaaccagacggcactgcaggtgtcctggagccagccggagactatctaccacccacccatcatgaactacatgatctcctacagctggaccaagaatgaggacgagaaggagaagacgtttacaaaggacagcgacaaagacttgaaagccaccattagccatgtctcacccgatagcctttacctgttccgagtccaggccgtgtgtcggaacgacatgcgcagcgactttagccagacgatgctgtttcaagctaataccactcgaatattccaagggaccagaatagtgaaaacaggagtgcccacagcgtctcctgcctcttcagccgacatggcccccatcagctcggggtcttctacctggacgtcctctggcatcccattctcatttgtttccatggcaactgggatgggcccctcctccagtggcagccaggccacagtggcctcggtggtcaccagcacgctgctcgccggcctggggttcggcggtggtggcatctcctctttccccagcactgtgtggcccacgcgcctcccgacggccgcctcagccagcaagcaggcggctaggccagtcctagccaccacagaggccttggcttctccagggcccgatggtgattcgtcaccaaccaaggacggcgagggcaccgaggaaggagagaaggatgagaaaagcgagagtgaggatggggagcgggagcacgaggaggatggagagaaggactccgaaaagaaggagaagagtggggtgacccacgctgccgaggagcggaatcagacggagcccagccccacaccctcgtctcctaacaggactgccgagggagggcatcagactatacctgggcatgagcaggatcacactgccgtccccacagaccagacgggcggaaggagggatgccggcccaggcctggaccccgacatggtcacctccacccaagtgccccccaccgccacagaggagcagtatgcagggagtgatcccaagaggcccgaaatgccatctaaaaagcctatgtcccgcggggaccgattttctgaagacagcagatttatcactgttaatccagcggaaaaaaacacctctggaatgataagccgccctgctccagggaggatggagtggatcatccctctgattgtggtatcagccttgaccttcgtgtgcctcatccttctcattgctgtgctcgtttactggagagggtgtaacaaaataaagtccaagggctttcccagacgtttccgtgaagtgccttcttctggggagagaggagagaaggggagcagaaaatgttttcagactgctcatttctatgtggaagacagcagttcacctcgagtggtccctaatgaaagtatccctattattcctattccggatgacatggaagccattcctgtcaaacagtttgtcaaacacatcggtgagctctattctaataaccagcatgggttctctgaggattttgaggaagtccagcgctgtactgctgatatgaacatcactgcagagcattccaatcatccagaaaacaagcacaaaaacagatacatcaacattttagcatatgatcacagtagggtgaagttaagacctttaccaggaaaagactctaagcacagcgactacattaatgcaaactatgttgatggttacaacaaagcaaaagcctacattgccacccaaggacctttgaagtctacatttgaagatttctggaggatgatttgggaacaaaacactggaatcattgtgatgattacgaaccttgtggaaaaaggaagacgaaaatgtgatcagtattggccaacagagaacagtgaggaatatggaaacattattgtcacgctgaagagcacaaaaatacatgcctgctacactgttcgtcgtttttcaatcagaaatacaaaagtgaaaaagggtcagaagggaaatcccaagggtcgtcagaatgaaagggtagtgatccagtatcactatacacagtggcctgacatgggagttcccgagtatgcccttccagtactgactttcgtgaggagatcctcagcagctcggatgccagaaacgggccctgtgttggtgcactgcagtgctggtgtgggcagaacaggcacctatattgtaatagacagcatgctgcaacagataaaagacaaaagcacagttaacgtcctgggattcctgaagcatatcaggacacagcgtaactacctcgtccagactgaggagcagtacattttcatccatgatgccttgttggaagccattcttggaaaggagactgaagtatcttcaaatcagctgcacagctatgttaacagcatccttataccaggagtaggaggaaagacacgactggaaaagcaattcaagctggtcacacagtgtaatgcaaaatatgtggaatgtttcagtgctcagaaagagtgtaacaaagaaaagaacagaaactcttcagttgtgccatctgagcgtgctcgagtgggtcttgcaccattgcctggaatgaaaggaacagattacattaatgcttcttatatcatgggctattataggagcaatgaatttattataactcagcatcctctgccacatactacgaaagatttctggcgaatgatttgggatcataacgcacagatcattgtcatgctgccagacaaccagagcttggcagaagatgagtttgtgtactggccaagtcgagaagaatccatgaactgtgaggcctttaccgtcacccttatcagcaaagacagactgtgcctctctaatgaagaacaaattatcatccatgactttatccttgaagctacacaggatgactatgtcttagaagttcggcactttcagtgtcccaaatggcctaacccagatgcccccataagtagtacctttgaacttatcaacgtcatcaaggaagaggccttaacaagggatggtcccaccattgttcatgatgagtatggagcagtttcagcaggaatgttatgtgcccttaccaccctgtcccagcaactggagaatgaaaatgctgtggatgttttccaggttgcaaaaatgatcaatcttatgaggcctggagtattcacagacattgaacaataccagttcatctataaagcaatgcttagcttggtcagcactaaagaaaatggaaatggtcccatgacagtagacaaaaatggtgctgttcttattgcagatgaatcagaccctgctgagagcatggagtccctagtgtgactggaatcctgaaagggcacttaatttgtaaacttctgaagactgagaacttttttgaggccttttttgccagactctaggttatacaataacccagttacttttttacactgataaaagttttgatatttattttttgccattttatgtcttaatggtatcctactgagcatttgcacctctgttcatttcacacagtgaaacgcaattttacctagtttgcactatatgatcagtgttactgcctataatcttatacaacagcaaaccctgatgtgacattccatgacgacatacatgctacttttttttagttcaatacagtgaaggtctttgttatgacagtgaatattgcttttattattattattgctgaagtggttgcattctactagcaggcaatgctgtacttttcttcagtcctcctctcctttttattttaggcactgttcaatactgtatgccttctgtattttaatggagtggatagcattgttttcttttacagactagcaggctactgggacctaaaaaggtctgttaatgtcatggccttgaaacagttccatttatgctggttaagagatcccttaagaagttagaaggcttaagaactgcttcatgtgaacatcccttattagttacaaagttatattcacagttttttaaaaatgtgtcaaaataaaggataactctgtattacagctttcacagtagctatgtggacaatgtgttatttccattttgactctctaaaatagctacatcctaaaatcagggctatctttaacaatagcaagatagcaatattatatacaactcagttatgagaccctttagttattctccattaatgcttcttagtttgtaataccatacctcacagtaggtagaagaatgaaaacttctgcaggtgtgtaattttgaaactagtcctctaaaaattccctattactcctatagcaatctaataaaaactacctacatagttactgttttctttccttctttgccaaatgttttataataaatctcttaattacatacatttttctacttaagattaaattggaaatactgtcttagcaaaagtcttgggactatctaaactcccacacatagataaatctgatttggagagagaaatttaaaatatttaattaaaggtgatacccacattttcaagtttttaaaagagggagatggctttgtatgcttttgtgtagtttagaacagatacacattagtaaaagataccaataatcattagagctcaaggaagttattaggtgcagcctctggagccatactcacgctgcagtgcataatgggaaaattaggagcattaataagaaatttcagtagtgtttgtaaggaaaataagctacttactgagatctgtttcttctattgcatgtttgcttttgagggacagcttctgtcaaaagtgaaatcatcaccagaactgggcctgttaggaagaatagggttttatttactttttatgtcaattaacttcaacaaaaaggccacgctggctgctgtcatgccatctgggtatgcattaaacattaatgatgatcagcactgaggttctatttatcttgatttggctttcataaagtttgtcagaatggtgctggaggaccagaagtgctaaggagaaagaagctatgggccaagttaaagaatttgaatgcaaaggccaggtcaatggagttttcataaactacataatttaccagggtttatctcatcttctcaatacatagatttaacaacatggaatactctgcttttcaagagctgcgtaagctagtcctgagataagatgttcaagagagcatgctaagttgcatgtgctagatgagagacacctttacagcccctccgctccaaccagaggtgacacaggaagctctgtaaagttcaagtaaagcttgaacacaggaacactacaactgccagatgctgaggagaatcaggaaagcaatgagctagactctttttttagtcaattaagtgggttgttttagatgtatagagtattgatatgagttaacactttttagtagatggcaaagtgggcttgatgttcaaaagtaatgttcgagttagggttcatggtccctttctcagtaattttttcttaataaaagtaaacactggttcaaagacaaatagcaagtattccctcctgtgctatttatagagggctcaattcgtagaaaggcataccctccaatgcaattctgtggctgtcccttacagtggtttcagaatcacgaaaaaacagctagtaaataggatagaaacaataaaagaaagagtttagaagttccctgtgagcaatctgtgtgtcttcagcgagcttgaaccaaagtcttcatatcctgacccactgaattataagcaattgctacttgcccatcttgccaaagtagtccaaacacacttcaatgaggacagttatatttagcaggtcctcacccctgcaagagacagcatatcctcactattattattcatgtgttattggcaaaaacatagcttgcatctttccagaggcagagtttcaaagacagggttttctttgagacataagcacattgcttaagtacataacaaggttattaacacttgcactcaggggaaaggaaatagctattgcaaattaatgtgtgcaacttaataaaataagctgtttgtgtatatgaatttagctctaggtaagcaaaatgcacacatcatataaaaataaattgcaatgatcagaccaagtggctgtgctggacatcaaagaaaagacatgctgttgccatcaggagaactctttcttatatgcgatagccaagatatcttctttaatatgaaaaaagttaatttctgaatttcaaaaagagtaagattagctaattggtcttcctaatttttatgcctttagagtttttagtctattcaagtagaagagtccagcgaggccaaagaagggttacggtgttcaagttctggttgttggagtttttagcccagagtgacatactgaaatcagtaaataattattttataatgacacagcacaactgccttgttatgaatttttcttaaatgcatatatactgtatttaaaattaaaatatagataccaatttaccaaagatacatattactaattctaagcaaaactaaaaaaaaaacccaactcatcataatttaagaatcaaaatgtagtttgtcttaagaatttagtggttatactggaaatgcattttcaactcctatgttctaaagtttatgttcaaatggtgccagtgaatttttatatgaagggaaaatgcctgctttttttttttttttaacagatgtaatttcacttaaccctttgcgctttcccttagttgtcatttaacatacaatactggctttacttatctctagaaagaagaaggcatgctacaaataggaaggaattgtaataatgatatttggcctctactttgtcttagctgttaaactgtttttagtatttttgttaaatatttgcaaagggaagcattttctacagaggataattaatttcaagaaaaatatcttgagttttaagaaataaacatctccagaaaaggagaaagtcgattttataaaatgtcgcaactctccaacatttggggtagtgactccttttttgttaggacatttgaaactagcaagcagccattgtttctaaagaattctggcttcacattgactcatgtttctttcactccattttgaaatagctaaaaatcattaaaactgtaaatattttgttgcttgggtaagcatcttctgggaactttgtatctatggtatataatcatagaattttatattttcatataaagctaatttttttctagtttcaactccgtcatagttttttttcctttttgtggtggatatgtgaattcaactttctgtgtattgaagtagcaaaaaccatctttacattccaaaagaatccaacatgtgttatttctttgaggcagtgattgtgaaagttgggttttctttttaattccattgaccatttgtgcaataggaattagacataattagtcactgaaaacattcgtcacattgacccatttggaaaaagtgtgctttttttttttttttaaatttgttcagggggaggggttttgtaacctgaaatttttccctttttcttctgtttaaactatatcaaatcattctattatagtgttatttaatatgtaaattgtattgctatacataaaataaagtatggtttttgatgtattca

SEQ ID NO: 171829 - DNA, 5656 bp, Homo sapiens
  Payload ID: 13766
  Gene Symbol: PTPRG
  Gene Name: protein tyrosine phosphatase, receptor type, G
  ENST ID: ENST00000618938
  CDS Start-End: 1-4065
acaggtgcctatggtcctgagcactgggtcacgtctagtgtcagctgtgggggccgtcaccagtctcctattgacattttagaccagtatgcgcgtgttggggaagaataccaggaactgcaactcgatggcttcgacaatgagtcttctaacaaaacctggatgaaaaacacagggaaaacagtcgccatccttctgaaagacgactattttgtcagtggagctggtctacctggcagattcaaagctgagaaggtggaatttcactggggccacagcaatggctcagcgggctctgaacacagcatcaatggcaggaggtttcctgttgagatgcagattttcttttacaatccagatgactttgacagctttcaaaccgcaatttctgagaacagaataatcggagccatggccatattttttcaagtcagtccgagggacaattctgcactggatcctattatccacgggttgaagggtgtcgtacatcatgagaaggagacctttctggatcctttcgtcctccgggacctcctgcctgcatccctgggcagctattatcggtacacaggttccttgaccacaccaccgtgtagcgaaatagtggagtggatagtcttccggagacccgtccccatctcttaccatcagcttgaggctttttattccatcttcaccacggagcagcaagaccatgtcaagtcggtggagtatctgagaaataactttcgaccacagcagcgtctgcatgacagggtggtgtccaagtccgccgtccgtgactcctggaaccacgacatgacagacttcttagaaaacccactggggacagaagcctctaaagtttgcagctctccacccatccacatgaaggtgcagcctctgaaccagacggcactgcaggtgtcctggagccagccggagactatctaccacccacccatcatgaactacatgatctcctacagctggaccaagaatgaggacgagaaggagaagacgtttacaaaggacagcgacaaagacttgaaagccaccattagccatgtctcacccgatagcctttacctgttccgagtccaggccgtgtgtcggaacgacatgcgcagcgactttagccagacgatgctgtttcaagctaataccactcgaatattccaagggaccagaatagtgaaaacaggagtgcccacagcgtctcctgcctcttcagccgacatggcccccatcagctcggggtcttctacctggacgtcctctggcatcccattctcatttgtttccatggcaactgggatgggcccctcctccagtggcagccaggccacagtggcctcggtggtcaccagcacgctgctcgccggcctggggttcggcggtggtggcatctcctctttccccagcactgtgtggcccacgcgcctcccgacggccgcctcagccagcaagcaggcggctaggccagtcctagccaccacagaggccttggcttctccagggcccgatggtgattcgtcaccaaccaaggacggcgagggcaccgaggaaggagagaaggatgagaaaagcgagagtgaggatggggagcgggagcacgaggaggatggagagaaggactccgaaaagaaggagaagagtggggtgacccacgctgccgaggagcggaatcagacggagcccagccccacaccctcgtctcctaacaggactgccgagggagggcatcagactatacctgggcatgagcaggatcacactgccgtccccacagaccagacgggcggaaggagggatgccggcccaggcctggaccccgacatggtcacctccacccaagtgccccccaccgccacagaggagcagtatgcagggagtgatcccaagaggcccgaaatgccatctaaaaagcctatgtcccgcggggaccgattttctgaagacagcagatttatcactgttaatccagcggaaaaaaacacctctggaatgataagccgccctgctccagggaggatggagtggatcatccctctgattgtggtatcagccttgaccttcgtgtgcctcatccttctcattgctgtgctcgtttactggagaaaatgttttcagactgctcatttctatgtggaagacagcagttcacctcgagtggtccctaatgaaagtatccctattattcctattccggatgacatggaagccattcctgtcaaacagtttgtcaaacacatcggtgagctctattctaataaccagcatgggttctctgaggattttgaggaagtccagcgctgtactgctgatatgaacatcactgcagagcattccaatcatccagaaaacaagcacaaaaacagatacatcaacattttagcatatgatcacagtagggtgaagttaagacctttaccaggaaaagactctaagcacagcgactacattaatgcaaactatgttgatggttacaacaaagcaaaagcctacattgccacccaaggacctttgaagtctacatttgaagatttctggaggatgatttgggaacaaaacactggaatcattgtgatgattacgaaccttgtggaaaaaggaagacgaaaatgtgatcagtattggccaacagagaacagtgaggaatatggaaacattattgtcacgctgaagagcacaaaaatacatgcctgctacactgttcgtcgtttttcaatcagaaatacaaaagtgaaaaagggtcagaagggaaatcccaagggtcgtcagaatgaaagggtagtgatccagtatcactatacacagtggcctgacatgggagttcccgagtatgcccttccagtactgactttcgtgaggagatcctcagcagctcggatgccagaaacgggccctgtgttggtgcactgcagtgctggtgtgggcagaacaggcacctatattgtaatagacagcatgctgcaacagataaaagacaaaagcacagttaacgtcctgggattcctgaagcatatcaggacacagcgtaactacctcgtccagactgaggagcagtacattttcatccatgatgccttgttggaagccattcttggaaaggagactgaagtatcttcaaatcagctgcacagctatgttaacagcatccttataccaggagtaggaggaaagacacgactggaaaagcaattcaagctggtcacacagtgtaatgcaaaatatgtggaatgtttcagtgctcagaaagagtgtaacaaagaaaagaacagaaactcttcagttgtgccatctgagcgtgctcgagtgggtcttgcaccattgcctggaatgaaaggaacagattacattaatgcttcttatatcatgggctattataggagcaatgaatttattataactcagcatcctctgccacatactacgaaagatttctggcgaatgatttgggatcataacgcacagatcattgtcatgctgccagacaaccagagcttggcagaagatgagtttgtgtactggccaagtcgagaagaatccatgaactgtgaggcctttaccgtcacccttatcagcaaagacagactgtgcctctctaatgaagaacaaattatcatccatgactttatccttgaagctacacaggatgactatgtcttagaagttcggcactttcagtgtcccaaatggcctaacccagatgcccccataagtagtacctttgaacttatcaacgtcatcaaggaagaggccttaacaagggatggtcccaccattgttcatgatgagtatggagcagtttcagcaggaatgttatgtgcccttaccaccctgtcccagcaactggagaatgaaaatgctgtggatgttttccaggttgcaaaaatgatcaatcttatgaggcctggagtattcacagacattgaacaataccagttcatctataaagcaatgcttagcttggtcagcactaaagaaaatggaaatggtcccatgacagtagacaaaaatggtgctgttcttattgcagatgaatcagaccctgctgagagcatggagtccctagtgtgactggaatcctgaaagggcacttaatttgtaaacttctgaagactgagaacttttttgaggccttttttgccagactctaggttatacaataacccagttacttttttacactgataaaagttttgatatttattttttgccattttatgtcttaatggtatcctactgagcatttgcacctctgttcatttcacacagtgaaacgcaattttacctagtttgcactatatgatcagtgttactgcctataatcttatacaacagcaaaccctgatgtgacattccatgacgacatacatgctacttttttttagttcaatacagtgaaggtctttgttatgacagtgaatattgcttttattattattattgctgaagtggttgcattctactagcaggcaatgctgtacttttcttcagtcctcctctcctttttattttaggcactgttcaatactgtatgccttctgtattttaatggagtggatagcattgttttcttttacagactagcaggctactgggacctaaaaaggtctgttaatgtcatggccttgaaacagttccatttatgctggttaagagatcccttaagaagttagaaggcttaagaactgcttcatgtgaacatcccttattagttacaaagttatattcacagttttttaaaaatgtgtcaaaataaaggataactctgtattacagctttcacagtagctatgtggacaatgtgttatttccattttgactctctaaaatagctacatcctaaaatcagggctatctttaacaatagcaagatagcaatattatatacaactcagttatgagaccctttagttattctccattaatgcttcttagtttgtaataccatacctcacagtaggtagaagaatgaaaacttctgcaggtgtgtaattttgaaactagtcctctaaaaattccctattactcctatagcaatctaataaaaactacctacatagttactgttttctttccttctttgccaaatgttttataataaatctcttaattacatacatttttctacttaagattaaattggaaatactgtcttagcaaaagtcttgggactatctaaactcccacacatagataaatctgatttggagagagaaatttaaaatatttaattaaaggtgatacccacattttcaagtttttaaaagagggagatggctttgtatgcttttgtgtagtttagaacagatacacattagtaaaagataccaataatcattagagctcaaggaagttattaggtgcagcctctggagccatactcacgctgcagtgcataatgggaaaattaggagcattaataagaaatttcagtagtgtttgtaaggaaaataagctacttactgagatctgtttcttctattgcatgtttgcttttgagggacagcttctgtcaaaagtgaaatcatcaccagaactgggcctgttaggaagaatagggttttatttactttttatgtcaattaacttcaacaaaaaggccacgctggctgctgtcatgccatctgggtatgcattaaacattaatgatgatcagcactga

SEQ ID NO: 171830 - DNA, 5743 bp, Homo sapiens
  Payload ID: 13766
  Gene Symbol: PTPRG
  Gene Name: protein tyrosine phosphatase, receptor type, G
  ENST ID: ENST00000615556
  CDS Start-End: 1-4152
acaggtgcctatggtcctgagcactgggtcacgtctagtgtcagctgtgggggccgtcaccagtctcctattgacattttagaccagtatgcgcgtgttggggaagaataccaggaactgcaactcgatggcttcgacaatgagtcttctaacaaaacctggatgaaaaacacagggaaaacagtcgccatccttctgaaagacgactattttgtcagtggagctggtctacctggcagattcaaagctgagaaggtggaatttcactggggccacagcaatggctcagcgggctctgaacacagcatcaatggcaggaggtttcctgttgagatgcagattttcttttacaatccagatgactttgacagctttcaaaccgcaatttctgagaacagaataatcggagccatggccatattttttcaagtcagtccgagggacaattctgcactggatcctattatccacgggttgaagggtgtcgtacatcatgagaaggagacctttctggatcctttcgtcctccgggacctcctgcctgcatccctgggcagctattatcggtacacaggttccttgaccacaccaccgtgtagcgaaatagtggagtggatagtcttccggagacccgtccccatctcttaccatcagcttgaggctttttattccatcttcaccacggagcagcaagaccatgtcaagtcggtggagtatctgagaaataactttcgaccacagcagcgtctgcatgacagggtggtgtccaagtccgccgtccgtgactcctggaaccacgacatgacagacttcttagaaaacccactggggacagaagcctctaaagtttgcagctctccacccatccacatgaaggtgcagcctctgaaccagacggcactgcaggtgtcctggagccagccggagactatctaccacccacccatcatgaactacatgatctcctacagctggaccaagaatgaggacgagaaggagaagacgtttacaaaggacagcgacaaagacttgaaagccaccattagccatgtctcacccgatagcctttacctgttccgagtccaggccgtgtgtcggaacgacatgcgcagcgactttagccagacgatgctgtttcaagctaataccactcgaatattccaagggaccagaatagtgaaaacaggagtgcccacagcgtctcctgcctcttcagccgacatggcccccatcagctcggggtcttctacctggacgtcctctggcatcccattctcatttgtttccatggcaactgggatgggcccctcctccagtggcagccaggccacagtggcctcggtggtcaccagcacgctgctcgccggcctggggttcggcggtggtggcatctcctctttccccagcactgtgtggcccacgcgcctcccgacggccgcctcagccagcaagcaggcggctaggccagtcctagccaccacagaggccttggcttctccagggcccgatggtgattcgtcaccaaccaaggacggcgagggcaccgaggaaggagagaaggatgagaaaagcgagagtgaggatggggagcgggagcacgaggaggatggagagaaggactccgaaaagaaggagaagagtggggtgacccacgctgccgaggagcggaatcagacggagcccagccccacaccctcgtctcctaacaggactgccgagggagggcatcagactatacctgggcatgagcaggatcacactgccgtccccacagaccagacgggcggaaggagggatgccggcccaggcctggaccccgacatggtcacctccacccaagtgccccccaccgccacagaggagcagtatgcagggagtgatcccaagaggcccgaaatgccatctaaaaagcctatgtcccgcggggaccgattttctgaagacagcagatttatcactgttaatccagcggaaaaaaacacctctggaatgataagccgccctgctccagggaggatggagtggatcatccctctgattgtggtatcagccttgaccttcgtgtgcctcatccttctcattgctgtgctcgtttactggagagggtgtaacaaaataaagtccaagggctttcccagacgtttccgtgaagtgccttcttctggggagagaggagagaaggggagcagaaaatgttttcagactgctcatttctatgtggaagacagcagttcacctcgagtggtccctaatgaaagtatccctattattcctattccggatgacatggaagccattcctgtcaaacagtttgtcaaacacatcggtgagctctattctaataaccagcatgggttctctgaggattttgaggaagtccagcgctgtactgctgatatgaacatcactgcagagcattccaatcatccagaaaacaagcacaaaaacagatacatcaacattttagcatatgatcacagtagggtgaagttaagacctttaccaggaaaagactctaagcacagcgactacattaatgcaaactatgttgatggttacaacaaagcaaaagcctacattgccacccaaggacctttgaagtctacatttgaagatttctggaggatgatttgggaacaaaacactggaatcattgtgatgattacgaaccttgtggaaaaaggaagacgaaaatgtgatcagtattggccaacagagaacagtgaggaatatggaaacattattgtcacgctgaagagcacaaaaatacatgcctgctacactgttcgtcgtttttcaatcagaaatacaaaagtgaaaaagggtcagaagggaaatcccaagggtcgtcagaatgaaagggtagtgatccagtatcactatacacagtggcctgacatgggagttcccgagtatgcccttccagtactgactttcgtgaggagatcctcagcagctcggatgccagaaacgggccctgtgttggtgcactgcagtgctggtgtgggcagaacaggcacctatattgtaatagacagcatgctgcaacagataaaagacaaaagcacagttaacgtcctgggattcctgaagcatatcaggacacagcgtaactacctcgtccagactgaggagcagtacattttcatccatgatgccttgttggaagccattcttggaaaggagactgaagtatcttcaaatcagctgcacagctatgttaacagcatccttataccaggagtaggaggaaagacacgactggaaaagcaattcaagctggtcacacagtgtaatgcaaaatatgtggaatgtttcagtgctcagaaagagtgtaacaaagaaaagaacagaaactcttcagttgtgccatctgagcgtgctcgagtgggtcttgcaccattgcctggaatgaaaggaacagattacattaatgcttcttatatcatgggctattataggagcaatgaatttattataactcagcatcctctgccacatactacgaaagatttctggcgaatgatttgggatcataacgcacagatcattgtcatgctgccagacaaccagagcttggcagaagatgagtttgtgtactggccaagtcgagaagaatccatgaactgtgaggcctttaccgtcacccttatcagcaaagacagactgtgcctctctaatgaagaacaaattatcatccatgactttatccttgaagctacacaggatgactatgtcttagaagttcggcactttcagtgtcccaaatggcctaacccagatgcccccataagtagtacctttgaacttatcaacgtcatcaaggaagaggccttaacaagggatggtcccaccattgttcatgatgagtatggagcagtttcagcaggaatgttatgtgcccttaccaccctgtcccagcaactggagaatgaaaatgctgtggatgttttccaggttgcaaaaatgatcaatcttatgaggcctggagtattcacagacattgaacaataccagttcatctataaagcaatgcttagcttggtcagcactaaagaaaatggaaatggtcccatgacagtagacaaaaatggtgctgttcttattgcagatgaatcagaccctgctgagagcatggagtccctagtgtgactggaatcctgaaagggcacttaatttgtaaacttctgaagactgagaacttttttgaggccttttttgccagactctaggttatacaataacccagttacttttttacactgataaaagttttgatatttattttttgccattttatgtcttaatggtatcctactgagcatttgcacctctgttcatttcacacagtgaaacgcaattttacctagtttgcactatatgatcagtgttactgcctataatcttatacaacagcaaaccctgatgtgacattccatgacgacatacatgctacttttttttagttcaatacagtgaaggtctttgttatgacagtgaatattgcttttattattattattgctgaagtggttgcattctactagcaggcaatgctgtacttttcttcagtcctcctctcctttttattttaggcactgttcaatactgtatgccttctgtattttaatggagtggatagcattgttttcttttacagactagcaggctactgggacctaaaaaggtctgttaatgtcatggccttgaaacagttccatttatgctggttaagagatcccttaagaagttagaaggcttaagaactgcttcatgtgaacatcccttattagttacaaagttatattcacagttttttaaaaatgtgtcaaaataaaggataactctgtattacagctttcacagtagctatgtggacaatgtgttatttccattttgactctctaaaatagctacatcctaaaatcagggctatctttaacaatagcaagatagcaatattatatacaactcagttatgagaccctttagttattctccattaatgcttcttagtttgtaataccatacctcacagtaggtagaagaatgaaaacttctgcaggtgtgtaattttgaaactagtcctctaaaaattccctattactcctatagcaatctaataaaaactacctacatagttactgttttctttccttctttgccaaatgttttataataaatctcttaattacatacatttttctacttaagattaaattggaaatactgtcttagcaaaagtcttgggactatctaaactcccacacatagataaatctgatttggagagagaaatttaaaatatttaattaaaggtgatacccacattttcaagtttttaaaagagggagatggctttgtatgcttttgtgtagtttagaacagatacacattagtaaaagataccaataatcattagagctcaaggaagttattaggtgcagcctctggagccatactcacgctgcagtgcataatgggaaaattaggagcattaataagaaatttcagtagtgtttgtaaggaaaataagctacttactgagatctgtttcttctattgcatgtttgcttttgagggacagcttctgtcaaaagtgaaatcatcaccagaactgggcctgttaggaagaatagggttttatttactttttatgtcaattaacttcaacaaaaaggccacgctggctgctgtcatgccatctgggtatgcattaaacattaatgatgatcagcactga

SEQ ID NO: 171831 - DNA, 3343 bp, Homo sapiens
  Payload ID: 13767
  Gene Symbol: PTPRH
  Gene Name: protein tyrosine phosphatase, receptor type, H
  Uniprot ID: Q9HD43
  ENST ID: ENST00000263434
  CDS Start-End: 24-2837
ggtccccggcagtgtctggaggcatggctggggctggcgggggcctcggggtctgggggaacctggtgctgctgggcctgtgcagctggacaggggccagggcgcctgcccccaacccagggaggaacctgacagtggagactcagaccaccagctccatctccctgagctgggaggtccccgatggcctagactcacagaactccaactactgggttcagtgtactggagacggcggcacaacagagactcgaaacacaacagccaccaacgtcaccgtggatggccttggacccgggtcattgtatacgtgttctgtgtgggtggagaaagacggagtaaatagctctgtggggactgtcactactgccacagctcccaacccagtgagaaacctgacagtggaggctcagaccaacagctccatcgccctgacctgggaggtccccgatggcccagacccacagaactccacctacggggttgagtacactggagatggtggcagagcagggactcgaagcacagcacacaccaacatcaccgtggatagacttgaacccgggtgtttgtatgtgttttccgtgtgggtggggaagaatggaatcaacagctcccgggagactcgaaatgccaccacagcccccaacccagtgagaaacctccatatggagactcagaccaacagctccatcgccctatgctgggaagtccccgatggcccataccctcaggactacacctactgggtagagtacactggagacggtggtggcacagagacccgaaacacaacaaataccagtgtgacagctgagagacttgagcccggaaccttgtacacattctctgtatgggcagaaaaaaatggagcacgtggctccaggcagaatgtcagcatctccacagtccccaacgcagtgacaagcctcagcaagcaggactggaccaacagcaccattgctttgcgctggacagctccccagggcccaggccagtcttcctacagctactgggtctcatgggtcagggaaggcatgactgaccccaggacccaaagcacctcaggtactgacatcaccctaaaggaactggaagctggcagcctgtaccacctcaccgtctgggccgagaggaatgaggtcagaggctataacagcaccctcactgcagccactgctcccaatgaggtcacagatctccagaatgaaactcagactaagaactcagtcatgctgtggtggaaggcccctggagacccccactctcagttgtacgtatactgggtccagtgggccagcaagggacatccccggagggggcaagatccccaagcgaattgggtcaaccagaccagcaggaccaatgagacgtggtacaaagtggaggccctggaacccgggacgttgtacaatttcaccgtgtgggcagagaggaatgacgtagccagttccacgcagagcctctgtgcgtccacatacccagacacagtcaccatcacttcctgtgtcagcacctcagcgggctatggagtcaacttgatctggtcctgcccccagggaggctacgaggcctttgagttggaggtgggaggacagcggggctcccaggacagatcttcatgtggggaggctgtgtctgtgttgggtctcgggccggctcggtcctacccagccaccatcacgaccatctgggacggaatgaaggtcgtgtctcactctgtggtctgccacaccgagagtgcaggggtcattgccggagcctttgtgggcatcctcctgtttctcatcctcgtgggcctgctgattttcttcctgaagaggaggaataagaagaagcagcagaaaccagaactcagggatctggtctttagctccccaggggacatcccagctgaagacttcgctgaccacgtcaggaagaatgagagggacagcaactgtggttttgcagacgagtaccagcaactctccctggtgggccacagccagtctcagatggtggcttcggcttcagagaacaacgccaagaaccgctacagaaatgtgctgccctatgactggtcccgggtgcccctgaagcccatccatgaggagccaggctctgactacatcaatgccagcttcatgcccggtctctggagcccccaggagttcattgcaacccagggtcccctgccacagacagtgggtgacttctggcgcctggtgtgggaacagcagagccacaccctggtcatgctgaccaactgcatggaggccggccgggtgaagtgtgagcattactggcctctggactcgcagccctgcacccatgggcacctgcgggtaaccctggtaggtgaggaagtgatggagaactggacggtgcgggaactgctgctcctccaggtggaggagcagaagacactgtctgtgcgccaattccactaccaggcctggccggatcacggcgttccctcctccccagacaccttgctggctttctggaggatgcttcggcagtggctggatcagaccatggagggaggcccacccattgtgcactgcagtgctggcgtgggtcgcacaggaaccctcattgccctggacgtcctgctccggcagctgcagtccgagggtctccttgggcccttcagctttgtaaggaagatgagagagagtcggccgttgatggtgcagactgaggctcagtacgtattcctgcatcagtgcatcctgcggttcctccaacagtcagcccaggccccagccgagaaggaagtcccgtatgaggatgtcgaaaacctcatctacgagaacgtggccgccatccaggcccacaagttggaggtctaagtgacgagggggctgggtcggcagcccaggcatcctcaagctctggacacccacttgagcccagattcctggaagagcagagggctgggctcccagactcctgggtgctgtgggaggagggggctggtatcccaaactctggtttccccaggagagagtggtctggtgggcttcagatgagtcctatgggagctggggatctggattcctggttccctgaaggaggagagggatgatagcttggattccctaggtctttccaggatgcagaaagaaacaggctggggcctggattctgaggcaggaaggaatttgggtctggagttctggctacttgaggaccaaaggcaggaaggatcctgccttgattttacttcagaaaccaaatcagtcttctataatctggggtcggagggagtccctgtgcccaaggtctctctgcaccccaccatccacatgtatttttccttctatcccataatttattaaatcactgttctccccag

SEQ ID NO: 171832 - DNA, 3877 bp, Homo sapiens
  Payload ID: 13767
  Gene Symbol: PTPRH
  Gene Name: protein tyrosine phosphatase, receptor type, H
  Uniprot ID: Q9HD43
  ENST ID: ENST00000376350
  CDS Start-End: 24-3371
ggtccccggcagtgtctggaggcatggctggggctggcgggggcctcggggtctgggggaacctggtgctgctgggcctgtgcagctggacaggggccagggcgcctgcccccaacccagggaggaacctgacagtggagactcagaccaccagctccatctccctgagctgggaggtccccgatggcctagactcacagaactccaactactgggttcagtgtactggagacggcggcacaacagagactcgaaacacaacagccaccaacgtcaccgtggatggccttggacccgggtcattgtatacgtgttctgtgtgggtggagaaagacggagtaaatagctctgtggggactgtcactactgccacagctcccaacccagtgaggaacctgagagtggaggctcagaccaacagctccatcgccctgacctgggaggtccccgacggcccagacccacagaactccacctacggggttgagtacactggagatggtggcagagcagggactcgaagcacagcacacactaacatcaccgtggatggacttgaacccgggtgtttgtatgcgttttccatgtgggtgggaaagaatggaatcaacagctcccgggagactcgaaatgccaccacagctcacaacccagtgaggaacctgagagtggaggctcagaccaccagctccatctccctgagctgggaggtccccgatggcacagacccacagaactcgacctactgcgttcagtgcactggagatggtggcagaacagagactcgaaacacaacagacaccagagtcaccgtggatggccttggacccgggtcattgtatacgtgttctgtgtgggtggagaaagacggagtaaatagctctgtggagattgtcactagtgccacagctcccaacccagtgagaaacctgacagtggaggctcagaccaacagctccatcgccctgacctgggaggtccccgatggcccagacccacagaactccacctacggggttgagtacactggagatggtggcagagcagggactcgaagcacagcacacaccaacatcaccgtggatagacttgaacccgggtgtttgtatgtgttttccgtgtgggtggggaagaatggaatcaacagctcccgggagactcgaaatgccaccacagcccccaacccagtgagaaacctccatatggagactcagaccaacagctccatcgccctatgctgggaagtccccgatggcccataccctcaggactacacctactgggtagagtacactggagacggtggtggcacagagacccgaaacacaacaaataccagtgtgacagctgagagacttgagcccggaaccttgtacacattctctgtatgggcagaaaaaaatggagcacgtggctccaggcagaatgtcagcatctccacagtccccaacgcagtgacaagcctcagcaagcaggactggaccaacagcaccattgctttgcgctggacagctccccagggcccaggccagtcttcctacagctactgggtctcatgggtcagggaaggcatgactgaccccaggacccaaagcacctcaggtactgacatcaccctaaaggaactggaagctggcagcctgtaccacctcaccgtctgggccgagaggaatgaggtcagaggctataacagcaccctcactgcagccactgctcccaatgaggtcacagatctccagaatgaaactcagactaagaactcagtcatgctgtggtggaaggcccctggagacccccactctcagttgtacgtatactgggtccagtgggccagcaagggacatccccggagggggcaagatccccaagcgaattgggtcaaccagaccagcaggaccaatgagacgtggtacaaagtggaggccctggaacccgggacgttgtacaatttcaccgtgtgggcagagaggaatgacgtagccagttccacgcagagcctctgtgcgtccacatacccagacacagtcaccatcacttcctgtgtcagcacctcagcgggctatggagtcaacttgatctggtcctgcccccagggaggctacgaggcctttgagttggaggtgggaggacagcggggctcccaggacagatcttcatgtggggaggctgtgtctgtgttgggtctcgggccggctcggtcctacccagccaccatcacgaccatctgggacggaatgaaggtcgtgtctcactctgtggtctgccacaccgagagtgcaggggtcattgccggagcctttgtgggcatcctcctgtttctcatcctcgtgggcctgctgattttcttcctgaagaggaggaataagaagaagcagcagaaaccagaactcagggatctggtctttagctccccaggggacatcccagctgaagacttcgctgaccacgtcaggaagaatgagagggacagcaactgtggttttgcagacgagtaccagcaactctccctggtgggccacagccagtctcagatggtggcttcggcttcagagaacaacgccaagaaccgctacagaaatgtgctgccctatgactggtcccgggtgcccctgaagcccatccatgaggagccaggctctgactacatcaatgccagcttcatgcccggtctctggagcccccaggagttcattgcaacccagggtcccctgccacagacagtgggtgacttctggcgcctggtgtgggaacagcagagccacaccctggtcatgctgaccaactgcatggaggccggccgggtgaagtgtgagcattactggcctctggactcgcagccctgcacccatgggcacctgcgggtaaccctggtaggtgaggaagtgatggagaactggacggtgcgggaactgctgctcctccaggtggaggagcagaagacactgtctgtgcgccaattccactaccaggcctggccggatcacggcgttccctcctccccagacaccttgctggctttctggaggatgcttcggcagtggctggatcagaccatggagggaggcccacccattgtgcactgcagtgctggcgtgggtcgcacaggaaccctcattgccctggacgtcctgctccggcagctgcagtccgagggtctccttgggcccttcagctttgtaaggaagatgagagagagtcggccgttgatggtgcagactgaggctcagtacgtattcctgcatcagtgcatcctgcggttcctccaacagtcagcccaggccccagccgagaaggaagtcccgtatgaggatgtcgaaaacctcatctacgagaacgtggccgccatccaggcccacaagttggaggtctaagtgacgagggggctgggtcggcagcccaggcatcctcaagctctggacacccacttgagcccagattcctggaagagcagagggctgggctcccagactcctgggtgctgtgggaggagggggctggtatcccaaactctggtttccccaggagagagtggtctggtgggcttcagatgagtcctatgggagctggggatctggattcctggttccctgaaggaggagagggatgatagcttggattccctaggtctttccaggatgcagaaagaaacaggctggggcctggattctgaggcaggaaggaatttgggtctggagttctggctacttgaggaccaaaggcaggaaggatcctgccttgattttacttcagaaaccaaatcagtcttctataatctggggtcggagggagtccctgtgcccaaggtctctctgcaccccaccatccacatgtatttttccttctatcccataatttattaaatcactgttctccccag

SEQ ID NO: 171833 - DNA, 5122 bp, Homo sapiens
  Payload ID: 13768
  Gene Symbol: PTPRJ
  Gene Name: protein tyrosine phosphatase, receptor type, J
  Uniprot ID: Q12913
  ENST ID: ENST00000418331
  CDS Start-End: 353-4366
ccccagccgcatgacgcgcggaggaggcagcgggagcagccgcgggagccgggaccgggtagccgcgcgctgggggtgggcgccgctcgctccgccccgcgaagcccctgcgcgctcagggacgcggcccccccgcggcagccgcgctaggctccggcgtgtggccgcggccgccgccgccgctgccatgtctccggggaagcccggggcgggcggagcggggacgaggcggaccggctggcggaggaggaggcgaaggagacggcaggaggcggcgacgacggtgcccgggctcgggcgcacggcggggcccgattcgcgcgtccggggcacgttccagggcgcgcggggcatgaagccggcggcgcgggaggcgcggctgcctccgcgctcgcccgggctgcgctgggcgctgccgctgctgctgctgctgctgcgcctgggccagatcctgtgcgcaggtggcacccctagtccaattcctgacccttcagtagcaactgttgccacaggggaaaatggcataacgcagatcagcagtacagcagaatcctttcataaacagaatggaactggaacacctcaggtggaaacaaacaccagtgaggatggtgaaagctctggagccaacgatagtttaagaacacctgaacaaggatctaatgggactgatggggcatctcaaaaaactcccagtagcactgggcccagtcctgtgtttgacattaaagctgtttccatcagtccaaccaatgtgatcttaacttggaaaagtaatgacacagctgcttctgagtacaagtatgtagtaaagcataagatggaaaatgagaagacaattactgttgtgcatcaaccatggtgtaacatcacaggcttacgtccagcgacttcatatgtattctccatcactccaggaataggcaatgagacttggggagatcccagagtcataaaagtcatcacagagccgatcccagtttctgatctccgtgttgccctcacgggtgtgaggaaggctgctctctcctggagcaatggcaatggcactgcctcctgccgggttcttcttgaaagcattggaagccatgaggagttgactcaagactcaagacttcaggtcaatatctcgggcctgaagccaggggttcaatacaacatcaacccgtatcttctacaatcaaataagacaaagggagaccccttgggcacagaaggtggcttggatgccagcaatacagagagaagccgggcagggagccccaccgcccctgtgcatgatgagtccctcgtgggacctgtggacccatcctccggccagcagtcccgagacacggaagtcctgcttgtcgggttagagcctggcacccgatacaatgccaccgtttattcccaagcagcgaatggcacagaaggacagccccaggccatagagttcaggacaaatgctattcaggtttttgacgtcaccgctgtgaacatcagtgccacaagcctgaccctgatctggaaagtcagcgataacgagtcgtcatctaactatacctacaagatacatgtggcgggggagacagattcttccaatctcaacgtcagtgagcctcgcgctgtcatccccggactccgctccagcaccttctacaacatcacagtgtgtcctgtcctaggtgacatcgagggcacgccgggcttcctccaagtgcacaccccccctgttccagtttctgacttccgagtgacagtggtcagcacgacggagatcggcttagcatggagcagccatgatgcagaatcatttcagatgcatatcacacaggagggagctggcaattctcgggtagaaataaccaccaaccaaagtattatcattggtggcttgttccctggaaccaagtattgctttgaaatagttccaaaaggaccaaatgggactgaaggggcatctcggacagtttgcaatagaactgttcccagtgcagtgtttgacatccacgtggtctacgtcaccaccacggagatgtggctggactggaagagccctgacggtgcttccgagtatgtctaccatttagtcatagagtccaagcatggctctaaccacacaagcacgtatgacaaagcgattactctccagggcctgattccgggcaccttatataacatcaccatctctccagaagtggaccacgtctggggggaccccaactccactgcacagtacacacggcccagcaatgtgtccaacattgatgtaagtaccaacaccacagcagcaactttaagttggcagaactttgatgacgcctctcccacgtactcctactgccttcttattgagaaggctggaaattccagcaacgcaacacaagtagtcacggacattggaattactgacgctacagtcactgaattaatacctggctcatcatacacagtggagatctttgcacaagtaggggatgggatcaagtcactggaacctggccggaagtcattctgtacagatcctgcgtccatggcctccttcgactgcgaagtggtccccaaagagccagccctggttctcaaatggacctgccctcctggcgccaatgcaggctttgagctggaggtcagcagtggagcctggaacaatgcgacccacctggagagctgctcctctgagaatggcactgagtatagaacggaagtcacgtatttgaatttttctacctcgtacaacatcagcatcaccactgtgtcctgtggaaagatggcagcccccacccggaacacctgcactactggcatcacagatccccctcctccagatggatcccctaatattacatctgtcagtcacaattcagtaaaggtcaagttcagtggatttgaagccagccacggacccatcaaagcctatgctgtcattctcaccaccggggaagctggtcacccttctgcagatgtcctgaaatacacgtatgaggatttcaaaaagggagcctcagatacttatgtgacatacctcataagaacagaagaaaagggacgttctcagagcttgtctgaagttttgaaatatgaaattgacgttgggaatgagtcaaccacacttggttattacaatgggaagctggaacctctgggctcctaccgggcttgtgtggctggcttcaccaacattaccttccaccctcaaaacaaggggctcattgatggggctgagagctatgtgtccttcagtcgctactcagatgctgtttccttgccccaggatccaggtgtcatctgtggagcggtttttggctgtatctttggtgccctggttattgtgactgtgggaggcttcatcttctggagaaagaagaggaaagatgcaaagaataatgaagtgtccttttctcaaattaaacctaaaaaatctaagttaatcagagtggagaattttgaggcctacttcaagaagcagcaagctgactccaactgtgggttcgcagaggaatacgaagatctgaagcttgttggaattagtcaacctaaatatgcagcagaactggctgagaatagaggaaagaatcgctataataatgttctgccctatgatatttcccgtgtcaaactttcggtccagacccattcaacggatgactacatcaatgccaactacatgcctggctaccactccaagaaagattttattgccacacaaggacctttaccgaacactttgaaagatttttggcgtatggtttgggagaaaaatgtatatgccatcattatgttgactaaatgtgttgaacagggaagaaccaaatgtgaggagtattggccctccaagcaggctcaggactatggagacataactgtggcaatgacatcagaaattgttcttccggaatggaccatcagagatttcacagtgaaaaatatccagacaagtgagagtcaccctctgagacagttccatttcacctcctggccagaccacggtgttcccgacaccactgacctgctcatcaacttccggtacctcgttcgtgactacatgaagcagagtcctcccgaatcgccgattctggtgcattgcagtgctggggtcggaaggacgggcactttcattgccattgatcgtctcatctaccagatagagaatgagaacaccgtggatgtgtatgggattgtgtatgaccttcgaatgcataggcctttaatggtgcagacagaggaccagtatgttttcctcaatcagtgtgttttggatattgtcagatcccagaaagactcaaaagtagatcttatctaccagaacacaactgcaatgacaatctatgaaaaccttgcgcccgtgaccacatttggaaagaccaatggttacatcgcctaattccaaaggaataacctttctggagtgaaccagaccgtcgcacccacagcgaaggcacatgccccgatgtcgacatgtttttatatgtctaatatcttaattctttgttctgttttgtgagaactaattttgagggcatgaagctgcatatgatagatgacaaattggggctgtcgggggctgtggatgggtggggagcaaatcatctgcattcctgatgaccaatgggatgaggtcactttttttttttttcccccttgaggattgtggaaaaccaggaaaagggagctatgatttttttttccaaaacaatttcttttttaaaaaagactattttatatgattcacatgctaaagccaggattgtgttgggttgaatatattttaagtatcagaggtctatttttacctactgtgtcttggaatctagccgatggaaaatacctaattgtggatgatgattgcgcagggaggggtacgtggcacctcttccgaatgggttttctatttgaacatgtgccttttctgaattatgcttccacaggcaaaactcagtagagatctatatttttgtactgaatctcataattggaatatacggaatatttaaacagtagcttagcatcagaggtttgcttcctcagtaacatttctgttctcatttgatcaggggaggcctctttgccccgactccgcttcccctgccccctgtacatttgtgctccattttttcttcccttttccctcccagttttc

SEQ ID NO: 171834 - DNA, 3158 bp, Homo sapiens
  Payload ID: 13768
  Gene Symbol: PTPRJ
  Gene Name: protein tyrosine phosphatase, receptor type, J
  Uniprot ID: Q12913
  ENST ID: ENST00000440289
  CDS Start-End: 334-1953
ggaggaggcagcgggagcagccgcgggagccgggaccgggtagccgcgcgctgggggtgggcgccgctcgctccgccccgcgaagcccctgcgcgctcagggacgcggcccccccgcggcagccgcgctaggctccggcgtgtggccgcggccgccgccgccgctgccatgtctccggggaagcccggggcgggcggagcggggacgaggcggaccggctggcggaggaggaggcgaaggagacggcaggaggcggcgacgacggtgcccgggctcgggcgcacggcggggcccgattcgcgcgtccggggcacgttccagggcgcgcggggcatgaagccggcggcgcgggaggcgcggctgcctccgcgctcgcccgggctgcgctgggcgctgccgctgctgctgctgctgctgcgcctgggccagatcctgtgcgcaggtggcacccctagtccaattcctgacccttcagtagcaactgttgccacaggggaaaatggcataacgcagatcagcagtacagcagaatcctttcataaacagaatggaactggaacacctcaggtggaaacaaacaccagtgaggatggtgaaagctctggagccaacgatagtttaagaacacctgaacaaggatctaatgggactgatggggcatctcaaaaaactcccagtagcactgggcccagtcctgtgtttgacattaaagctgtttccatcagtccaaccaatgtgatcttaacttggaaaagtaatgacacagctgcttctgagtacaagtatgtagtaaagcataagatggaaaatgagaagacaattactgttgtgcatcaaccatggtgtaacatcacaggcttacgtccagcgacttcatatgtattctccatcactccaggaataggcaatgagacttggggagatcccagagtcataaaagtcatcacagagccgatcccagtttctgatctccgtgttgccctcacgggtgtgaggaaggctgctctctcctggagcaatggcaatggcactgcctcctgccgggttcttcttgaaagcattggaagccatgaggagttgactcaagactcaagacttcaggtcaatatctcgggcctgaagccaggggttcaatacaacatcaacccgtatcttctacaatcaaataagacaaagggagaccccttgggcacagaaggtggcttggatgccagcaatacagagagaagccgggcagggagccccaccgcccctgtgcatgatgagtccctcgtgggacctgtggacccatcctccggccagcagtcccgagacacggaagtcctgcttgtcgggttagagcctggcacccgatacaatgccaccgtttattcccaagcagcgaatggcacagaaggacagccccaggccatagagttcaggacaaatgctattcaggtttttgacgtcaccgctgtgaacatcagtgccacaagcctgaccctgatctggaaagtcagcgataacgagtcgtcatctaactatacctacaagatacatgtggcgggggagacagattcttccaatctcaacgtcagtgagcctcgcgctgtcatccccggactccgctccagcaccttctacaacatcacagtgtgtcctgtcctaggtgacatcgagggcacgccgggcttcctccaagtgcacaccccccctgttccagtttctgacttccgagtgacagtggtcagcacgacggagatcggcttagcatggagcagccatgatgcagaatcatttcagatgcatatcacacaggagggagctggcaattctcgggtagaaataaccaccaaccaaagtattatcattggtggcttgttccctggaaccaagtattgctttgaaatagttccaaaaggaccaaatgggactgaaggggcatctcggacagtttgcaatagaactggatgatttgaacacctgcctggaattccatcatctgaaacagagttggcagataagaatggcccctatgccaaatttggctcattgtctgtttttgtaaataaagttttattggatcacagccatgttcatttgcttatgtactgtctatggctactttggtgctagaattgagtagtggcagcagagaacgtgtggcttgtgaagcctgagatatttattttctggccattacagagaatgtttgctgacctctgggctagatcagtggttttcaaattgtggtccagggctctctagggatccctaggttctttcaaggggtctccaaggtagtattatcataacaatactaaaatgttatttggctttttcattctcattctcttttggagttttccaactttgatccgatatgggatgacattgtctctcaggtctaatggaatatatgctgtggattcttacattttaaaaatttcttcattttaaatccctgatatagtaaatattaataaatataacctatgtaaatacaaattctctgagagccttaataacttttaagatggtaaagaagtcctgagagcaaaaagtttaagaacctctggtcaagatgtgttagaaattaactactgtgctgtgttgggcaggtggactgttcacagtctttcctaaacaacactgtgatgagatactttgttagttctagaaggctaattgaaattgataaaatcattttatagtcagctacggtggcctgcacccatcgtcccagctacttgagaggctgcggcaggaggattgcttggcccaacagttgcagactagcaccagcctgggagaccctgtctcaaaaaaaaatttttttttatagaaacagtttaaattattaaattatttctaggcctacaggagaaacttctgggaaatcctagagagtaatgttcattattgttgttttaaaattttgaaataattgttttttggaaaggttgaaaaacatacagtcttccttgatctaagattcaagatagttgaaatcttttatacagagggtagaataaagatatacctaatgtaaatgatgagttaatgggtgcagcacaccaacatggcacatgtatacatatgtaacaaacctgcacgttgtgcacatgtaccctagaacttaaagtataataaaaacatatatatatatataaaagaaa

SEQ ID NO: 171835 - DNA, 546 bp, Homo sapiens
  Payload ID: 13768
  Gene Symbol: PTPRJ
  Gene Name: protein tyrosine phosphatase, receptor type, J
  ENST ID: ENST00000534219
  CDS Start-End: 187-546
gcggccgccgccgccgctgccatgtctccggggaagcccggggcgggcggagcggggacgaggcggaccggctggcggaggaggaggcgaaggagacggcaggaggcggcgacgacggtgcccgggctcgggcgcacggcggggcccgattcgcgcgtccggggcacgttccagggcgcgcggggcatgaagccggcggcgcgggaggcgcggctgcctccgcgctcgcccgggctgcgctgggcgctgccgctgctgctgctgctgctgcgcctgggccagatcctgtgcgcaggtggcaggcccagtcctgtgtttgacattaaagctgtttccatcagtccaaccaatgtgatcttaacttggaaaagtaatgacacagctgcttctgagtacaagtatgtagtaaagcataagatggaaaatgagaagacaattactgttgtgcatcaaccatggtgtaacatcacaggcttacgtccagcgacttcatatgtattctccatcactccaggaataggcaatgagacttggggagatcccaga

SEQ ID NO: 171836 - DNA, 626 bp, Homo sapiens
  Payload ID: 13768
  Gene Symbol: PTPRJ
  Gene Name: protein tyrosine phosphatase, receptor type, J
  ENST ID: ENST00000527952
  CDS Start-End: 187-626
gcggccgccgccgccgctgccatgtctccggggaagcccggggcgggcggagcggggacgaggcggaccggctggcggaggaggaggcgaaggagacggcaggaggcggcgacgacggtgcccgggctcgggcgcacggcggggcccgattcgcgcgtccggggcacgttccagggcgcgcggggcatgaagccggcggcgcgggaggcgcggctgcctccgcgctcgcccgggctgcgctgggcgctgccgctgctgctgctgctgctgcgcctgggccagatcctgtgcgcaggtggcacccctagtccaattcctgacccttcagtagcaactgttgccacaggggaaaatggcataacgcagatcagcagtacagcagaatcctttcataaacagaatggaactggaacacctcaggtggaaacaaacaccagtgaggatggtgaaagctctggagccaacgatagtttaagaacacctgaacaaggatctaatgggactgatggggcatctcaaaaaactcccagtagcactgagccgatcccagtttctgatctccgtgttgccctcacgggtgtgaggaaggctgctctctcctggagcaatggcaatggcactgcctc

SEQ ID NO: 171837 - DNA, 7851 bp, Homo sapiens
  Payload ID: 13768
  Gene Symbol: PTPRJ
  Gene Name: protein tyrosine phosphatase, receptor type, J
  ENST ID: ENST00000613246
  CDS Start-End: 356-4372
cagccccagccgcatgacgcgcggaggaggcagcgggagcagccgcgggagccgggaccgggtagccgcgcgctgggggtgggcgccgctcgctccgccccgcgaagcccctgcgcgctcagggacgcggcccccccgcggcagccgcgctaggctccggcgtgtggccgcggccgccgccgccgctgccatgtctccggggaagcccggggcgggcggagcggggacgaggcggaccggctggcggaggaggaggcgaaggagacggcaggaggcggcgacgacggtgcccgggctcgggcgcacggcggggcccgattcgcgcgtccggggcacgttccagggcgcgcggggcatgaagccggcggcgcgggaggcgcggctgcctccgcgctcgcccgggctgcgctgggcgctgccgctgctgctgctgctgctgcgcctgggccagatcctgtgcgcaggtggcacccctagtccaattcctgacccttcagtagcaactgttgccacaggggaaaatggcataacgcagatcagcagtacagcagaatcctttcataaacagaatggaactggaacacctcaggtggaaacaaacaccagtgaggatggtgaaagctctggagccaacgatagtttaagaacacctgaacaaggatctaatgggactgatggggcatctcaaaaaactcccagtagcactgggcccagtcctgtgtttgacattaaagctgtttccatcagtccaaccaatgtgatcttaacttggaaaagtaatgacacagctgcttctgagtacaagtatgtagtaaagcataagatggaaaatgagaagacaattactgttgtgcatcaaccatggtgtaacatcacaggcttacgtccagcgacttcatatgtattctccatcactccaggaataggcaatgagacttggggagatcccagagtcataaaagtcatcacagagccgatcccagtttctgatctccgtgttgccctcacgggtgtgaggaaggctgctctctcctggagcaatggcaatggcactgcctcctgccgggttcttcttgaaagcattggaagccatgaggagttgactcaagactcaagacttcaggtcaatatctcgggcctgaagccaggggttcaatacaacatcaacccgtatcttctacaatcaaataagacaaagggagaccccttgggcacagaaggtggcttggatgccagcaatacagagagaagccgggcagggagccccaccgcccctgtgcatgatgagtccctcgtgggacctgtggacccatcctccggccagcagtcccgagacacggaagtcctgcttgtcgggttagagcctggcacccgatacaatgccaccgtttattcccaagcagcgaatggcacagaaggacagccccaggccatagagttcaggacaaatgctattcaggtttttgacgtcaccgctgtgaacatcagtgccacaagcctgaccctgatctggaaagtcagcgataacgagtcgtcatctaactatacctacaagatacatgtggcgggggagacagattcttccaatctcaacgtcagtgagcctcgcgctgtcatccccggactccgctccagcaccttctacaacatcacagtgtgtcctgtcctaggtgacatcgagggcacgccgggcttcctccaagtgcacaccccccctgttccagtttctgacttccgagtgacagtggtcagcacgacggagatcggcttagcatggagcagccatgatgcagaatcatttcagatgcatatcacacaggagggagctggcaattctcgggtagaaataaccaccaaccaaagtattatcattggtggcttgttccctggaaccaagtattgctttgaaatagttccaaaaggaccaaatgggactgaaggggcatctcggacagtttgcaatagaactgttcccagtgcagtgtttgacatccacgtggtctacgtcaccaccacggagatgtggctggactggaagagccctgacggtgcttccgagtatgtctaccatttagtcatagagtccaagcatggctctaaccacacaagcacgtatgacaaagcgattactctccagggcctgattccgggcaccttatataacatcaccatctctccagaagtggaccacgtctggggggaccccaactccactgcacagtacacacggcccagcaatgtgtccaacattgatgtaagtaccaacaccacagcagcaactttaagttggcagaactttgatgacgcctctcccacgtactcctactgccttcttattgagaaggctggaaattccagcaacgcaacacaagtagtcacggacattggaattactgacgctacagtcactgaattaatacctggctcatcatacacagtggagatctttgcacaagtaggggatgggatcaagtcactggaacctggccggaagtcattctgtacagatcctgcgtccatggcctccttcgactgcgaagtggtccccaaagagccagccctggttctcaaatggacctgccctcctggcgccaatgcaggctttgagctggaggtcagcagtggagcctggaacaatgcgacccacctggagagctgctcctctgagaatggcactgagtatagaacggaagtcacgtatttgaatttttctacctcgtacaacatcagcatcaccactgtgtcctgtggaaagatggcagcccccacccggaacacctgcactactggcatcacagatccccctcctccagatggatcccctaatattacatctgtcagtcacaattcagtaaaggtcaagttcagtggatttgaagccagccacggacccatcaaagcctatgctgtcattctcaccaccggggaagctggtcacccttctgcagatgtcctgaaatacacgtatgaggatttcaaaaagggagcctcagatacttatgtgacatacctcataagaacagaagaaaagggacgttctcagagcttgtctgaagttttgaaatatgaaattgacgttgggaatgagtcaaccacacttggttattacaatgggaagctggaacctctgggctcctaccgggcttgtgtggctggcttcaccaacattaccttccaccctcaaaacaaggggctcattgatggggctgagagctatgtgtccttcagtcgctactcagatgctgtttccttgccccaggatccaggtgtcatctgtggagcggtttttggctgtatctttggtgccctggttattgtgactgtgggaggcttcatcttctggagaaagaagaggaaagatgcaaagaataatgaagtgtccttttctcaaattaagtctctcaaaagatctaagttaatcagagtggagaattttgaggcctacttcaagaagcagcaagctgactccaactgtgggttcgcagaggaatacgaagatctgaagcttgttggaattagtcaacctaaatatgcagcagaactggctgagaatagaggaaagaatcgctataataatgttctgccctatgatatttcccgtgtcaaactttcggtccagacccattcaacggatgactacatcaatgccaactacatgcctggctaccactccaagaaagattttattgccacacaaggacctttaccgaacactttgaaagatttttggcgtatggtttgggagaaaaatgtatatgccatcattatgttgactaaatgtgttgaacagggaagaaccaaatgtgaggagtattggccctccaagcaggctcaggactatggagacataactgtggcaatgacatcagaaattgttcttccggaatggaccatcagagatttcacagtgaaaaatatccagacaagtgagagtcaccctctgagacagttccatttcacctcctggccagaccacggtgttcccgacaccactgacctgctcatcaacttccggtacctcgttcgtgactacatgaagcagagtcctcccgaatcgccgattctggtgcattgcagtgctggggtcggaaggacgggcactttcattgccattgatcgtctcatctaccagatagagaatgagaacaccgtggatgtgtatgggattgtgtatgaccttcgaatgcataggcctttaatggtgcagacagaggaccagtatgttttcctcaatcagtgtgttttggatattgtcagatcccagaaagactcaaaagtagatcttatctaccagaacacaactgcaatgacaatctatgaaaaccttgcgcccgtgaccacatttggaaagaccaatggttacatcgcctaattccaaaggaataacctttctggagtgaaccagaccgtcgcacccacagcgaaggcacatgccccgatgtcgacatgtttttatatgtctaatatcttaattctttgttctgttttgtgagaactaattttgagggcatgaagctgcatatgatagatgacaaattggggctgtcgggggctgtggatgggtggggagcaaatcatctgcattcctgatgaccaatgggatgaggtcactttttttttttttcccccttgaggattgtggaaaaccaggaaaagggagctatgatttttttttccaaaacaatttcttttttaaaaaagactattttatatgattcacatgctaaagccaggattgtgttgggttgaatatattttaagtatcagaggtctatttttacctactgtgtcttggaatctagccgatggaaaatacctaattgtggatgatgattgcgcagggaggggtacgtggcacctcttccgaatgggttttctatttgaacatgtgccttttctgaattatgcttccacaggcaaaactcagtagagatctatatttttgtactgaatctcataattggaatatacggaatatttaaacagtagcttagcatcagaggtttgcttcctcagtaacatttctgttctcatttgatcaggggaggcctctttgccccgactccgcttcccctgccccctgtacatttgtgctccattttttcttcccttttccctcccagttttctccaaagactcttctgttggcaacattttcaacccattggttgggtgagaatggcgactcaaatatcaccttgagaatttctgtgggtgggaatgggagaagcagaggaatcctacagtggcagaaatccttttcttgtccctgtattatcctttttctcatgtctgtatttggtatgaaggattatttaaaggtgcaatatgtgaattagtgattcatgatgttctaggtttttagtaacgttttactcaggttggcattttatgtgtctgtgtctgtatgtgtgtgtgtatgttcagaagcgtggcaatctgtgaacacttcagcgtgaattcagtgtcagattaatccctccttccccaaagtccactggctttcgtctctctctgccgtgacacatatcggaatctactgtgtatatatatatatatatatatatatatatatatatatatatatatatacactaagctctcaaaaacagtcattcctatgaattgaggtgtacaaagtttgaatttgtatcaaagatgtaattattatttttaaaaccttttcactatactgctgctgtaattactttgatttttaaaatgtagattaatttttttttttttgcttcaggtgtgtatccaccaagaatttcaaatttatgtggatttattttattggtacataatctgtaaacttcttaaggcattaacatgaaaagattttttctttttattttatattgtggctcaggttatattttgaagatgttttgagtttatcctccaataggcaatgaagttgacaaggttttatgaaggaataaccaagtccctggagtcctgtggctgttgccacagtaatgtgtcctgctgtaaacaggacaggtgtgtcctgttgagaatgtgagcgggctcttccagcctcctggtccctcctgactctgccacgcccctcacctcactggcacttcgataactgactggacgtgttaatgggtcttttagggttctaaagggtgaaccacacttttaaagccccggctgtggttcggagggttagtgctgtatgccttttatttccctttccctttgaggtactgaaaggatgaaaaggtggtgtcatgttttggggagaatcttacttctcaaatggaaattgcactttttgctgaatcctttgcatttttttggtagtaagcagttcattgagtatcaggtcctcaaaggaatgagttggcccggctagggtgggccctcttgacctaacttcagagggggccttggctcagtaggtgtgaatcagggaagccacattgtcctcagggtgctgtatgaagctgggtgtgggcggattcctcccacaccttcacactggcctgcctccaactcatacagatctcggagcggtcggtacttcattcataggtccctgttcaggcagcagttctgtgggctgtggccctctcccctccaatatgtccgaaaccattgtgatgggtggcaaatcccagggagctcctaagccctgctctgcccacatcactgccacagagaagtcagaggaagggacttgttgctaaaaaatcctttaaaaggttaaatactttaaaagattaaagcaacataactgtaaacatattgtataaaaatgaaaaacacaggaaccctcttcccttccgcctggtgtgggcttgggaaatgggcaagcggccccagcaatcatgggaggaactcttgcgggggagcggtctgggattccaaatgggcaggtcacacgaaggtcacgatgcttctctgcatcctgaaaagggctggggacagggccagtgggggtggtaagggtatttatagcacagtgcttgaaaagggaagattaatgtgtaaatataaaggacacacaggctgggggttggtcagaggcaagaggagggtgcctctgagcttcaacccctcccaggaacaatgagctcaaattggaagagtccagtggaatcggggggatggtgtgagcacccctgttcagtctttgacaattgcatacagaaaagcagctggtatgggtttgggtgtcaatgaaagggccaaagactggtggccagctggtttgggggatttgggccattgatagcatctcccaggaacaacgactttttgcctccaaagttggatctagtgatgatcagcaccagcaggaaatgacatttggtgtctgcccactgcagccatactgtgacctccagccagacttccgcctaattgactccactggatttgtgctctgttgagtcagaggctcccgggggttggggatcgaggggcgggggtcagctatgcagcccatcacgtgtgtttttcatctgggatgaaaaagcctggttctcttttgaaatgcttgattgtacttattgagctaaacaagtcttggtgactgttgttgatttgcctcaaaagttttaagtcctgggttttcagactactgtgtagcagctgtgtgtttaacatactgtagctttttctcccttgggggcacatacaaataggatgtgttgatgtggactctaaactgtaattttcctgtaactattttggaatgatgcatatttctaatgtttgttatacttgtacagagtattgctgttggttgctttttttttttttaaggaaaaaatggcctgaaaacatttttttaaagacttacaaataccaaatataaaaaaatgtcaatgcatt

SEQ ID NO: 171838 - DNA, 4773 bp, Homo sapiens
  Payload ID: 13768
  Gene Symbol: PTPRJ
  Gene Name: protein tyrosine phosphatase, receptor type, J
  ENST ID: ENST00000615445
  CDS Start-End: 345-4373
gcatgacgcgcggaggaggcagcgggagcagccgcgggagccgggaccgggtagccgcgcgctgggggtgggcgccgctcgctccgccccgcgaagcccctgcgcgctcagggacgcggcccccccgcggcagccgcgctaggctccggcgtgtggccgcggccgccgccgccgctgccatgtctccggggaagcccggggcgggcggagcggggacgaggcggaccggctggcggaggaggaggcgaaggagacggcaggaggcggcgacgacggtgcccgggctcgggcgcacggcggggcccgattcgcgcgtccggggcacgttccagggcgcgcggggcatgaagccggcggcgcgggaggcgcggctgcctccgcgctcgcccgggctgcgctgggcgctgccgctgctgctgctgctgctgcgcctgggccagatcctgtgcgcaggtggcacccctagtccaattcctgacccttcagtagcaactgttgccacaggggaaaatggcataacgcagatcagcagtacagcagaatcctttcataaacagaatggaactggaacacctcaggtggaaacaaacaccagtgaggatggtgaaagctctggagccaacgatagtttaagaacacctgaacaaggatctaatgggactgatggggcatctcaaaaaactcccagtagcactgggcccagtcctgtgtttgacattaaagctgtttccatcagtccaaccaatgtgatcttaacttggaaaagtaatgacacagctgcttctgagtacaagtatgtagtaaagcataagatggaaaatgagaagacaattactgttgtgcatcaaccatggtgtaacatcacaggcttacgtccagcgacttcatatgtattctccatcactccaggaataggcaatgagacttggggagatcccagagtcataaaagtcatcacagagccgatcccagtttctgatctccgtgttgccctcacgggtgtgaggaaggctgctctctcctggagcaatggcaatggcactgcctcctgccgggttcttcttgaaagcattggaagccatgaggagttgactcaagactcaagacttcaggtcaatatctcgggcctgaagccaggggttcaatacaacatcaacccgtatcttctacaatcaaataagacaaagggagaccccttgggcacagaaggtggcttggatgccagcaatacagagagaagccgggcagggagccccaccgcccctgtgcatgatgagtccctcgtgggacctgtggacccatcctccggccagcagtcccgagacacggaagtcctgcttgtcgggttagagcctggcacccgatacaatgccaccgtttattcccaagcagcgaatggcacagaaggacagccccaggccatagagttcaggacaaatgctattcaggtttttgacgtcaccgctgtgaacatcagtgccacaagcctgaccctgatctggaaagtcagcgataacgagtcgtcatctaactatacctacaagatacatgtggcgggggagacagattcttccaatctcaacgtcagtgagcctcgcgctgtcatccccggactccgctccagcaccttctacaacatcacagtgtgtcctgtcctaggtgacatcgagggcacgccgggcttcctccaagtgcacaccccccctgttccagtttctgacttccgagtgacagtggtcagcacgacggagatcggcttagcatggagcagccatgatgcagaatcatttcagatgcatatcacacaggagggagctggcaattctcgggtagaaataaccaccaaccaaagtattatcattggtggcttgttccctggaaccaagtattgctttgaaatagttccaaaaggaccaaatgggactgaaggggcatctcggacagtttgcaatagaactgttcccagtgcagtgtttgacatccacgtggtctacgtcaccaccacggagatgtggctggactggaagagccctgacggtgcttccgagtatgtctaccatttagtcatagagtccaagcatggctctaaccacacaagcacgtatgacaaagcgattactctccagggcctgattccgggcaccttatataacatcaccatctctccagaagtggaccacgtctggggggaccccaactccactgcacagtacacacggcccagcaatgtgtccaacattgatgtaagtaccaacaccacagcagcaactttaagttggcagaactttgatgacgcctctcccacgtactcctactgccttcttattgagaaggctggaaattccagcaacgcaacacaagtagtcacggacattggaattactgacgctacagtcactgaattaatacctggctcatcatacacagtggagatctttgcacaagtaggggatgggatcaagtcactggaacctggccggaagtcattctgtacagatcctgcgtccatggcctccttcgactgcgaagtggtccccaaagagccagccctggttctcaaatggacctgccctcctggcgccaatgcaggctttgagctggaggtcagcagtggagcctggaacaatgcgacccacctggagagctgctcctctgagaatggcactgagtatagaacggaagtcacgtatttgaatttttctacctcgtacaacatcagcatcaccactgtgtcctgtggaaagatggcagcccccacccggaacacctgcactactggcatcacagatccccctcctccagatggatcccctaatattacatctgtcagtcacaattcagtaaaggtcaagttcagtggatttgaagccagccacggacccatcaaagcctatgctgtcattctcaccaccggggaagctggtcacccttctgcagatgtcctgaaatacacgtatgaggatttcaaaaagggagcctcagatacttatgtgacatacctcataagaacagaagaaaagggacgttctcagagcttgtctgaagttttgaaatatgaaattgacgttgggaatgagtcaaccacacttggttattacaatgggaagctggaacctctgggctcctaccggtgtcttctgagggcttgtgtggctggcttcaccaacattaccttccaccctcaaaacaaggggctcattgatggggctgagagctatgtgtccttcagtcgctactcagatgctgtttccttgccccaggatccaggtgtcatctgtggagcggtttttggctgtatctttggtgccctggttattgtgactgtgggaggcttcatcttctggagaaagaagaggaaagatgcaaagaataatgaagtgtccttttctcaaattaagtctctcaaaagatctaagttaatcagagtggagaattttgaggcctacttcaagaagcagcaagctgactccaactgtgggttcgcagaggaatacgaagatctgaagcttgttggaattagtcaacctaaatatgcagcagaactggctgagaatagaggaaagaatcgctataataatgttctgccctatgatatttcccgtgtcaaactttcggtccagacccattcaacggatgactacatcaatgccaactacatgcctggctaccactccaagaaagattttattgccacacaaggacctttaccgaacactttgaaagatttttggcgtatggtttgggagaaaaatgtatatgccatcattatgttgactaaatgtgttgaacagggaagaaccaaatgtgaggagtattggccctccaagcaggctcaggactatggagacataactgtggcaatgacatcagaaattgttcttccggaatggaccatcagagatttcacagtgaaaaatatccagacaagtgagagtcaccctctgagacagttccatttcacctcctggccagaccacggtgttcccgacaccactgacctgctcatcaacttccggtacctcgttcgtgactacatgaagcagagtcctcccgaatcgccgattctggtgcattgcagtgctggggtcggaaggacgggcactttcattgccattgatcgtctcatctaccagatagagaatgagaacaccgtggatgtgtatgggattgtgtatgaccttcgaatgcataggcctttaatggtgcagacagaggaccagtatgttttcctcaatcagtgtgttttggatattgtcagatcccagaaagactcaaaagtagatcttatctaccagaacacaactgcaatgacaatctatgaaaaccttgcgcccgtgaccacatttggaaagaccaatggttacatcgcctaattccaaaggaataacctttctggagtgaaccagaccgtcgcacccacagcgaaggcacatgccccgatgtcgacatgtttttatatgtctaatatcttaattctttgttctgttttgtgagaactaattttgagggcatgaagctgcatatgatagatgacaaattggggctgtcgggggctgtggatgggtggggagcaaatcatctgcattcctgatgaccaatgggatgaggtcactttttttttttttcccccttgaggattgtggaaaaccaggaaaagggagctatgatttttttttccaaaacaatttcttttttaaaaaagactattttatatgattcacatgctaaagccaggattgtgttgggttgaatatattttaagtatcagaggtc

SEQ ID NO: 171839 - DNA, 4758 bp, Homo sapiens
  Payload ID: 13769
  Gene Symbol: PTPRK
  Gene Name: protein tyrosine phosphatase, receptor type, K
  ENST ID: ENST00000368207
  CDS Start-End: 226-4644
tccgccgagcatggagagctgccgccgcggccggccggcgacgctggcgacgctttcgcccctgaggtagtttggcgaccgcgaagaaggaaaaagggcgggcgggcggctgtcctctcaccgtcctcaccccgcgaggcccggcccgctcctccgtcgtggatttcgcggcgatccccccggcagctctttgcaaagctgcttgaaacttctcccaaactcggcatggatacgactgcggcggcggcgctgcctgcttttgtggcgctcttgctcctctctccttggcctctcctgggatcggcccaaggccagttctccgcaggtggctgtacttttgatgatggtccaggggcctgtgattaccaccaggatctgtatgatgactttgaatgggtgcatgttagtgctcaagagcctcattatctaccacccgagatgccccaaggttcctatatgatagtggactcttcagatcacgaccctggagaaaaagccagacttcagctgcctacaatgaaggagaacgacactcactgcattgatttcagttacctattatatagccagaaaggactgaatcctggcactttgaacatattagttagggtgaataaaggacctcttgccaatccaatttggaatgtgactggattcacgggtagagattggcttcgggctgagctagcagtgagcaccttttggcccaatgaatatcaggtaatatttgaagctgaagtctcaggagggagaagtggttatattgccattgatgacatccaagtactgagttatccttgtgataaatctcctcatttcctccgtctaggggatgtagaggtgaatgcagggcaaaacgctacatttcagtgcattgccacagggagagatgctgtgcataacaagttatggctccagagacgaaatggagaagatataccagtagcccagactaagaacatcaatcatagaaggtttgccgcttccttcagattgcaagaagtgacaaaaactgaccaggatttgtatcgctgtgtaactcagtcagaacgaggttccggtgtgtccaattttgctcaacttattgtgagagaaccgccaagacccattgctcctcctcagcttcttggtgttgggcctacatatttgctgatccaactaaatgccaactcgatcattggcgatggtcctatcatcctgaaagaagtagagtaccgaatgacatcaggatcctggacagaaacccatgcagtcaatgctccaacttacaaattatggcatttagatccagataccgaatatgagatccgagttctacttacaagacctggtgaaggtggaacggggctcccaggacctccactaatcaccagaacaaaatgtgcagaacctatgagaaccccaaagacattaaagattgctgaaatacaggcaagacggattgctgtggactgggaatccttgggttacaacattacgcgttgccacacttttaatgtcactatctgctaccattacttccgtggtcacaacgagagcaaggcagactgtttggacatggaccccaaagcccctcagcatgttgtgaaccatctgccaccttatacaaatgtcagcctcaagatgatcctaaccaatccagagggaaggaaggagagtgaagagacaattattcaaactgatgaagatgtgcctggtcccgtaccagtaaaatctcttcaaggaacatcctttgaaaataagatcttcttgaactggaaagaacctttggatccaaatggaatcatcactcaatatgagatcagctatagcagtataagatcatttgatcctgcagttccagtggctggacctccccagactgtatcaaatttatggaacagtacacaccatgtctttatgcatctccaccctggaaccacgtaccagtttttcataagagccagcacggtcaaaggctttggtccagccacagccatcaatgtcaccaccaatatctcagctccaactttacctgactatgaaggagttgatgcctctctcaatgaaactgccaccacaataactgtattgttgagaccagcacaagccaaaggtgctcctatcagtgcttatcagattgttgtggaagaactgcacccacaccgaaccaagagagaagccggagccatggaatgctaccaggttcctgtcacataccaaaatgccatgagtgggggtgcaccgtattactttgctgcagaactccccccgggaaacctacctgagcctgccccgttcactgtgggtgacaatcggacctaccaaggcttttggaaccctcctttggctccgcgcaaaggatacaacatctatttccaggcgatgagcagtgtggagaaggaaactaaaacccagtgcgtacgcattgctacaaaagcagcagcaacagaagaaccagaagtgatcccagatcccgccaagcagacagacagagtggtgaaaatagcaggaattagtgctggaattttggtgttcatcctccttctcctagttgtcatattaattgtaaaaaagaggaggagctactattcttactcctactacctcaaacttgctaaaaaacgcaaagatgccatggggaatacccggcaggagatgactcacatggtgaatgcaatggatcgaagttatgctgatcagagcactctgcatgcagaagatcctctttccatcaccttcatggaccaacataactttagtccaagattgcccaatgatccacttgtaccgactgctgtgttagttcctataacagatgagaaccacagtgctacagcagagtccagtcgccttctagacgtacctcgctacctctgtgaggggacggaatccccttaccagacaggacagctgcatccagccatcagggtagctgatttactgcagcacattaatctcatgaagacatcagacagctatgggttcaaagaggaatatgagagcttttttgaaggacagtcagcatcttgggatgtagctaaaaaagatcaaaatagagcaaaaaaccgatatggaaacattatagcatatgatcactccagagtgattttgcaacccgtagaggatgatccttcctcagattatattaatgccaactatattgatatttggctgtacagggatggctaccagagaccaagtcattacattgcaacccaaggtcccgttcatgaaacagtgtatgatttctggaggatgatttggcaagaacaatctgcttgcattgtgatggttacaaatttagttgaggttggccgggttaaatgctataaatattggcctgatgatactgaagtttatggtgacttcaaagtaacgtgtgtagaaatggaaccacttgctgaatatgtagttaggacattcaccctggaaaggagggggtacaatgaaatccgtgaagttaaacagttccatttcacgggctggcctgaccatggagtgccctaccatgctacagggctgctttcctttatccggcgagtcaagttatcaaaccctcccagtgctggccccatcgttgtacattgcagtgctggtgctggacgaactggctgctacattgtgattgacatcatgctagacatggctgaaagagagggtgttgttgatatttacaattgtgtcaaagccttaagatctcggcgtattaatatggtccagacagaggaacagtacatttttattcatgatgccattttagaagcctgcttatgtggagaaactgccatacctgtctgtgaatttaaagctgcatattttgatatgattagaatagactcccagactaactcttcacatctcaaggatgaatttcagactctgaattcagtcacccctcgactacaagctgaagactgcagtatagcgtgcctgccaaggaaccatgacaagaaccgtttcatggacatgctgccacctgacagatgtctgccttttttaattacaattgatggggagagcagtaactacatcaatgctgctcttatggacagctacaggcaaccagctgctttcatcgtcacacaataccctctgccaaacactgtaaaagacttctggagattagtgtatgattatggctgtacctccattgtgatgttaaacgaagtcgacttgtcccagggctgccctcagtactggccagaggaagggatgctacgatatggccccatccaagtggaatgtatgtcttgttcaatggactgtgatgtgatcaaccggatttttaggatatgcaatctaacaagaccacaggaaggttatctgatggtgcaacagtttcagtacctaggatgggcttctcatcgagaagtgcctggatccaaaaggtcattcttgaaactgatacttcaggtggaaaagtggcaggaggaatgcgaggaaggggaaggccggacgattatccactgcctaaatggtggcgggcgaagtggcatgttctgtgctataggcatcgttgttgaaatggtgaaacggcaaaatgttgtcgatgttttccatgcagtaaagacactgaggaacagcaagccaaacatggtggaagccccggagcaataccgtttctgctatgatgtagctttggagtacctggaatcatcttagttgggtgagactctttaaagtgcatccatgaagaaacctgtccatctattgagccagcagctgttgtacctgttacacttgtgcagaaagattttaatgtggggggtgggagac

SEQ ID NO: 171840 - DNA, 5025 bp, Homo sapiens
  Payload ID: 13769
  Gene Symbol: PTPRK
  Gene Name: protein tyrosine phosphatase, receptor type, K
  ENST ID: ENST00000368210
  CDS Start-End: 259-4635
gagcaaagtaactcttgactaacaggagcagcctccgccgagcatggagagctgccgccgcggccggccggcgacgctggcgacgctttcgcccctgaggtagtttggcgaccgcgaagaaggaaaaagggcgggcgggcggctgtcctctcaccgtcctcaccccgcgaggcccggcccgctcctccgtcgtggatttcgcggcgatccccccggcagctctttgcaaagctgcttgaaacttctcccaaactcggcatggatacgactgcggcggcggcgctgcctgcttttgtggcgctcttgctcctctctccttggcctctcctgggatcggcccaaggccagttctccgcaggtggctgtacttttgatgatggtccaggggcctgtgattaccaccaggatctgtatgatgactttgaatgggtgcatgttagtgctcaagagcctcattatctaccacccgagatgccccaaggttcctatatgatagtggactcttcagatcacgaccctggagaaaaagccagacttcagctgcctacaatgaaggagaacgacactcactgcattgatttcagttacctattatatagccagaaaggactgaatcctggcactttgaacatattagttagggtgaataaaggacctcttgccaatccaatttggaatgtgactggattcacgggtagagattggcttcgggctgagctagcagtgagcaccttttggcccaatgaatatcaggtaatatttgaagctgaagtctcaggagggagaagtggttatattgccattgatgacatccaagtactgagttatccttgtgataaatctcctcatttcctccgtctaggggatgtagaggtgaatgcagggcaaaacgctacatttcagtgcattgccacagggagagatgctgtgcataacaagttatggctccagagacgaaatggagaagatataccagtagcccagactaagaacatcaatcatagaaggtttgccgcttccttcagattgcaagaagtgacaaaaactgaccaggatttgtatcgctgtgtaactcagtcagaacgaggttccggtgtgtccaattttgctcaacttattgtgagagaaccgccaagacccattgctcctcctcagcttcttggtgttgggcctacatatttgctgatccaactaaatgccaactcgatcattggcgatggtcctatcatcctgaaagaagtagagtaccgaatgacatcaggatcctggacagaaacccatgcagtcaatgctccaacttacaaattatggcatttagatccagataccgaatatgagatccgagttctacttacaagacctggtgaaggtggaacggggctcccaggacctccactaatcaccagaacaaaatgtgcagaacctatgagaaccccaaagacattaaagattgctgaaatacaggcaagacggattgctgtggactgggaatccttgggttacaacattacgcgttgccacacttttaatgtcactatctgctaccattacttccgtggtcacaacgagagcaaggcagactgtttggacatggaccccaaagcccctcagcatgttgtgaaccatctgccaccttatacaaatgtcagcctcaagatgatcctaaccaatccagagggaaggaaggagagtgaagagacaattattcaaactgatgaagatgtgcctggtcccgtaccagtaaaatctcttcaaggaacatcctttgaaaataagatcttcttgaactggaaagaacctttggatccaaatggaatcatcactcaatatgagatcagctatagcagtataagatcatttgatcctgcagttccagtggctggacctccccagactgtatcaaatttatggaacagtacacaccatgtctttatgcatctccaccctggaaccacgtaccagtttttcataagagccagcacggtcaaaggctttggtccagccacagccatcaatgtcaccaccaatatctcagctccaactttacctgactatgaaggagttgatgcctctctcaatgaaactgccaccacaataactgtattgttgagaccagcacaagccaaaggtgctcctatcagtgcttatcagattgttgtggaagaactgcacccacaccgaaccaagagagaagccggagccatggaatgctaccaggttcctgtcacataccaaaatgccatgagtgggggtgcaccgtattactttgctgcagaactccccccgggaaacctacctgagcctgccccgttcactgtgggtgacaatcggacctaccaaggcttttggaaccctcctttggctccgcgcaaaggatacaacatctatttccaggcgatgagcagtgtggagaaggaaactaaaacccagtgcgtacgcattgctacaaaagcagcagcaacagaagaaccagaagtgatcccagatcccgccaagcagacagacagagtggtgaaaatagcaggaattagtgctggaattttggtgttcatcctccttctcctagttgtcatattaattgtaaaaaagagcaaacttgctaaaaaacgcaaagatgccatggggaatacccggcaggagatgactcacatggtgaatgcaatggatcgaagttatgctgatcagagcactctgcatgcagaagatcctctttccatcaccttcatggaccaacataactttagtccaagattgcccaatgatccacttgtaccgactgctgtgttagatgagaaccacagtgctacagcagagtccagtcgccttctagacgtacctcgctacctctgtgaggggacggaatccccttaccagacaggacagctgcatccagccatcagggtagctgatttactgcagcacattaatctcatgaagacatcagacagctatgggttcaaagaggaatatgagagcttttttgaaggacagtcagcatcttgggatgtagctaaaaaagatcaaaatagagcaaaaaaccgatatggaaacattatagcatatgatcactccagagtgattttgcaacccgtagaggatgatccttcctcagattatattaatgccaactatattgatatttggctgtacagggatggctaccagagaccaagtcattacattgcaacccaaggtcccgttcatgaaacagtgtatgatttctggaggatgatttggcaagaacaatctgcttgcattgtgatggttacaaatttagttgaggttggccgggttaaatgctataaatattggcctgatgatactgaagtttatggtgacttcaaagtaacgtgtgtagaaatggaaccacttgctgaatatgtagttaggacattcaccctggaaaggagggggtacaatgaaatccgtgaagttaaacagttccatttcacgggctggcctgaccatggagtgccctaccatgctacagggctgctttcctttatccggcgagtcaagttatcaaaccctcccagtgctggccccatcgttgtacattgcagtgctggtgctggacgaactggctgctacattgtgattgacatcatgctagacatggctgaaagagagggtgttgttgatatttacaattgtgtcaaagccttaagatctcggcgtattaatatggtccagacagaggaacagtacatttttattcatgatgccattttagaagcctgcttatgtggagaaactgccatacctgtctgtgaatttaaagctgcatattttgatatgattagaatagactcccagactaactcttcacatctcaaggatgaatttcagactctgaattcagtcacccctcgactacaagctgaagactgcagtatagcgtgcctgccaaggaaccatgacaagaaccgtttcatggacatgctgccacctgacagatgtctgccttttttaattacaattgatggggagagcagtaactacatcaatgctgctcttatggacagctacaggcaaccagctgctttcatcgtcacacaataccctctgccaaacactgtaaaagacttctggagattagtgtatgattatggctgtacctccattgtgatgttaaacgaagtcgacttgtcccagggctgccctcagtactggccagaggaagggatgctacgatatggccccatccaagtggaatgtatgtcttgttcaatggactgtgatgtgatcaaccggatttttaggatatgcaatctaacaagaccacaggaaggttatctgatggtgcaacagtttcagtacctaggatgggcttctcatcgagaagtgcctggatccaaaaggtcattcttgaaactgatacttcaggtggaaaagtggcaggaggaatgcgaggaaggggaaggccggacgattatccactgcctaaatggtggcgggcgaagtggcatgttctgtgctataggcatcgttgttgaaatggtgaaacggcaaaatgttgtcgatgttttccatgcagtaaagacactgaggaacagcaagccaaacatggtggaagccccggagcaataccgtttctgctatgatgtagctttggagtacctggaatcatcttagttgggtgagactctttaaagtgcatccatgaagaaacctgtccatctattgagccagcagctgttgtacctgttacacttgtgcagaaagattttaatgtggggggtgggagacttttacatttgagaggtaaaagtattttttttatgaagttgtgtatcttaataaaaaggactgaattagtttttattactatattaaagcatcaacatttcatgccacataaattatatttaataagaaccagattgaaatgagaacgtattggtgtttgtacagtgaacatgccaccttttttctcatggtttcagtagagcagctaccacatgttgcatgagttcatactttctacgtggcatttttctccctttctaaaatgaaagctgatga

SEQ ID NO: 171841 - DNA, 5816 bp, Homo sapiens
  Payload ID: 13769
  Gene Symbol: PTPRK
  Gene Name: protein tyrosine phosphatase, receptor type, K
  Uniprot ID: Q15262
  ENST ID: ENST00000368213
  CDS Start-End: 226-4566
tccgccgagcatggagagctgccgccgcggccggccggcgacgctggcgacgctttcgcccctgaggtagtttggcgaccgcgaagaaggaaaaagggcgggcgggcggctgtcctctcaccgtcctcaccccgcgaggcccggcccgctcctccgtcgtggatttcgcggcgatccccccggcagctctttgcaaagctgcttgaaacttctcccaaactcggcatggatacgactgcggcggcggcgctgcctgcttttgtggcgctcttgctcctctctccttggcctctcctgggatcggcccaaggccagttctccgcaggtggctgtacttttgatgatggtccaggggcctgtgattaccaccaggatctgtatgatgactttgaatgggtgcatgttagtgctcaagagcctcattatctaccacccgagatgccccaaggttcctatatgatagtggactcttcagatcacgaccctggagaaaaagccagacttcagctgcctacaatgaaggagaacgacactcactgcattgatttcagttacctattatatagccagaaaggactgaatcctggcactttgaacatattagttagggtgaataaaggacctcttgccaatccaatttggaatgtgactggattcacgggtagagattggcttcgggctgagctagcagtgagcaccttttggcccaatgaatatcaggtaatatttgaagctgaagtctcaggagggagaagtggttatattgccattgatgacatccaagtactgagttatccttgtgataaatctcctcatttcctccgtctaggggatgtagaggtgaatgcagggcaaaacgctacatttcagtgcattgccacagggagagatgctgtgcataacaagttatggctccagagacgaaatggagaagatataccagtagcccagactaagaacatcaatcatagaaggtttgccgcttccttcagattgcaagaagtgacaaaaactgaccaggatttgtatcgctgtgtaactcagtcagaacgaggttccggtgtgtccaattttgctcaacttattgtgagagaaccgccaagacccattgctcctcctcagcttcttggtgttgggcctacatatttgctgatccaactaaatgccaactcgatcattggcgatggtcctatcatcctgaaagaagtagagtaccgaatgacatcaggatcctggacagaaacccatgcagtcaatgctccaacttacaaattatggcatttagatccagataccgaatatgagatccgagttctacttacaagacctggtgaaggtggaacggggctcccaggacctccactaatcaccagaacaaaatgtgcagaacctatgagaaccccaaagacattaaagattgctgaaatacaggcaagacggattgctgtggactgggaatccttgggttacaacattacgcgttgccacacttttaatgtcactatctgctaccattacttccgtggtcacaacgagagcaaggcagactgtttggacatggaccccaaagcccctcagcatgttgtgaaccatctgccaccttatacaaatgtcagcctcaagatgatcctaaccaatccagagggaaggaaggagagtgaagagacaattattcaaactgatgaagatgtgcctggtcccgtaccagtaaaatctcttcaaggaacatcctttgaaaataagatcttcttgaactggaaagaacctttggatccaaatggaatcatcactcaatatgagatcagctatagcagtataagatcatttgatcctgcagttccagtggctggacctccccagactgtatcaaatttatggaacagtacacaccatgtctttatgcatctccaccctggaaccacgtaccagtttttcataagagccagcacggtcaaaggctttggtccagccacagccatcaatgtcaccaccaatatctcagctccaactttacctgactatgaaggagttgatgcctctctcaatgaaactgccaccacaataactgtattgttgagaccagcacaagccaaaggtgctcctatcagtgcttatcagattgttgtggaagaactgcacccacaccgaaccaagagagaagccggagccatggaatgctaccaggttcctgtcacataccaaaatgccatgagtgggggtgcaccgtattactttgctgcagaactccccccgggaaacctacctgagcctgccccgttcactgtgggtgacaatcggacctaccaaggcttttggaaccctcctttggctccgcgcaaaggatacaacatctatttccaggcgatgagcagtgtggagaaggaaactaaaacccagtgcgtacgcattgctacaaaagcagcagcaacagaagaaccagaagtgatcccagatcccgccaagcagacagacagagtggtgaaaatagcaggaattagtgctggaattttggtgttcatcctccttctcctagttgtcatattaattgtaaaaaagagcaaacttgctaaaaaacgcaaagatgccatggggaatacccggcaggagatgactcacatggtgaatgcaatggatcgaagttatgctgatcagagcactctgcatgcagaagatcctctttccatcaccttcatggaccaacataactttagtccaagatatgagaaccacagtgctacagcagagtccagtcgccttctagacgtacctcgctacctctgtgaggggacggaatccccttaccagacaggacagctgcatccagccatcagggtagctgatttactgcagcacattaatctcatgaagacatcagacagctatgggttcaaagaggaatatgagagcttttttgaaggacagtcagcatcttgggatgtagctaaaaaagatcaaaatagagcaaaaaaccgatatggaaacattatagcatatgatcactccagagtgattttgcaacccgtagaggatgatccttcctcagattatattaatgccaactatattgatatttggctgtacagggatggctaccagagaccaagtcattacattgcaacccaaggtcccgttcatgaaacagtgtatgatttctggaggatgatttggcaagaacaatctgcttgcattgtgatggttacaaatttagttgaggttggccgggttaaatgctataaatattggcctgatgatactgaagtttatggtgacttcaaagtaacgtgtgtagaaatggaaccacttgctgaatatgtagttaggacattcaccctggaaaggagggggtacaatgaaatccgtgaagttaaacagttccatttcacgggctggcctgaccatggagtgccctaccatgctacagggctgctttcctttatccggcgagtcaagttatcaaaccctcccagtgctggccccatcgttgtacattgcagtgctggtgctggacgaactggctgctacattgtgattgacatcatgctagacatggctgaaagagagggtgttgttgatatttacaattgtgtcaaagccttaagatctcggcgtattaatatggtccagacagaggaacagtacatttttattcatgatgccattttagaagcctgcttatgtggagaaactgccatacctgtctgtgaatttaaagctgcatattttgatatgattagaatagactcccagactaactcttcacatctcaaggatgaatttcagactctgaattcagtcacccctcgactacaagctgaagactgcagtatagcgtgcctgccaaggaaccatgacaagaaccgtttcatggacatgctgccacctgacagatgtctgccttttttaattacaattgatggggagagcagtaactacatcaatgctgctcttatggacagctacaggcaaccagctgctttcatcgtcacacaataccctctgccaaacactgtaaaagacttctggagattagtgtatgattatggctgtacctccattgtgatgttaaacgaagtcgacttgtcccagggctgccctcagtactggccagaggaagggatgctacgatatggccccatccaagtggaatgtatgtcttgttcaatggactgtgatgtgatcaaccggatttttaggatatgcaatctaacaagaccacaggaaggttatctgatggtgcaacagtttcagtacctaggatgggcttctcatcgagaagtgcctggatccaaaaggtcattcttgaaactgatacttcaggtggaaaagtggcaggaggaatgcgaggaaggggaaggccggacgattatccactgcctaaatggtggcgggcgaagtggcatgttctgtgctataggcatcgttgttgaaatggtgaaacggcaaaatgttgtcgatgttttccatgcagtaaagacactgaggaacagcaagccaaacatggtggaagccccggagcaataccgtttctgctatgatgtagctttggagtacctggaatcatcttagttgggtgagactctttaaagtgcatccatgaagaaacctgtccatctattgagccagcagctgttgtacctgttacacttgtgcagaaagattttaatgtggggggtgggagacttttacatttgagaggtaaaagtattttttttatgaagttgtgtatcttaataaaaaggactgaattagtttttattactatattaaagcatcaacatttcatgccacataaattatatttaataagaaccagattgaaatgagaacgtattggtgtttgtacagtgaacatgccaccttttttctcatggtttcagtagagcagctaccacatgttgcatgagttcatactttctacgtggcatttttctccctttctaaaatgaaagctgatgaatcttaaaaggaagaagaaaagaaaagctgtgcaaattcatagtaaagttcgttttttatatgtttccagtgtagcagatctctatataaatatataaatatatataactggcttattttcttttaatgtgcaatgatggctggatcatttaaagttctttttagaaaataacataagccaaagactcaagtgtaaatatgtctatatggagaaagcacattatatttattggttacttacattccttttttgatggctaaaatactaccaccacacaatcatcttttttttcctgaagaaagctttttctttagctaaaatcaattgtaaacgatttttgtagattattttttgtatgttttagtgtaagtagaagataaactttttattcataaaccaggaagcaatgttctttatagtgattctcttgtgtacatgcttgtgaattaaatttgtgtaaaatcccttggcaattgggtcttttaatataggaccaaattaaaacattttgctgaatatgtatagtttttcacaatttcattaggtaaataatggtttggtgatcatacatgagaaatgtacacattaaaaggccttgctgacaacttgcacaatgttgaacatagcctttaagcatcatttaaattttaaaggaatggagtttttcagcctgtggcccagcactggtcaagaaaacaagatggcaacatatatgctttcagggtcaaatttgagcaaactgtaaactgtcagggtgataaaatgtttctcttgatgtttacatgcacaagctttgcgttctgactataaaaagtgtgaacaaatcaatgccagattcctgttttgcgcattgtcatgg

SEQ ID NO: 171842 - DNA, 4651 bp, Homo sapiens
  Payload ID: 13769
  Gene Symbol: PTPRK
  Gene Name: protein tyrosine phosphatase, receptor type, K
  Uniprot ID: Q15262
  ENST ID: ENST00000368215
  CDS Start-End: 1-4320
atggatacgactgcggcggcggcgctgcctgcttttgtggcgctcttgctcctctctccttggcctctcctgggatcggcccaaggccagttctccgcaggtggctgtacttttgatgatggtccaggggcctgtgattaccaccaggatctgtatgatgactttgaatgggtgcatgttagtgctcaagagcctcattatctaccacccgagatgccccaaggttcctatatgatagtggactcttcagatcacgaccctggagaaaaagccagacttcagctgcctacaatgaaggagaacgacactcactgcattgatttcagttacctattatatagccagaaaggactgaatcctggcactttgaacatattagttagggtgaataaaggacctcttgccaatccaatttggaatgtgactggattcacgggtagagattggcttcgggctgagctagcagtgagcaccttttggcccaatgaatatcaggtaatatttgaagctgaagtctcaggagggagaagtggttatattgccattgatgacatccaagtactgagttatccttgtgataaatctcctcatttcctccgtctaggggatgtagaggtgaatgcagggcaaaacgctacatttcagtgcattgccacagggagagatgctgtgcataacaagttatggctccagagacgaaatggagaagatataccagtagcccagactaagaacatcaatcatagaaggtttgccgcttccttcagattgcaagaagtgacaaaaactgaccaggatttgtatcgctgtgtaactcagtcagaacgaggttccggtgtgtccaattttgctcaacttattgtgagagaaccgccaagacccattgctcctcctcagcttcttggtgttgggcctacatatttgctgatccaactaaatgccaactcgatcattggcgatggtcctatcatcctgaaagaagtagagtaccgaatgacatcaggatcctggacagaaacccatgcagtcaatgctccaacttacaaattatggcatttagatccagataccgaatatgagatccgagttctacttacaagacctggtgaaggtggaacggggctcccaggacctccactaatcaccagaacaaaatgtgcagaacctatgagaaccccaaagacattaaagattgctgaaatacaggcaagacggattgctgtggactgggaatccttgggttacaacattacgcgttgccacacttttaatgtcactatctgctaccattacttccgtggtcacaacgagagcaaggcagactgtttggacatggaccccaaagcccctcagcatgttgtgaaccatctgccaccttatacaaatgtcagcctcaagatgatcctaaccaatccagagggaaggaaggagagtgaagagacaattattcaaactgatgaagatgtgcctggtcccgtaccagtaaaatctcttcaaggaacatcctttgaaaataagatcttcttgaactggaaagaacctttggatccaaatggaatcatcactcaatatgagatcagctatagcagtataagatcatttgatcctgcagttccagtggctggacctccccagactgtatcaaatttatggaacagtacacaccatgtctttatgcatctccaccctggaaccacgtaccagtttttcataagagccagcacggtcaaaggctttggtccagccacagccatcaatgtcaccaccaatatctcagctccaactttacctgactatgaaggagttgatgcctctctcaatgaaactgccaccacaataactgtattgttgagaccagcacaagccaaaggtgctcctatcagtgcttatcagattgttgtggaagaactgcacccacaccgaaccaagagagaagccggagccatggaatgctaccaggttcctgtcacataccaaaatgccatgagtgggggtgcaccgtattactttgctgcagaactccccccgggaaacctacctgagcctgccccgttcactgtgggtgacaatcggacctaccaaggcttttggaaccctcctttggctccgcgcaaaggatacaacatctatttccaggcgatgagcagtgtggagaaggaaactaaaacccagtgcgtacgcattgctacaaaagcagcaacagaagaaccagaagtgatcccagatcccgccaagcagacagacagagtggtgaaaatagcaggaattagtgctggaattttggtgttcatcctccttctcctagttgtcatattaattgtaaaaaagagcaaacttgctaaaaaacgcaaagatgccatggggaatacccggcaggagatgactcacatggtgaatgcaatggatcgaagttatgctgatcagagcactctgcatgcagaagatcctctttccatcaccttcatggaccaacataactttagtccaagatatgagaaccacagtgctacagcagagtccagtcgccttctagacgtacctcgctacctctgtgaggggacggaatccccttaccagacaggacagctgcatccagccatcagggtagctgatttactgcagcacattaatctcatgaagacatcagacagctatgggttcaaagaggaatatgagagcttttttgaaggacagtcagcatcttgggatgtagctaaaaaagatcaaaatagagcaaaaaaccgatatggaaacattatagcatatgatcactccagagtgattttgcaacccgtagaggatgatccttcctcagattatattaatgccaactatattgatggctaccagagaccaagtcattacattgcaacccaaggtcccgttcatgaaacagtgtatgatttctggaggatgatttggcaagaacaatctgcttgcattgtgatggttacaaatttagttgaggttggccgggttaaatgctataaatattggcctgatgatactgaagtttatggtgacttcaaagtaacgtgtgtagaaatggaaccacttgctgaatatgtagttaggacattcaccctggaaaggagggggtacaatgaaatccgtgaagttaaacagttccatttcacgggctggcctgaccatggagtgccctaccatgctacagggctgctttcctttatccggcgagtcaagttatcaaaccctcccagtgctggccccatcgttgtacattgcagtgctggtgctggacgaactggctgctacattgtgattgacatcatgctagacatggctgaaagagagggtgttgttgatatttacaattgtgtcaaagccttaagatctcggcgtattaatatggtccagacagaggaacagtacatttttattcatgatgccattttagaagcctgcttatgtggagaaactgccatacctgtctgtgaatttaaagctgcatattttgatatgattagaatagactcccagactaactcttcacatctcaaggatgaatttcagactctgaattcagtcacccctcgactacaagctgaagactgcagtatagcgtgcctgccaaggaaccatgacaagaaccgtttcatggacatgctgccacctgacagatgtctgccttttttaattacaattgatggggagagcagtaactacatcaatgctgctcttatggacagctacaggcaaccagctgctttcatcgtcacacaataccctctgccaaacactgtaaaagacttctggagattagtgtatgattatggctgtacctccattgtgatgttaaacgaagtcgacttgtcccagggctgccctcagtactggccagaggaagggatgctacgatatggccccatccaagtggaatgtatgtcttgttcaatggactgtgatgtgatcaaccggatttttaggatatgcaatctaacaagaccacaggaaggttatctgatggtgcaacagtttcagtacctaggatgggcttctcatcgagaagtgcctggatccaaaaggtcattcttgaaactgatacttcaggtggaaaagtggcaggaggaatgcgaggaaggggaaggccggacgattatccactgcctaaatggtggcgggcgaagtggcatgttctgtgctataggcatcgttgttgaaatggtgaaacggcaaaatgttgtcgatgttttccatgcagtaaagacactgaggaacagcaagccaaacatggtggaagccccggagcaataccgtttctgctatgatgtagctttggagtacctggaatcatcttagttgggtgagactctttaaagtgcatccatgaagaaacctgtccatctattgagccagcagctgttgtacctgttacacttgtgcagaaagattttaatgtggggggtgggagacttttacatttgagaggtaaaagtattttttttatgaagttgtgtatcttaataaaaaggactgaattagtttttattactatattaaagcatcaacatttcatgccacataaattatatttaataagaaccagattgaaatgagaacgtattggtgtttgtacagtgaacatgccaccttttttctcatggtttcagtagagcagctaccacatgtt

SEQ ID NO: 171843 - DNA, 6087 bp, Homo sapiens
  Payload ID: 13769
  Gene Symbol: PTPRK
  Gene Name: protein tyrosine phosphatase, receptor type, K
  Uniprot ID: Q15262
  ENST ID: ENST00000368226
  CDS Start-End: 317-4639
agaagcgcccggagcccgcggggcgacgtcacccccggctccgcccccgtccctccccgagcaaagtaactcttgactaacaggagcagcctccgccgagcatggagagctgccgccgcggccggccggcgacgctggcgacgctttcgcccctgaggtagtttggcgaccgcgaagaaggaaaaagggcgggcgggcggctgtcctctcaccgtcctcaccccgcgaggcccggcccgctcctccgtcgtggatttcgcggcgatccccccggcagctctttgcaaagctgcttgaaacttctcccaaactcggcatggatacgactgcggcggcggcgctgcctgcttttgtggcgctcttgctcctctctccttggcctctcctgggatcggcccaaggccagttctccgcaggtggctgtacttttgatgatggtccaggggcctgtgattaccaccaggatctgtatgatgactttgaatgggtgcatgttagtgctcaagagcctcattatctaccacccgagatgccccaaggttcctatatgatagtggactcttcagatcacgaccctggagaaaaagccagacttcagctgcctacaatgaaggagaacgacactcactgcattgatttcagttacctattatatagccagaaaggactgaatcctggcactttgaacatattagttagggtgaataaaggacctcttgccaatccaatttggaatgtgactggattcacgggtagagattggcttcgggctgagctagcagtgagcaccttttggcccaatgaatatcaggtaatatttgaagctgaagtctcaggagggagaagtggttatattgccattgatgacatccaagtactgagttatccttgtgataaatctcctcatttcctccgtctaggggatgtagaggtgaatgcagggcaaaacgctacatttcagtgcattgccacagggagagatgctgtgcataacaagttatggctccagagacgaaatggagaagatataccagtagcccagactaagaacatcaatcatagaaggtttgccgcttccttcagattgcaagaagtgacaaaaactgaccaggatttgtatcgctgtgtaactcagtcagaacgaggttccggtgtgtccaattttgctcaacttattgtgagagaaccgccaagacccattgctcctcctcagcttcttggtgttgggcctacatatttgctgatccaactaaatgccaactcgatcattggcgatggtcctatcatcctgaaagaagtagagtaccgaatgacatcaggatcctggacagaaacccatgcagtcaatgctccaacttacaaattatggcatttagatccagataccgaatatgagatccgagttctacttacaagacctggtgaaggtggaacggggctcccaggacctccactaatcaccagaacaaaatgtgcagaacctatgagaaccccaaagacattaaagattgctgaaatacaggcaagacggattgctgtggactgggaatccttgggttacaacattacgcgttgccacacttttaatgtcactatctgctaccattacttccgtggtcacaacgagagcaaggcagactgtttggacatggaccccaaagcccctcagcatgttgtgaaccatctgccaccttatacaaatgtcagcctcaagatgatcctaaccaatccagagggaaggaaggagagtgaagagacaattattcaaactgatgaagatgtgcctggtcccgtaccagtaaaatctcttcaaggaacatcctttgaaaataagatcttcttgaactggaaagaacctttggatccaaatggaatcatcactcaatatgagatcagctatagcagtataagatcatttgatcctgcagttccagtggctggacctccccagactgtatcaaatttatggaacagtacacaccatgtctttatgcatctccaccctggaaccacgtaccagtttttcataagagccagcacggtcaaaggctttggtccagccacagccatcaatgtcaccaccaatatctcagctccaactttacctgactatgaaggagttgatgcctctctcaatgaaactgccaccacaataactgtattgttgagaccagcacaagccaaaggtgctcctatcagtgcttatcagattgttgtggaagaactgcacccacaccgaaccaagagagaagccggagccatggaatgctaccaggttcctgtcacataccaaaatgccatgagtgggggtgcaccgtattactttgctgcagaactccccccgggaaacctacctgagcctgccccgttcactgtgggtgacaatcggacctaccaaggcttttggaaccctcctttggctccgcgcaaaggatacaacatctatttccaggcgatgagcagtgtggagaaggaaactaaaacccagtgcgtacgcattgctacaaaagcagcagcaacagaagaaccagaagtgatcccagatcccgccaagcagacagacagagtggtgaaaatagcaggaattagtgctggaattttggtgttcatcctccttctcctagttgtcatattaattgtaaaaaagagcaaacttgctaaaaaacgcaaagatgccatggggaatacccggcaggagatgactcacatggtgaatgcaatggatcgaagttatgctgatcagagcactctgcatgcagaagatcctctttccatcaccttcatggaccaacataactttagtccaagatatgagaaccacagtgctacagcagagtccagtcgccttctagacgtacctcgctacctctgtgaggggacggaatccccttaccagacaggacagctgcatccagccatcagggtagctgatttactgcagcacattaatctcatgaagacatcagacagctatgggttcaaagaggaatatgagagcttttttgaaggacagtcagcatcttgggatgtagctaaaaaagatcaaaatagagcaaaaaaccgatatggaaacattatagcatatgatcactccagagtgattttgcaacccgtagaggatgatccttcctcagattatattaatgccaactatattgatggctaccagagaccaagtcattacattgcaacccaaggtcccgttcatgaaacagtgtatgatttctggaggatgatttggcaagaacaatctgcttgcattgtgatggttacaaatttagttgaggttggccgggttaaatgctataaatattggcctgatgatactgaagtttatggtgacttcaaagtaacgtgtgtagaaatggaaccacttgctgaatatgtagttaggacattcaccctggaaaggagggggtacaatgaaatccgtgaagttaaacagttccatttcacgggctggcctgaccatggagtgccctaccatgctacagggctgctttcctttatccggcgagtcaagttatcaaaccctcccagtgctggccccatcgttgtacattgcagtgctggtgctggacgaactggctgctacattgtgattgacatcatgctagacatggctgaaagagagggtgttgttgatatttacaattgtgtcaaagccttaagatctcggcgtattaatatggtccagacagaggaacagtacatttttattcatgatgccattttagaagcctgcttatgtggagaaactgccatacctgtctgtgaatttaaagctgcatattttgatatgattagaatagactcccagactaactcttcacatctcaaggatgaatttcagactctgaattcagtcacccctcgactacaagctgaagactgcagtatagcgtgcctgccaaggaaccatgacaagaaccgtttcatggacatgctgccacctgacagatgtctgccttttttaattacaattgatggggagagcagtaactacatcaatgctgctcttatggacagctacaggcaaccagctgctttcatcgtcacacaataccctctgccaaacactgtaaaagacttctggagattagtgtatgattatggctgtacctccattgtgatgttaaacgaagtcgacttgtcccagggctgccctcagtactggccagaggaagggatgctacgatatggccccatccaagtggaatgtatgtcttgttcaatggactgtgatgtgatcaaccggatttttaggatatgcaatctaacaagaccacaggaaggttatctgatggtgcaacagtttcagtacctaggatgggcttctcatcgagaagtgcctggatccaaaaggtcattcttgaaactgatacttcaggtggaaaagtggcaggaggaatgcgaggaaggggaaggccggacgattatccactgcctaaatggtggcgggcgaagtggcatgttctgtgctataggcatcgttgttgaaatggtgaaacggcaaaatgttgtcgatgttttccatgcagtaaagacactgaggaacagcaagccaaacatggtggaagccccggagcaataccgtttctgctatgatgtagctttggagtacctggaatcatcttagttgggtgagactctttaaagtgcatccatgaagaaacctgtccatctattgagccagcagctgttgtacctgttacacttgtgcagaaagattttaatgtggggggtgggagacttttacatttgagaggtaaaagtattttttttatgaagttgtgtatcttaataaaaaggactgaattagtttttattactatattaaagcatcaacatttcatgccacataaattatatttaataagaaccagattgaaatgagaacgtattggtgtttgtacagtgaacatgccaccttttttctcatggtttcagtagagcagctaccacatgttgcatgagttcatactttctacgtggcatttttctccctttctaaaatgaaagctgatgaatcttaaaaggaagaagaaaagaaaagctgtgcaaattcatagtaaagttcgttttttatatgtttccagtgtagcagatctctatataaatatataaatatatataactggcttattttcttttaatgtgcaatgatggctggatcatttaaagttctttttagaaaataacataagccaaagactcaagtgtaaatatgtctatatggagaaagcacattatatttattggttacttacattccttttttgatggctaaaatactaccaccacacaatcatcttttttttcctgaagaaagctttttctttagctaaaatcaattgtaaacgatttttgtagattattttttgtatgttttagtgtaagtagaagataaactttttattcataaaccaggaagcaatgttctttatagtgattctcttgtgtacatgcttgtgaattaaatttgtgtaaaatcccttggcaattgggtcttttaatataggaccaaattaaaacattttgctgaatatgtatagtttttcacaatttcattaggtaaataatggtttggtgatcatacatgagaaatgtacacattaaaaggccttgctgacaacttgcacaatgttgaacatagcctttaagcatcatttaaattttaaaggaatggagtttttcagcctgtggcccagcactggtcaagaaaacaagatggcaacatatatgctttcagggtcaaatttgagcaaactgtaaactgtcagggtgataaaatgtttctcttgatgtttacatgcacaagctttgcgttctgactataaaaagtgtgaacaaatcaatgccagattcctgttttgcgcattgtcatgggattcttaagtgaacctttctaaatgtggtcttgttcacatgctccacgtagctgtaacttcacatcatcagcttgcagtttgtaattgactaaagcattccagtgtcctctttctagattgccagctcatgacatggtgcttataaagatttaattaaagtaagaatgaaataaagtttttataattataacagtta

SEQ ID NO: 171844 - DNA, 1456 bp, Homo sapiens
  Payload ID: 13769
  Gene Symbol: PTPRK
  Gene Name: protein tyrosine phosphatase, receptor type, K
  ENST ID: ENST00000392449
  CDS Start-End: 208-441
ctgccgccgcggccggccggcgacgctggcgacgctttcgcccctgaggtagtttggcgaccgcgaagaaggaaaaagggcgggcgggcggctgtcctctcaccgtcctcaccccgcgaggcccggcccgctcctccgtcgtggatttcgcggcgatccccccggcagctctttgcaaagctgcttgaaacttctcccaaactcggcatggatacgactgcggcggcggcgctgcctgcttttgtggcgctcttgctcctctctccttggcctctcctgggatcggcccaaggccagttctccgcagtgtctgtgcttgtggtcggtaacttttgctgctgttgttctgctgctgtctgccattccattcgccatctatcacgcacacagaaccctggccaggatcatgaagggcgattgaaaaggtggctgtacttttgatgatggtccaggggcctgtgattaccaccaggatctgtatgatgactttgaatgggtgcatgttagtgctcaagagcctcattatctaccacccgagatgccccaaggttcctatatgatagtggactcttcagatcacgaccctggagaaaaagccagacttcagctgcctacaatgaaggagaacgacactcactgcattgatttcagttacctattatatagccagaaaggactgaatcctggcactttgaacatattagttagggtgaataaaggacctcttgccaatccaatttggaatgtgactggattcacgggtagagattggcttcgggctgagctagcagtgagcaccttttggcccaatgaatatcaggtaatcatctgtacttttctggtgtatgttttgatgtcatcagttctcactatatgtgtaatacatagatgtaaatatgcatctcatggtaatgagagattgccctcttgcctcccccacccccattattggggaagtgtcatacatagatatacatatgcatcccatggtaatgagagattgcccctctttcttccccaccctgttgatgaggaagtgtttggagacattggcacaaaaccttcaaactagagaaagtatttctatgtgttaaaataagtttaggtccaaaatttgttggtggtttgacaaagagctacttattgacagattctttcctacagctttgttcaggaagaaatagcctttttgagtttattgtaatcttcagactggactgatttactgactttttgaaagtaacatttgggaaataaatgtgatgtagagtttcatgaactatgttaagggggaggcattttcattaattattttaattttgattaattaattgaataaattaaatgacatataaaaataagccaaaaaggataagttattcacaaagctttggatgtttgtttcagaaatgattcattgaattatgattaaatcagacaatcaatagtgtcagta

SEQ ID NO: 171845 - DNA, 1029 bp, Homo sapiens
  Payload ID: 13769
  Gene Symbol: PTPRK
  Gene Name: protein tyrosine phosphatase, receptor type, K
  ENST ID: ENST00000415046
  CDS Start-End: 1-1029
caaaagcagcagcaacagaagaaccagaagtgatcccagatcccgccaagcagacagacagagtggtgaaaatagcaggaattagtgctggaattttggtgttcatcctccttctcctagttgtcatattaattgtaaaaaagaggaggagctactattcttactcctactacctcaaacttgctaaaaaacgcaaagatgccatggggaatacccggcaggagatgactcacatggtgaatgcaatggatcgaagttatgctgatcagagcactctgcatgcagaagatcctctttccatcaccttcatggaccaacataactttagtccaagattgcccaatgatccacttgtaccgactgctgtgttagatgagaaccacagtgctacagcagagtccagtcgccttctagacgtacctcgctacctctgtgaggggacggaatccccttaccagacaggacagctgcatccagccatcagggtagctgatttactgcagcacattaatctcatgaagacatcagacagctatgggttcaaagaggaatatgagagcttttttgaaggacagtcagcatcttgggatgtagctaaaaaagatcaaaatagagcaaaaaaccgatatggaaacattatagcatatgatcactccagagtgattttgcaacccgtagaggatgatccttcctcagattatattaatgccaactatattgatggctaccagagaccaagtcattacattgcaacccaaggtcccgttcatgaaacagtgtatgatttctggaggatgatttggcaagaacaatctgcttgcattgtgatggttacaaatttagttgaggttggccgggttaaatgctataaatattggcctgatgatactgaagtttatggtgacttcaaagtaacgtgtgtagaaatggaaccacttgctgaatatgtagttaggacattcaccctggaaaggagggggtacaatgaaatccgtgaagttaaacagttccatttcacgggctggcctg

SEQ ID NO: 171846 - DNA, 782 bp, Homo sapiens
  Payload ID: 13769
  Gene Symbol: PTPRK
  Gene Name: protein tyrosine phosphatase, receptor type, K
  ENST ID: ENST00000415055
  CDS Start-End: 1-782
tggagaagacacatctgcattagaaacattaggaggagctactattcttactcctactacctcaaacttgctaaaaaacgcaaagatgccatggggaatacccggcaggagatgactcacatggtgaatgcaatggatcgaagttatgctgatcagagcactctgcatgcagaagatcctctttccatcaccttcatggaccaacataactttagtccaagattgcccaatgatccacttgtaccgactgctgtgttagttcctataacagatgagaaccacagtgctacagcagagtccagtcgccttctagacgtacctcgctacctctgtgaggggacggaatccccttaccagacaggacagctgcatccagccatcagggtagctgatttactgcagcacattaatctcatgaagacatcagacagctatgggttcaaagaggaatatgagagcttttttgaaggacagtcagcatcttgggatgtagctaaaaaagatcaaaatagagcaaaaaaccgatatggaaacattatagcatatgatcactccagagtgattttgcaacccgtagaggatgatccttcctcagattatattaatgccaactatattgatggctaccagagaccaagtcattacattgcaacccaaggtcccgttcatgaaacagtgtatgatttctggaggatgatttggcaagaacaatctgcttgcattgtgatggttacaaatttagttgaggttggccgggttaaatgctataaatattggcctga

SEQ ID NO: 171847 - DNA, 2515 bp, Homo sapiens
  Payload ID: 13769
  Gene Symbol: PTPRK
  Gene Name: protein tyrosine phosphatase, receptor type, K
  ENST ID: ENST00000531050
  CDS Start-End: 1-63
gtgcatgttagtgctcaagagcctcattatctaccacccgagatgccccaaggtaatatttgaagctgaagtctcaggagggagaagtggttatattgccattgatgacatccaagtactgagttatccttgtgataaatctcctcatttcctccgtctaggggatgtagaggtgaatgcagggcaaaacgctacatttcagtgcattgccacagggagagatgctgtgcataacaagttatggctccagagacgaaatggagaagatataccagtagcccagactaagaacatcaatcatagaaggtttgccgcttccttcagattgcaagaagtgacaaaaactgaccaggatttgtatcgctgtgtaactcagtcagaacgaggttccggtgtgtccaattttgctcaacttattgtgagagaaccgccaagacccattgctcctcctcagcttcttggtgttgggcctacatatttgctgatccaactaaatgccaactcgatcattggcgatggtcctatcatcctgaaagaagtagagtaccgaatgacatcaggatcctggacagaaacccatgcagtcaatgctccaacttacaaattatggcatttagatccagataccgaatatgagatccgagttctacttacaagacctggtgaaggtggaacggggctcccaggacctccactaatcaccagaacaaaatgtgcagaacctatgagaaccccaaagacattaaagattgctgaaatacaggcaagacggattgctgtggactgggaatccttgggttacaacattacgcgttgccacacttttaatgtcactatctgctaccattacttccgtggtcacaacgagagcaaggcagactgtttggacatggaccccaaagcccctcagcatgttgtgaaccatctgccaccttatacaaatgtcagcctcaagatgatcctaaccaatccagagggaaggaaggagagtgaagagacaattattcaaactgatgaagatgtgcctggtcccgtaccagtaaaatctcttcaaggaacatcctttgaaaataagatcttcttgaactggaaagaacctttggatccaaatggaatcatcactcaatatgagatcagctatagcagtataagatcatttgatcctgcagttccagtggctggacctccccagactgtatcaaatttatggaacagtacacaccatgtctttatgcatctccaccctggaaccacgtaccagtttttcataagagccagcacggtcaaaggctttggtccagccacagccatcaatgtcaccaccaatatctcagctccaactttacctgactatgaaggagttgatgcctctctcaatgaaactgccaccacaataactgtattgttgagaccagcacaagccaaaggtgctcctatcagtgcttatcagattgttgtggaagaactgcacccacaccgaaccaagagagaagccggagccatggaatgctaccaggttcctgtcacataccaaaatgccatgagtgggggtgcaccgtattactttgctgcagaactccccccgggaaacctacctgagcctgccccgttcactgtgggtgacaatcggacctaccaaggcttttggaaccctcctttggctccgcgcaaaggatacaacatctatttccaggcgatgagcagtgtggagaaggaaactaaaacccagtgcgtacgcattgctacaaaagcagcagcaacagaagaaccagaagtgatcccagatcccgccaagcagacagacagagtggtgaaaatagcaggaattagtgctggaattttggtgttcatcctccttctcctagttgtcatattaattgtaaaaaagagatatatatgttggagaagacacatctgcattagaaacattaggaggagctactattcttactcctactacctcaaacttgctaaaaaacgcaaagatgccatggggaatacccggcaggagatgactcacatggtgaatgcaatggatcgaagttatgctgatcagagcactctgcatgcagaagatcctctttccatcaccttcatggaccaacataactttagtccaagattgcccaatgatccacttgtaccgactgctgtgttagttcctataacaggaagaaaaaatgtttatcatggggacaacaattcattttttgctatatcctatttgtagagttggtgatagaacaggcaaatgtactagcacttgaaatatgtttatctgttaattaaatatcattctctacagtatgcattatcattaaaaaaaaagttcccctaagagtgtattttctcttctgttaatgagtatgacggtataatgcttttcaaagtaacaccccttaaaacatttgtttttttttttaagtggtaagtttaaatgtgataaatatgagcatgcttctcgttgtaatgtttagtacttcggtcattaaagtactgtttattcttcataggc

SEQ ID NO: 171848 - DNA, 5757 bp, Homo sapiens
  Payload ID: 13769
  Gene Symbol: PTPRK
  Gene Name: protein tyrosine phosphatase, receptor type, K
  Uniprot ID: Q15262
  ENST ID: ENST00000532331
  CDS Start-End: 119-4507
ggctgtcctctcaccgtcctcaccccgcgaggcccggcccgctcctccgtcgtggatttcgcggcgatccccccggcagctctttgcaaagctgcttgaaacttctcccaaactcggcatggatacgactgcggcggcggcgctgcctgcttttgtggcgctcttgctcctctctccttggcctctcctgggatcggcccaaggccagttctccgcaggtggctgtacttttgatgatggtccaggggcctgtgattaccaccaggatctgtatgatgactttgaatgggtgcatgttagtgctcaagagcctcattatctaccacccgagatgccccaaggttcctatatgatagtggactcttcagatcacgaccctggagaaaaagccagacttcagctgcctacaatgaaggagaacgacactcactgcattgatttcagttacctattatatagccagaaaggactgaatcctggcactttgaacatattagttagggtgaataaaggacctcttgccaatccaatttggaatgtgactggattcacgggtagagattggcttcgggctgagctagcagtgagcaccttttggcccaatgaatatcaggtaatatttgaagctgaagtctcaggagggagaagtggttatattgccattgatgacatccaagtactgagttatccttgtgataaatctcctcatttcctccgtctaggggatgtagaggtgaatgcagggcaaaacgctacatttcagtgcattgccacagggagagatgctgtgcataacaagttatggctccagagacgaaatggagaagatataccagtagcccagactaagaacatcaatcatagaaggtttgccgcttccttcagattgcaagaagtgacaaaaactgaccaggatttgtatcgctgtgtaactcagtcagaacgaggttccggtgtgtccaattttgctcaacttattgtgagagaaccgccaagacccattgctcctcctcagcttcttggtgttgggcctacatatttgctgatccaactaaatgccaactcgatcattggcgatggtcctatcatcctgaaagaagtagagtaccgaatgacatcaggatcctggacagaaacccatgcagtcaatgctccaacttacaaattatggcatttagatccagataccgaatatgagatccgagttctacttacaagacctggtgaaggtggaacggggctcccaggacctccactaatcaccagaacaaaatgtgcagaacctatgagaaccccaaagacattaaagattgctgaaatacaggcaagacggattgctgtggactgggaatccttgggttacaacattacgcgttgccacacttttaatgtcactatctgctaccattacttccgtggtcacaacgagagcaaggcagactgtttggacatggaccccaaagcccctcagcatgttgtgaaccatctgccaccttatacaaatgtcagcctcaagatgatcctaaccaatccagagggaaggaaggagagtgaagagacaattattcaaactgatgaagatgtgcctggtcccgtaccagtaaaatctcttcaaggaacatcctttgaaaataagatcttcttgaactggaaagaacctttggatccaaatggaatcatcactcaatatgagatcagctatagcagtataagatcatttgatcctgcagttccagtggctggacctccccagactgtatcaaatttatggaacagtacacaccatgtctttatgcatctccaccctggaaccacgtaccagtttttcataagagccagcacggtcaaaggctttggtccagccacagccatcaatgtcaccaccaatatctcagctccaactttacctgactatgaaggagttgatgcctctctcaatgaaactgccaccacaataactgtattgttgagaccagcacaagccaaaggtgctcctatcagtgcttatcagattgttgtggaagaactgcacccacaccgaaccaagagagaagccggagccatggaatgctaccaggttcctgtcacataccaaaatgccatgagtgggggtgcaccgtattactttgctgcagaactccccccgggaaacctacctgagcctgccccgttcactgtgggtgacaatcggacctaccaaggcttttggaaccctcctttggctccgcgcaaaggatacaacatctatttccaggcgatgagcagtgtggagaaggaaactaaaacccagtgcgtacgcattgctacaaaagcagcagcaacagaagaaccagaagtgatcccagatcccgccaagcagacagacagagtggtgaaaatagcaggaattagtgctggaattttggtgttcatcctccttctcctagttgtcatattaattgtaaaaaagagcaaacttgctaaaaaacgcaaagatgccatggggaatacccggcaggagatgactcacatggtgaatgcaatggatcgaagttatgctgatcagagcactctgcatgcagaagatcctctttccatcaccttcatggaccaacataactttagtccaagattgcccaatgatccacttgtaccgactgctgtgttagttcctataacagatgagaaccacagtgctacagcagagtccagtcgccttctagacgtacctcgctacctctgtgaggggacggaatccccttaccagacaggacagctgcatccagccatcagggtagctgatttactgcagcacattaatctcatgaagacatcagacagctatgggttcaaagaggaatatgagagcttttttgaaggacagtcagcatcttgggatgtagctaaaaaagatcaaaatagagcaaaaaaccgatatggaaacattatagcatatgatcactccagagtgattttgcaacccgtagaggatgatccttcctcagattatattaatgccaactatattgatatttggctgtacagggatggctaccagagaccaagtcattacattgcaacccaaggtcccgttcatgaaacagtgtatgatttctggaggatgatttggcaagaacaatctgcttgcattgtgatggttacaaatttagttgaggttggccgggttaaatgctataaatattggcctgatgatactgaagtttatggtgacttcaaagtaacgtgtgtagaaatggaaccacttgctgaatatgtagttaggacattcaccctggaaaggagggggtacaatgaaatccgtgaagttaaacagttccatttcacgggctggcctgaccatggagtgccctaccatgctacagggctgctttcctttatccggcgagtcaagttatcaaaccctcccagtgctggccccatcgttgtacattgcagtgctggtgctggacgaactggctgctacattgtgattgacatcatgctagacatggctgaaagagagggtgttgttgatatttacaattgtgtcaaagccttaagatctcggcgtattaatatggtccagacagaggaacagtacatttttattcatgatgccattttagaagcctgcttatgtggagaaactgccatacctgtctgtgaatttaaagctgcatattttgatatgattagaatagactcccagactaactcttcacatctcaaggatgaatttcagactctgaattcagtcacccctcgactacaagctgaagactgcagtatagcgtgcctgccaaggaaccatgacaagaaccgtttcatggacatgctgccacctgacagatgtctgccttttttaattacaattgatggggagagcagtaactacatcaatgctgctcttatggacagctacaggcaaccagctgctttcatcgtcacacaataccctctgccaaacactgtaaaagacttctggagattagtgtatgattatggctgtacctccattgtgatgttaaacgaagtcgacttgtcccagggctgccctcagtactggccagaggaagggatgctacgatatggccccatccaagtggaatgtatgtcttgttcaatggactgtgatgtgatcaaccggatttttaggatatgcaatctaacaagaccacaggaaggttatctgatggtgcaacagtttcagtacctaggatgggcttctcatcgagaagtgcctggatccaaaaggtcattcttgaaactgatacttcaggtggaaaagtggcaggaggaatgcgaggaaggggaaggccggacgattatccactgcctaaatggtggcgggcgaagtggcatgttctgtgctataggcatcgttgttgaaatggtgaaacggcaaaatgttgtcgatgttttccatgcagtaaagacactgaggaacagcaagccaaacatggtggaagccccggagcaataccgtttctgctatgatgtagctttggagtacctggaatcatcttagttgggtgagactctttaaagtgcatccatgaagaaacctgtccatctattgagccagcagctgttgtacctgttacacttgtgcagaaagattttaatgtggggggtgggagacttttacatttgagaggtaaaagtattttttttatgaagttgtgtatcttaataaaaaggactgaattagtttttattactatattaaagcatcaacatttcatgccacataaattatatttaataagaaccagattgaaatgagaacgtattggtgtttgtacagtgaacatgccaccttttttctcatggtttcagtagagcagctaccacatgttgcatgagttcatactttctacgtggcatttttctccctttctaaaatgaaagctgatgaatcttaaaaggaagaagaaaagaaaagctgtgcaaattcatagtaaagttcgttttttatatgtttccagtgtagcagatctctatataaatatataaatatatataactggcttattttcttttaatgtgcaatgatggctggatcatttaaagttctttttagaaaataacataagccaaagactcaagtgtaaatatgtctatatggagaaagcacattatatttattggttacttacattccttttttgatggctaaaatactaccaccacacaatcatcttttttttcctgaagaaagctttttctttagctaaaatcaattgtaaacgatttttgtagattattttttgtatgttttagtgtaagtagaagataaactttttattcataaaccaggaagcaatgttctttatagtgattctcttgtgtacatgcttgtgaattaaatttgtgtaaaatcccttggcaattgggtcttttaatataggaccaaattaaaacattttgctgaatatgtatagtttttcacaatttcattaggtaaataatggtttggtgatcatacatgagaaatgtacacattaaaaggccttgctgacaacttgcacaatgttgaacatagcctttaagcatcatttaaattttaaaggaatggagtttttcagcctgtggcccagcactggtcaagaaaacaagatggcaacatatatgctttcagggtcaaatttgagcaaactgtaaactgtcagggtgataaaatgtttctcttgatgtttacatgcacaagctttgcgttctgactataaaaagtgtgaacaaatcaatgccagattcctgttttgcgcattgtcatgg

SEQ ID NO: 171849 - DNA, 612 bp, Homo sapiens
  Payload ID: 13769
  Gene Symbol: PTPRK
  Gene Name: protein tyrosine phosphatase, receptor type, K
  ENST ID: ENST00000490332
  CDS Start-End: 1-612
tgaatcctggcactttgaacatattagttagggtgaataaaggacctcttgccaatccaatttggaatgtgactggattcacgggtagagattggcttcgggctgagctagcagtgagcaccttttggcccaatgaatatcagagacgaaatggagaagatataccagtagcccagactaagaacatcaatcatagaaggtttgccgcttccttcagattgcaagaagtgacaaaaactgaccaggatttgtatcgctgtgtaactcagtcagaacgaggttccggtgtgtccaattttgctcaacttattgtgagagaaccgccaagacccattgctcctcctcagcttcttggtgttgggcctacatatttgctgatccaactaaatgccaactcgatcattggcgatggtcctatcatcctgaaagaagtagagtaccgaatgacatcaggatcctggacagaaacccatgcagtcaatgctccaacttacaaattatggcatttagatccagataccgaatatgagatccgagttctacttacaagacctggtgaaggtggaacggggctcccaggacctccactaatcaccagaacaaaatgtgcag

SEQ ID NO: 171850 - DNA, 1722 bp, Homo sapiens
  Payload ID: 13769
  Gene Symbol: PTPRK
  Gene Name: protein tyrosine phosphatase, receptor type, K
  ENST ID: ENST00000525459
  CDS Start-End: 230-976
agcctccgccgagcatggagagctgccgccgcggccggccggcgacgctggcgacgctttcgcccctgaggtagtttggcgaccgcgaagaaggaaaaagggcgggcgggcggctgtcctctcaccgtcctcaccccgcgaggcccggcccgctcctccgtcgtggatttcgcggcgatccccccggcagctctttgcaaagctgcttgaaacttctcccaaactcggcatggatacgactgcggcggcggcgctgcctgcttttgtggcgctcttgctcctctctccttggcctctcctgggatcggcccaaggccagttctccgcaggtggctgtacttttgatgatggtccaggggcctgtgattaccaccaggatctgtatgatgactttgaatgggtgcatgttagtgctcaagagcctcattatctaccacccgagatgccccaaggttcctatatgatagtggactcttcagatcacgaccctggagaaaaagccagacttcagctgcctacaatgaaggagaacgacactcactgcattgatttcagttacctattatatagccagaaaggactgaatcctggcactttgaacatattagttagggtgaataaaggacctcttgccaatccaatttggaatgtgactggattcacgggtagagattggcttcgggctgagctagcagtgagcaccttttggcccaatgaatatcaggtaatcatctgtacttttctggtgtatgttttgatgtcatcagttctcactatatgtgtaatacatagatgtaaatatgcatctcatggtaatgagagattgccctcttgcctcccccacccccattattggggaagtgtcatacatagatatacatatgcatcccatggtaatgagagattgcccctctttcttccccaccctgttgatgaggaagtgtttggagacattggcacaaaaccttcaaactagagaaagtatttctatgtgttaaaataagtttaggtccaaaatttgttggtggtttgacaaagagctacttattgacagattctttcctacagctttgttcaggaagaaatagcctttttgagtttattgtaatcttcagactggactgatttactgactttttgaaagtaacatttgggaaataaatgtgatgtagagtttcatgaactatgttaagggggaggcattttcattaattattttaattttgattaattaattgaataaattaaatgacatataaaaataagccaaaaaggataagttattcacaaagctttggatgtttgtttcagaaatgattcattgaattatgattaaatcagacaatcaatagtgtcagtacccactttatgattctgtgactgagtttatatgctcttaacaaaaaaaaggttcatttactagtttggagagtttgttcagtaaccctcactatgaggttccgtccctggatgctgttatttctttaaaaggtcaattttgtgttagaccttgagatttaaacttttaaaggacttgtttatttgtagcttattataaagcctaaagagaatacatttatgtaaaagtatattttatgatggtcagcaagcaatatataaactaatagttttatttctgccttttaaaaatgaattatgtctttaagttaggtttgtctttattcttgaaggggaaaaaagaaatgctttgctttaattgct

SEQ ID NO: 171851 - DNA, 563 bp, Homo sapiens
  Payload ID: 13769
  Gene Symbol: PTPRK
  Gene Name: protein tyrosine phosphatase, receptor type, K
  ENST ID: ENST00000532751
  CDS Start-End: 242-361
actaacaggagcagcctccgccgagcatggagagctgccgccgcggccggccggcgacgctggcgacgctttcgcccctgaggtagtttggcgaccgcgaagaaggaaaaagggcgggcgggcggctgtcctctcaccgtcctcaccccgcgaggcccggcccgctcctccgtcgtggatttcgcggcgatccccccggcagctctttgcaaagctgcttgaaacttctcccaaactcggcatggatacgactgcggcggcggcgctgcctgcttttgtggcgctcttgctcctctctccttggcctctcctgggatcggcccaaggccagttctccgcagaaaaggcctgcagttactgaaatgacaagtgaaaaggaggtggctgtacttttgatgatggtccaggggcctgtgattaccaccaggatctgtatgatgactttgaatgggtgcatgttagtgctcaagagcctcattatctaccacccgagatgccccaaggttcctatatgatagtggactcttcagatcacgaccctggagaaaaagccagacttcagc

SEQ ID NO: 171852 - DNA, 5757 bp, Homo sapiens; identical to SEQ ID NO: 171848
  Payload ID: 13769
  Gene Symbol: PTPRK
  Gene Name: protein tyrosine phosphatase, receptor type, K
  Uniprot ID: Q15262
  ENST ID: ENST00000619256
  CDS Start-End: 119-4507

SEQ ID NO: 171853 - DNA, 1456 bp, Homo sapiens; identical to SEQ ID NO: 171844
  Payload ID: 13769
  Gene Symbol: PTPRK
  Gene Name: protein tyrosine phosphatase, receptor type, K
  ENST ID: ENST00000621720
  CDS Start-End: 208-441

SEQ ID NO: 171854 - DNA, 6087 bp, Homo sapiens; identical to SEQ ID NO: 171843
  Payload ID: 13769
  Gene Symbol: PTPRK
  Gene Name: protein tyrosine phosphatase, receptor type, K
  Uniprot ID: Q15262
  ENST ID: ENST00000618924
  CDS Start-End: 317-4639

SEQ ID NO: 171855 - DNA, 5816 bp, Homo sapiens; identical to SEQ ID NO: 171841
  Payload ID: 13769
  Gene Symbol: PTPRK
  Gene Name: protein tyrosine phosphatase, receptor type, K
  Uniprot ID: Q15262
  ENST ID: ENST00000618215
  CDS Start-End: 226-4566

SEQ ID NO: 171856 - DNA, 941 bp, Homo sapiens
  Payload ID: 13769
  Gene Symbol: PTPRK
  Gene Name: protein tyrosine phosphatase, receptor type, K
  ENST ID: ENST00000625615
  CDS Start-End: 1-941
cagcagcaacagaagaaccagaagtgatcccagatcccgccaagcagacagacagagtggtgaaaatagcaggaattagtgctggaattttggtgttcatcctccttctcctagttgtcatattaattgtaaaaaagaggaggagctactattcttactcctactacctcaaacttgctaaaaaacgcaaagatgccatggggaatacccggcaggagatgactcacatggtgaatgcaatggatcgaagttatgctgatcagagcactctgcatgcagaagatcctctttccatcaccttcatggaccaacataactttagtccaagattgcccaatgatccacttgtaccgactgctgtgttagatgagaaccacagtgctacagcagagtccagtcgccttctagacgtacctcgctacctctgtgaggggacggaatccccttaccagacaggacagctgcatccagccatcagggtagctgatttactgcagcacattaatctcatgaagacatcagacagctatgggttcaaagaggaatatgagagcttttttgaaggacagtcagcatcttgggatgtagctaaaaaagatcaaaatagagcaaaaaaccgatatggaaacattatagcatatgatcactccagagtgattttgcaacccgtagaggatgatccttcctcagattatattaatgccaactatattgatggctaccagagaccaagtcattacattgcaacccaaggtcccgttcatgaaacagtgtatgatttctggaggatgatttggcaagaacaatctgcttgcattgtgatggttacaaatttagttgaggttggccgggttaaatgctataaatattggcctgatgatactgaagtttatggtgacttcaaagtaacgtgtgtagaaatggaaccacttgctgaatat

SEQ ID NO: 171857 - DNA, 563 bp, Homo sapiens; identical to SEQ ID NO: 171851
  Payload ID: 13769
  Gene Symbol: PTPRK
  Gene Name: protein tyrosine phosphatase, receptor type, K
  ENST ID: ENST00000627768
  CDS Start-End: 242-361

SEQ ID NO: 171858 - DNA, 2515 bp, Homo sapiens; identical to SEQ ID NO: 171847
  Payload ID: 13769
  Gene Symbol: PTPRK
  Gene Name: protein tyrosine phosphatase, receptor type, K
  ENST ID: ENST00000628245
  CDS Start-End: 1-63

SEQ ID NO: 171859 - DNA, 4651 bp, Homo sapiens; identical to SEQ ID NO: 171842
  Payload ID: 13769
  Gene Symbol: PTPRK
  Gene Name: protein tyrosine phosphatase, receptor type, K
  Uniprot ID: Q15262
  ENST ID: ENST00000628183
  CDS Start-End: 1-4320

SEQ ID NO: 171860 - DNA, 1722 bp, Homo sapiens; identical to SEQ ID NO: 171850
  Payload ID: 13769
  Gene Symbol: PTPRK
  Gene Name: protein tyrosine phosphatase, receptor type, K
  ENST ID: ENST00000628472
  CDS Start-End: 230-976

SEQ ID NO: 171861 - DNA, 4758 bp, Homo sapiens; identical to SEQ ID NO: 171839
  Payload ID: 13769
  Gene Symbol: PTPRK
  Gene Name: protein tyrosine phosphatase, receptor type, K
  ENST ID: ENST00000626594
  CDS Start-End: 226-4644

SEQ ID NO: 171862 - DNA, 5025 bp, Homo sapiens; identical to SEQ ID NO: 171840
  Payload ID: 13769
  Gene Symbol: PTPRK
  Gene Name: protein tyrosine phosphatase, receptor type, K
  ENST ID: ENST00000625760
  CDS Start-End: 259-4635

SEQ ID NO: 171863 - DNA, 612 bp, Homo sapiens; identical to SEQ ID NO: 171849
  Payload ID: 13769
  Gene Symbol: PTPRK
  Gene Name: protein tyrosine phosphatase, receptor type, K
  ENST ID: ENST00000628824
  CDS Start-End: 1-612

SEQ ID NO: 171864 - DNA, 782 bp, Homo sapiens; identical to SEQ ID NO: 171846
  Payload ID: 13769
  Gene Symbol: PTPRK
  Gene Name: protein tyrosine phosphatase, receptor type, K
  ENST ID: ENST00000625418
  CDS Start-End: 1-782

SEQ ID NO: 171865 - DNA, 6095 bp, Homo sapiens
  Payload ID: 13770
  Gene Symbol: PTPRM
  Gene Name: protein tyrosine phosphatase, receptor type, M
  Uniprot ID: P28827
  ENST ID: ENST00000332175
  CDS Start-End: 1038-5396
gcggcgtagagaagctcgcagccctccggagcctcagcgatctcctggctcgcttttcccgcagccgccgagcagcgcaggcccggcgactccgggtgcagctggccctgtgcggtgacatcgccgtccggcgccaggctcgaagccgcctggccgcgcccgcggggtcgcaggccgctggtcccgcccggccgcgctcacaaactactcgcggctcgtgacccgggacaaacttctggcggcggcgcagcctcttccacagtcaccctccccagagccagctaccaaaatagaagacgcggccggggcgaggaggtgggcggggggagcccggtggccgctcctccccgcgcggctgacgcccgcttcggcggcggtagtggctgtggccgcggggccgcccccagccgagctcccggaggcgctcgggcgcgggccggcggggcacgggcgctcacgccctctagcgggccgcggcggcgccgggcggccgtgacgtgagcgctcccttcagccggcctgcggggcaccgccagtcagtcggggagcaagagccccgcgcgcagccggcgcgggctcggtcatcggcgcgccgccgcccggggctgggcttggggctgcctgtggagaggcggcgggcggaacgcgcgcggccacggccacggccaccgccacggccacggccggcagctcgggtcccgggtcccgggcaggggaaggggagaggcggcgagctcagcaaccggaaccgagggaagattttggctccgcgggctcgccctccgctccctctgccagcggcgccagacgccgagtggggccagggacaggggaggaggacccaggaccctgtgcccgcgcccctggagccgctggagttcggacttctgcaactgttggcactttgggggcttggcttagcgctctgctgtttacccgtctctcctcgctgcctcggaaccaaagctcccggccccctccgccctcgcgcgcccacccaccgccgccggggagcggcccggcccgcactcagcaccatgaggggacttgggacttgcctggcgactttggccggacttttgctaactgcggcgggcgagacgttctcaggtggctgcctctttgatgagccgtatagcacatgtggatatagtcaatctgaaggtgatgacttcaattgggagcaagtgaacaccttgactaaaccgacttctgatccatggatgccatcaggttctttcatgctggtgaatgcctctgggagacctgaggggcagagagcccacctgctcttaccccaacttaaagaaaatgacacccactgcatcgattttcactattttgtgtccagcaagagtaattctcctccggggttactcaatgtctacgtgaaggtcaataacgggccactggggaatcctatctggaatatatctggagacccaacacgtacatggaacagggcagaactggccattagtactttctggcctaacttttatcaggtgatttttgaagtgataacttctggacatcaaggctatctcgctatcgatgaggtgaaggtgttaggacatccatgtaccaggactcctcacttcctgcggattcagaatgtggaagttaatgctggccagtttgctaccttccagtgcagtgccatcggcaggaccgtggcaggagacaggctctggttacagggcattgatgtgcgagatgctcctctgaaggaaatcaaggtgaccagctcccgacgcttcattgcttcatttaatgttgtgaataccaccaaacgagatgctggaaagtaccgctgcatgattcgcactgaaggaggtgttggaatatcaaactatgcagagttggtagttaaagaaccacccgttcctattgccccacctcagctcgcctctgtaggagccacctacctgtggatacagctcaacgccaactccatcaatggggatgggcccattgtggcccgagaggtggagtactgcacggccagtgggagctggaatgaccggcagccagtcgattccacgagctataaaattggacaccttgacccagatacagaatatgagattagtgtgctcctgaccaggccaggggagggtggcactggctctcctggtccagctctcaggacaagaacaaagtgtgctgatcccatgcgaggcccaagaaaactagaagtagtggaggtcaaatctcggcaaatcactatccgctgggagccatttggatataatgtaactcgttgccacagttataatctcactgtccactactgttaccaagttggaggacaagaacaagtgcgagaagaagtaagctgggatacagaaaactcacaccctcaacacacgatcactaacctgtcaccatacaccaatgtcagtgtgaaactgatcctcatgaacccagagggccggaaggaaagccaagaactcatagtgcagacagatgaagacctcccaggtgctgttcccactgaatccatacaaggaagtacctttgaagagaagatatttcttcagtggagagaaccaactcaaacatatggtgtaatcactttatatgagatcacctacaaagcagtcagttcctttgacccagaaatagatttatccaatcagagtggaagagtttcaaagctgggaaatgaaacccattttctgttttttggactgtatccggggaccacatactcctttaccatccgagctagcacagctaagggttttgggcctccagcaacaaaccagttcaccaccaaaatatcagcaccctctatgccagcttatgaacttgagacacctttgaatcaaactgacaataccgtgacagtcatgctgaaacctgcccacagcagaggagcacctgtcagtgtctatcaaatagttgttgaggaagaacgtcctcgaagaactaaaaagacgacagaaatcttaaagtgctacccagtgccaattcacttccagaatgcttctctgctgaactcacagtactactttgctgcagaatttcctgcagacagcctccaagctgcgcagccttttacaattggtgataataagacatataatggatactggaacactccccttctcccctataaaagctacagaatttatttccaagctgctagtagagccaatggggaaaccaaaatagactgtgtccaagtggccacaaaaggagctgccactccgaaaccagtcccagaacccgagaaacagacagaccatacagttaaaattgctggagtcatcgcgggcatcttgctgttcgtgattatatttcttggagttgtgttggtaatgaagaaaaggaaactggccaagaagcggaaagagaccatgagcagcacccgacaggagatgactgtgatggtgaactcaatggacaagagctatgctgagcagggcacaaactgcgacgaggctttctcattcatggacacgcacaatctgaatgggagatctgtgtcttcaccatcgtccttcacaatgaaaacaaatacactgagcacatcggtgcctaattcctattacccagatgaaacccacacaatggccagcgataccagcagcctggtgcagtcccatacttacaagaagcgagagccggccgacgtgccctatcagactgggcagctccaccccgccatccgggtggcagacctccttcagcacatcacacagatgaagtgtgcggagggctacggcttcaaggaggaatacgagagcttctttgaagggcagtctgcaccatgggactcggctaagaaagatgagaacagaatgaagaacagatacgggaatatcattgcatacgatcattcccgagtgaggctgcagacaatagaaggagacacaaactcagactatatcaatggcaattatatcgatggttatcatcgacccaatcattacattgctacccaagggccaatgcaggaaaccatctatgacttctggaggatggtgtggcacgaaaacactgcaagtatcatcatggtgaccaatcttgtggaagtgggaagggtcaaatgctgcaaatactggccagatgacacagagatatataaagacattaaagttaccctaatagaaacagaactactggcagaatatgtgataagaacatttgctgttgaaaagagaggtgtgcatgaaatccgagagatcagacagtttcacttcactggctggccggatcatggggtcccctaccatgccaccggcctgctgggattcgtgcggcaagtcaagtccaagagcccgcccagtgcaggcccactggtggtgcactgcagtgctggtgcagggaggactggctgtttcatcgtcattgatatcatgttggacatggccgaaagggaaggggtcgtagacatctacaactgcgtcagggagctgcggtcacggagggtgaacatggtgcaaacagaggagcagtatgtgtttatccacgatgcgatcctggaagcctgtctttgtggggacacctctgtgcctgcttcccaagttaggtctctgtattatgacatgaacaaactggatccacagacaaactcaagccagattaaagaggaattccggacgctaaacatggtgacaccaacgctgcgagtagaggactgcagcatcgcactgttgccccggaaccatgagaaaaaccggtgcatggacatcctgcccccagaccgctgcctgcccttcctcatcaccatcgatggggagagcagcaactacatcaatgctgccctcatggacagctataaacagccttcagcttttatagtcacccagcatcctttgccaaacacagtgaaagacttttggagactggtcctggattatcactgcacatccgtagttatgctaaatgatgtggatcctgcccagttgtgtccacagtactggccagaaaacggagtacacagacacggccccatccaggtggaatttgtctctgctgacctggaagaggacatcatcagcaggatattccgcatttacaatgccgccagaccccaagatggatatcggatggtgcagcaattccagttcctgggctggccgatgtacagggacacaccagtgtctaagcgctccttcttgaagctcattcgccaggtggacaagtggcaagaggagtacaatggcggggaaggccgcacggttgtgcactgcttgaacgggggaggccgcagtgggacgttctgcgccatcagcatcgtatgtgagatgctccggcaccagagaaccgtggatgtctttcacgctgtgaagacactgaggaacaacaagcccaacatggtcgacctcctggatcagtacaagttctgctacgaggtggccctggaatacttgaattctggctgatggtgtaaacagctctgcaaacaatccctttcataccacaaagccaagacgttccatggtatttgtgcaaaagagatgaagacttctcaatatgcttattttgctttgcataattggctctttttaagagcccaagaaagtgtttctaaaattgcttgcactgcccaatcccagtaatgctgctgcctgacagaaacacacacacagccacagttgccaaatcccgtactccttgccaccggcttcctagagcagcgtagacagctggtaaactgaagagcacaactatattcttatgaaggaatttgtacctttggggtattattttgtggcccgtgaccctcgttattgttacagctgagtgtatgtttttgttctgtggagaatgctatctggcattatggtaatatattattttaggtaatatttgtactttaacatgttgcataatatatgcttatgtagctttccaggactaacagataaatgtgtaatgaacaaagatatgttgtatgagtcgtcgtttctgtcagatttgtattgtttccaagggaaaagcttgggggaggactcagttcacaaaatgcaaaactcaacgatcagattcacggacccagagcttttccatgtgtttatattgtaaatatttttgatttcatcaaattatttattcattaaaagaaatttttgtgaagcaca

SEQ ID NO: 171866 - DNA, 5292 bp, Homo sapiens
  Payload ID: 13770
  Gene Symbol: PTPRM
  Gene Name: protein tyrosine phosphatase, receptor type, M
  ENST ID: ENST00000400053
  CDS Start-End: 426-4598
gtgctgtggcccaatcctgtgcgtgtctcctcttcaggctcctgccggagcatgcttctctaatcttaccatttatcactgacccttcggtgaaactctcttctgtttaaatttaccagggtacactttgtaatacttgggaccaagaatttgaagatagtaatcagacaaatcaaacaactagtagtagtggagagacacgtagccctacaggaaggggtagaattatcattaaaaacacagacaaaccagagactgcctgaaaaaaaaaaaaagatgaactggaaagattcaaagtaggctctattggaggtggctgcctctttgatgagccgtatagcacatgtggatatagtcaatctgaaggtgatgacttcaattgggagcaagtgaacaccttgactaaaccgacttctgatccatggatgccatcaggttctttcatgctggtgaatgcctctgggagacctgaggggcagagagcccacctgctcttaccccaacttaaagaaaatgacacccactgcatcgattttcactattttgtgtccagcaagagtaattctcctccggggttactcaatgtctacgtgaaggtcaataacgggccactggggaatcctatctggaatatatctggagacccaacacgtacatggaacagggcagaactggccattagtactttctggcctaacttttatcaggtgatttttgaagtgataacttctggacatcaaggctatctcgctatcgatgaggtgaaggtgttaggacatccatgtaccaggactcctcacttcctgcggattcagaatgtggaagttaatgctggccagtttgctaccttccagtgcagtgccatcggcaggaccgtggcaggagacaggctctggttacagggcattgatgtgcgagatgctcctctgaaggaaatcaaggtgaccagctcccgacgcttcattgcttcatttaatgttgtgaataccaccaaacgagatgctggaaagtaccgctgcatgattcgcactgaaggaggtgttggaatatcaaactatgcagagttggtagttaaagaaccacccgttcctattgccccacctcagctcgcctctgtaggagccacctacctgtggatacagctcaacgccaactccatcaatggggatgggcccattgtggcccgagaggtggagtactgcacggccagtgggagctggaatgaccggcagccagtcgattccacgagctataaaattggacaccttgacccagatacagaatatgagattagtgtgctcctgaccaggccaggggagggtggcactggctctcctggtccagctctcaggacaagaacaaagtgtgctgatcccatgcgaggcccaagaaaactagaagtagtggaggtcaaatctcggcaaatcactatccgctgggagccatttggatataatgtaactcgttgccacagttataatctcactgtccactactgttaccaagttggaggacaagaacaagtgcgagaagaagtaagctgggatacagaaaactcacaccctcaacacacgatcactaacctgtcaccatacaccaatgtcagtgtgaaactgatcctcatgaacccagagggccggaaggaaagccaagaactcatagtgcagacagatgaagacctcccaggtgctgttcccactgaatccatacaaggaagtacctttgaagagaagatatttcttcagtggagagaaccaactcaaacatatggtgtaatcactttatatgagatcacctacaaagcagtcagttcctttgacccagaaatagatttatccaatcagagtggaagagtttcaaagctgggaaatgaaacccattttctgttttttggactgtatccggggaccacatactcctttaccatccgagctagcacagctaagggttttgggcctccagcaacaaaccagttcaccaccaaaatatcagcaccctctatgccagcttatgaacttgagacacctttgaatcaaactgacaataccgtgacagtcatgctgaaacctgcccacagcagaggagcacctgtcagtgtctatcaaatagttgttgaggaagaacgtcctcgaagaactaaaaagacgacagaaatcttaaagtgctacccagtgccaattcacttccagaatgcttctctgctgaactcacagtactactttgctgcagaatttcctgcagacagcctccaagctgcgcagccttttacaattggtgataataagacatataatggatactggaacactccccttctcccctataaaagctacagaatttatttccaagctgctagtagagccaatggggaaaccaaaatagactgtgtccaagtggccacaaaaggagctgccactccgaaaccagtcccagaacccgagaaacagacagaccatacagttaaaattgctggagtcatcgcgggcatcttgctgttcgtgattatatttcttggagttgtgttggtaatgaagaaaaggaaactggccaagaagcggaaagagaccatgagcagcacccgacaggagatgactgtgatggtgaactcaatggacaagagctatgctgagcagggcacaaactgcgacgaggctttctcattcatggacacgcacaatctgaatgggagatctgtgtcttcaccatcgtccttcacaatgaaaacaaatacactgagcacatcggtgcctaattcctattacccagatgaaacccacacaatggccagcgataccagcagcctggtgcagtcccatacttacaagaagcgagagccggccgacgtgccctatcagactgggcagctccaccccgccatccgggtggcagacctccttcagcacatcacacagatgaagtgtgcggagggctacggcttcaaggaggaatacgagagcttctttgaagggcagtctgcaccatgggactcggctaagaaagatgagaacagaatgaagaacagatacgggaatatcattgcatacgatcattcccgagtgaggctgcagacaatagaaggagacacaaactcagactatatcaatggcaattatatcgatggttatcatcgacccaatcattacattgctacccaagggccaatgcaggaaaccatctatgacttctggaggatggtgtggcacgaaaacactgcaagtatcatcatggtgaccaatcttgtggaagtgggaagggtcaaatgctgcaaatactggccagatgacacagagatatataaagacattaaagttaccctaatagaaacagaactactggcagaatatgtgataagaacatttgctgttgaaaagagaggtgtgcatgaaatccgagagatcagacagtttcacttcactggctggccggatcatggggtcccctaccatgccaccggcctgctgggattcgtgcggcaagtcaagtccaagagcccgcccagtgcaggcccactggtggtgcactgcagtgctggtgcagggaggactggctgtttcatcgtcattgatatcatgttggacatggccgaaagggaaggggtcgtagacatctacaactgcgtcagggagctgcggtcacggagggtgaacatggtgcaaacagaggagcagtatgtgtttatccacgatgcgatcctggaagcctgtctttgtggggacacctctgtgcctgcttcccaagttaggtctctgtattatgacatgaacaaactggatccacagacaaactcaagccagattaaagaggaattccggacgctaaacatggtgacaccaacgctgcgagtagaggactgcagcatcgcactgttgccccggaaccatgagaaaaaccggtgcatggacatcctgcccccagaccgctgcctgcccttcctcatcaccatcgatggggagagcagcaactacatcaatgctgccctcatggacagctataaacagccttcagcttttatagtcacccagcatcctttgccaaacacagtgaaagacttttggagactggtcctggattatcactgcacatccgtagttatgctaaatgatgtggatcctgcccagttgtgtccacagtactggccagaaaacggagtacacagacacggccccatccaggtggaatttgtctctgctgacctggaagaggacatcatcagcaggatattccgcatttacaatgccgccagaccccaagatggatatcggatggtgcagcaattccagttcctgggctggccgatgtacagggacacaccagtgtctaagcgctccttcttgaagctcattcgccaggtggacaagtggcaagaggagtacaatggcggggaaggccgcacggttgtgcactgcttgaacgggggaggccgcagtgggacgttctgcgccatcagcatcgtatgtgagatgctccggcaccagagaaccgtggatgtctttcacgctgtgaagacactgaggaacaacaagcccaacatggtcgacctcctggatcagtacaagttctgctacgaggtggccctggaatacttgaattctggctgatggtgtaaacagctctgcaaacaatccctttcataccacaaagccaagacgttccatggtatttgtgcaaaagagatgaagacttctcaatatgcttattttgctttgcataattggctctttttaagagcccaagaaagtgtttctaaaattgcttgcactgcccaatcccagtaatgctgctgcctgacagaaacacacacacagccacagttgccaaatcccgtactccttgccaccggcttcctagagcagcgtagacagctggtaaactgaagagcacaactatattcttatgaaggaatttgtacctttggggtattattttgtggcccgtgaccctcgttattgttacagctgagtgtatgtttttgttctgtggagaatgctatctggcattatggtaatatattattttaggtaatatttgtactttaacatgttgcataatatatgcttatgtagctttccaggactaacagataaatgtgtaatgaacaaagatatgttgtatgagtcgtcgtttctgtcagatttgtattgtttccaagggaaaagcttgggggaggactcagttcacaaaatgcaaaactcaacgatcagattcacggacccagagcttttccatgtgtttatattgtaaatatttttgatttcatcaaattatttattcattaaaagaaatttttgtgaa

SEQ ID NO: 171867 - DNA, 5030 bp, Homo sapiens
  Payload ID: 13770
  Gene Symbol: PTPRM
  Gene Name: protein tyrosine phosphatase, receptor type, M
  ENST ID: ENST00000400060
  CDS Start-End: 3495-4334
acattttaggtggctgcctctttgatgagccgtatagcacatgtggatatagtcaatctgaaggtgatgacttcaattgggagcaagtgaacaccttgactaaaccgacttctgatccatggatgccatcaggttctttcatgctggtgaatgcctctgggagacctgaggggcagagagcccacctgctcttaccccaacttaaagaaaatgacacccactgcatcgattttcactattttgtgtccagcaagagtaattctcctccggggttactcaatgtctacgtgaaggtcaataacgggccactggggaatcctatctggaatatatctggagacccaacacgtacatggaacagggcagaactggccattagtactttctggcctaacttttatcaggtgatttttgaagtgataacttctggacatcaaggctatctcgctatcgatgaggtgaaggtgttaggacatccatgtaccaggactcctcacttcctgcggattcagaatgtggaagttaatgctggccagtttgctaccttccagtgcagtgccatcggcaggaccgtggcaggagacaggctctggttacagggcattgatgtgcgagatgctcctctgaaggaaatcaaggtgaccagctcccgacgcttcattgcttcatttaatgttgtgaataccaccaaacgagatgctggaaagtaccgctgcatgattcgcactgaaggaggtgttggaatatcaaactatgcagagttggtagttaaagaaccacccgttcctattgccccacctcagctcgcctctgtaggagccacctacctgtggatacagctcaacgccaactccatcaatggggatgggcccattgtggcccgagaggtggagtactgcacggccagtgggagctggaatgaccggcagccagtcgattccacgagctataaaattggacaccttgacccagatacagaatatgagattagtgtgctcctgaccaggccaggggagggtggcactggctctcctggtccagctctcaggacaagaacaaagtgtgctgatcccatgcgaggcccaagaaaactagaagtagtggaggtcaaatctcggcaaatcactatccgctgggagccatttggatataatgtaactcgttgccacagttataatctcactgtccactactgttaccaagttggaggacaagaacaagtgcgagaagaagtaagctgggatacagaaaactcacaccctcaacacacgatcactaacctgtcaccatacaccaatgtcagtgtgaaactgatcctcatgaacccagagggccggaaggaaagccaagaactcatagtgcagacagatgaagacctcccaggtgctgttcccactgaatccatacaaggaagtacctttgaagagaagatatttcttcagtggagagaaccaactcaaacatatggtgtaatcactttatatgagatcacctacaaagcagtcagttcctttgacccagaaatagatttatccaatcagagtggaagagtttcaaagctgggaaatgaaacccattttctgttttttggactgtatccggggaccacatactcctttaccatccgagctagcacagctaagggttttgggcctccagcaacaaaccagttcaccaccaaaatatcagcaccctctatgccagcttatgaacttgagacacctttgaatcaaactgacaataccgtgacagtcatgctgaaacctgcccacagcagaggagcacctgtcagtgtctatcaaatagttgttgaggaagaacgtcctcgaagaactaaaaagacgacagaaatcttaaagtgctacccagtgccaattcacttccagaatgcttctctgctgaactcacagtactactttgctgcagaatttcctgcagacagcctccaagctgcgcagccttttacaattggtgataataagacatataatggatactggaacactccccttctcccctataaaagctacagaatttatttccaagctgctagtagagccaatggggaaaccaaaatagactgtgtccaagtggccacaaaaggagctgccactccgaaaccagtcccagaacccgagaaacagacagaccatacagttaaaattgctggagtcatcgcgggcatcttgctgttcgtgattatatttcttggagttgtgttggtaatgaagaaaaggaaactggccaagaagcggaaagagaccatgagcagcacccgacaggagatgactgtgatggtgaactcaatggacaagagctatgctgagcagggcacaaactgcgacgaggctttctcattcatggacacgcacaatctgaatgggagatctgtgtcttcaccatcgtccttcacaatgaaaacaaatacactgagcacatcggtgcctaattcctattacccagacccatttgtgccaactgcaattttagtgccaataaatgatgaaacccacacaatggccagcgataccagcagcctggtgcagtcccatacttacaagaagcgagagccggccgacgtgccctatcagactgggcagctccaccccgccatccgggtggcagacctccttcagcacatcacacagatgaagtgtgcggagggctacggcttcaaggaggaatacgagagcttctttgaagggcagtctgcaccatgggactcggctaagaaagatgagaacagaatgaagaacagatacgggaatatcattgcatacgatcattcccgagtgaggctgcagacaatagaaggagacacaaactcagactatatcaatggcaattatatcgatggttatcatcgacccaatcattacattgctacccaagggccaatgcaggaaaccatctatgacttctggaggatggtgtggcacgaaaacactgcaagtatcatcatggtgaccaatcttgtggaagtgggaagggtcaaatgctgcaaatactggccagatgacacagagatatataaagacattaaagttaccctaatagaaacagaactactggcagaatatgtgataagaacatttgctgttgaaaagagaggtgtgcatgaaatccgagagatcagacagtttcacttcactggctggccggatcatggggtcccctaccatgccaccggcctgctgggattcgtgcggcaagtcaagtccaagagcccgcccagtgcaggcccactggtggtgcactgcagtgctggtgcagggaggactggctgtttcatcgtcattgatatcatgttggacatggccgaaagggaaggggtcgtagacatctacaactgcgtcagggagctgcggtcacggagggtgaacatggtgcaaacagaggagcagtatgtgtttatccacgatgcgatcctggaagcctgtctttgtggggacacctctgtgcctgcttcccaagttaggtctctgtattatgacatgaacaaactggatccacagacaaactcaagccagattaaagaggaattccggacgctaaacatggtgacaccaacgctgcgagtagaggactgcagcatcgcactgttgccccggaaccatgagaaaaaccggtgcatggacatcctgcccccagaccgctgcctgcccttcctcatcaccatcgatggggagagcagcaactacatcaatgctgccctcatggacagctataaacagccttcagcttttatagtcacccagcatcctttgccaaacacagtgaaagacttttggagactggtcctggattatcactgcacatccgtagttatgctaaatgatgtggatcctgcccagttgtgtccacagtactggccagaaaacggagtacacagacacggccccatccaggtggaatttgtctctgctgacctggaagaggacatcatcagcaggatattccgcatttacaatgccgccagaccccaagatggatatcggatggtgcagcaattccagttcctgggctggccgatgtacagggacacaccagtgtctaagcgctccttcttgaagctcattcgccaggtggacaagtggcaagaggagtacaatggcggggaaggccgcacggttgtgcactgcttgaacgggggaggccgcagtgggacgttctgcgccatcagcatcgtatgtgagatgctccggcaccagagaaccgtggatgtctttcacgctgtgaagacactgaggaacaacaagcccaacatggtcgacctcctggatcagtacaagttctgctacgaggtggccctggaatacttgaattctggctgatggtgtaaacagctctgcaaacaatccctttcataccacaaagccaagacgttccatggtatttgtgcaaaagagatgaagacttctcaatatgcttattttgctttgcataattggctctttttaagagcccaagaaagtgtttctaaaattgcttgcactgcccaatcccagtaatgctgctgcctgacagaaacacacacacagccacagttgccaaatcccgtactccttgccaccggcttcctagagcagcgtagacagctggtaaactgaagagcacaactatattcttatgaaggaatttgtacctttggggtattattttgtggcccgtgaccctcgttattgttacagctgagtgtatgtttttgttctgtggagaatgctatctggcattatggtaatatattattttaggtaatatttgtactttaacatgttgcataatatatgcttatgtagctttccaggactaacagataaatgtgtaatgaacaaagatatgttgtatgagtcgtcgtttctgtcagatttgtattgtttccaagggaaaagcttgggggaggactcagttcacaaaatgcaaaactcaacgatcagattcacggacccagagcttttccatgtgtttatattgtaaatatttttgatttcatcaaattatttattcattaaaagaaatttttgtgaagc

SEQ ID NO: 171868 - DNA, 792 bp, Homo sapiens
  Payload ID: 13770
  Gene Symbol: PTPRM
  Gene Name: protein tyrosine phosphatase, receptor type, M
  ENST ID: ENST00000583289
  CDS Start-End: 1-792
cagaaatagatttatccaatcagagtggaagagtttcaaagctgggaaatgaaacccattttctgttttttggactgtatccggggaccacatactcctttaccatccgagctagcacagctaagggttttgggcctccagcaacaaaccagttcaccaccaaaatatcagcaccctctatgccagcttatgaacttgagacacctttgaatcaaactgacaataccgtgacagtcatgctgaaacctgcccacagcagaggagcacctgtcagtgtctatcaaatagttgttgaggaagaacgtcctcgaagaactaaaaagacgacagaaatcttaaagtgctacccagtgccaattcacttccagaatgcttctctgctgaactcacagtactactttgctgcagaatttcctgcagacagcctccaagctgcgcagccttttacaattggtgataataagacatataatggatactggaacactccccttctcccctataaaagctacagaatttatttccaagctgctagtagagccaatggggaaaccaaaatagactgtgtccaagtggccacaaaagctgcgataatcgtgactcagcttacaacaccttacattcgcatcgcccccgctgcaggcgacggccaactaacaggagctgccactccgaaaccagtcccagaacccgagaaacagacagaccatacagttaaaattgctggagtcatcgcgggcatcttgctgttcgtgattatatttcttggagttgtgttggtaatgaagaaaa

SEQ ID NO: 171869 - DNA, 713 bp, Homo sapiens
  Payload ID: 13770
  Gene Symbol: PTPRM
  Gene Name: protein tyrosine phosphatase, receptor type, M
  ENST ID: ENST00000583153
  CDS Start-End: 1-713
aagacattaaagttaccctaatagaaacagaactactggcagaatatgtgataagaacatttgctgttgaaaagggaggggccggaggtgaagcaaactgcagtccatccagagaagtgtcacagagaggtgtgcatgaaatccgagagatcagacagtttcacttcactggctggccggatcatggggtcccctaccatgccaccggcctgctgggattcgtgcggcaagtcaagtccaagagcccgcccagtgcaggcccactggtggtgcactgcagtgctggtgcagggaggactggctgtttcatcgtcattgatatcatgttggacatggccgaaagggaaggggtcgtagacatctacaactgcgtcagggagctgcggtcacggagggtgaacatggtgcaaacagaggagcagtatgtgtttatccacgatgcgatcctggaagcctgtctttgtggggacacctctgtgcctgcttcccaagttaggtctctgtattatgacatgaacaaactggatccacagacaaactcaagccagattaaagaggaattccggacgctaaacatggtgacaccaacgctgcgagtagaggactgcagcatcgcactgttgccccggaaccatgagaaaaaccggtgcatggacatcctgcccccagaccgctgcctgcccttcctcatcaccatcgatggggagagcagc

SEQ ID NO: 171870 - DNA, 5941 bp, Homo sapiens
  Payload ID: 13770
  Gene Symbol: PTPRM
  Gene Name: protein tyrosine phosphatase, receptor type, M
  Uniprot ID: P28827
  ENST ID: ENST00000580170
  CDS Start-End: 1038-5435
gcggcgtagagaagctcgcagccctccggagcctcagcgatctcctggctcgcttttcccgcagccgccgagcagcgcaggcccggcgactccgggtgcagctggccctgtgcggtgacatcgccgtccggcgccaggctcgaagccgcctggccgcgcccgcggggtcgcaggccgctggtcccgcccggccgcgctcacaaactactcgcggctcgtgacccgggacaaacttctggcggcggcgcagcctcttccacagtcaccctccccagagccagctaccaaaatagaagacgcggccggggcgaggaggtgggcggggggagcccggtggccgctcctccccgcgcggctgacgcccgcttcggcggcggtagtggctgtggccgcggggccgcccccagccgagctcccggaggcgctcgggcgcgggccggcggggcacgggcgctcacgccctctagcgggccgcggcggcgccgggcggccgtgacgtgagcgctcccttcagccggcctgcggggcaccgccagtcagtcggggagcaagagccccgcgcgcagccggcgcgggctcggtcatcggcgcgccgccgcccggggctgggcttggggctgcctgtggagaggcggcgggcggaacgcgcgcggccacggccacggccaccgccacggccacggccggcagctcgggtcccgggtcccgggcaggggaaggggagaggcggcgagctcagcaaccggaaccgagggaagattttggctccgcgggctcgccctccgctccctctgccagcggcgccagacgccgagtggggccagggacaggggaggaggacccaggaccctgtgcccgcgcccctggagccgctggagttcggacttctgcaactgttggcactttgggggcttggcttagcgctctgctgtttacccgtctctcctcgctgcctcggaaccaaagctcccggccccctccgccctcgcgcgcccacccaccgccgccggggagcggcccggcccgcactcagcaccatgaggggacttgggacttgcctggcgactttggccggacttttgctaactgcggcgggcgagacgttctcaggtggctgcctctttgatgagccgtatagcacatgtggatatagtcaatctgaaggtgatgacttcaattgggagcaagtgaacaccttgactaaaccgacttctgatccatggatgccatcaggttctttcatgctggtgaatgcctctgggagacctgaggggcagagagcccacctgctcttaccccaacttaaagaaaatgacacccactgcatcgattttcactattttgtgtccagcaagagtaattctcctccggggttactcaatgtctacgtgaaggtcaataacgggccactggggaatcctatctggaatatatctggagacccaacacgtacatggaacagggcagaactggccattagtactttctggcctaacttttatcaggtgatttttgaagtgataacttctggacatcaaggctatctcgctatcgatgaggtgaaggtgttaggacatccatgtaccaggactcctcacttcctgcggattcagaatgtggaagttaatgctggccagtttgctaccttccagtgcagtgccatcggcaggaccgtggcaggagacaggctctggttacagggcattgatgtgcgagatgctcctctgaaggaaatcaaggtgaccagctcccgacgcttcattgcttcatttaatgttgtgaataccaccaaacgagatgctggaaagtaccgctgcatgattcgcactgaaggaggtgttggaatatcaaactatgcagagttggtagttaaagaaccacccgttcctattgccccacctcagctcgcctctgtaggagccacctacctgtggatacagctcaacgccaactccatcaatggggatgggcccattgtggcccgagaggtggagtactgcacggccagtgggagctggaatgaccggcagccagtcgattccacgagctataaaattggacaccttgacccagatacagaatatgagattagtgtgctcctgaccaggccaggggagggtggcactggctctcctggtccagctctcaggacaagaacaaagtgtgctgatcccatgcgaggcccaagaaaactagaagtagtggaggtcaaatctcggcaaatcactatccgctgggagccatttggatataatgtaactcgttgccacagttataatctcactgtccactactgttaccaagttggaggacaagaacaagtgcgagaagaagtaagctgggatacagaaaactcacaccctcaacacacgatcactaacctgtcaccatacaccaatgtcagtgtgaaactgatcctcatgaacccagagggccggaaggaaagccaagaactcatagtgcagacagatgaagacctcccaggtgctgttcccactgaatccatacaaggaagtacctttgaagagaagatatttcttcagtggagagaaccaactcaaacatatggtgtaatcactttatatgagatcacctacaaagcagtcagttcctttgacccagaaatagatttatccaatcagagtggaagagtttcaaagctgggaaatgaaacccattttctgttttttggactgtatccggggaccacatactcctttaccatccgagctagcacagctaagggttttgggcctccagcaacaaaccagttcaccaccaaaatatcagcaccctctatgccagcttatgaacttgagacacctttgaatcaaactgacaataccgtgacagtcatgctgaaacctgcccacagcagaggagcacctgtcagtgtctatcaaatagttgttgaggaagaacgtcctcgaagaactaaaaagacgacagaaatcttaaagtgctacccagtgccaattcacttccagaatgcttctctgctgaactcacagtactactttgctgcagaatttcctgcagacagcctccaagctgcgcagccttttacaattggtgataataagacatataatggatactggaacactccccttctcccctataaaagctacagaatttatttccaagctgctagtagagccaatggggaaaccaaaatagactgtgtccaagtggccacaaaaggagctgccactccgaaaccagtcccagaacccgagaaacagacagaccatacagttaaaattgctggagtcatcgcgggcatcttgctgttcgtgattatatttcttggagttgtgttggtaatgaagaaaaggaaactggccaagaagcggaaagagaccatgagcagcacccgacaggagatgactgtgatggtgaactcaatggacaagagctatgctgagcagggcacaaactgcgacgaggctttctcattcatggacacgcacaatctgaatgggagatctgtgtcttcaccatcgtccttcacaatgaaaacaaatacactgagcacatcggtgcctaattcctattacccagacccatttgtgccaactgcaattttagtgccaataaatgatgaaacccacacaatggccagcgataccagcagcctggtgcagtcccatacttacaagaagcgagagccggccgacgtgccctatcagactgggcagctccaccccgccatccgggtggcagacctccttcagcacatcacacagatgaagtgtgcggagggctacggcttcaaggaggaatacgagagcttctttgaagggcagtctgcaccatgggactcggctaagaaagatgagaacagaatgaagaacagatacgggaatatcattgcatacgatcattcccgagtgaggctgcagacaatagaaggagacacaaactcagactatatcaatggcaattatatcgatggttatcatcgacccaatcattacattgctacccaagggccaatgcaggaaaccatctatgacttctggaggatggtgtggcacgaaaacactgcaagtatcatcatggtgaccaatcttgtggaagtgggaagggtcaaatgctgcaaatactggccagatgacacagagatatataaagacattaaagttaccctaatagaaacagaactactggcagaatatgtgataagaacatttgctgttgaaaagagaggtgtgcatgaaatccgagagatcagacagtttcacttcactggctggccggatcatggggtcccctaccatgccaccggcctgctgggattcgtgcggcaagtcaagtccaagagcccgcccagtgcaggcccactggtggtgcactgcagtgctggtgcagggaggactggctgtttcatcgtcattgatatcatgttggacatggccgaaagggaaggggtcgtagacatctacaactgcgtcagggagctgcggtcacggagggtgaacatggtgcaaacagaggagcagtatgtgtttatccacgatgcgatcctggaagcctgtctttgtggggacacctctgtgcctgcttcccaagttaggtctctgtattatgacatgaacaaactggatccacagacaaactcaagccagattaaagaggaattccggacgctaaacatggtgacaccaacgctgcgagtagaggactgcagcatcgcactgttgccccggaaccatgagaaaaaccggtgcatggacatcctgcccccagaccgctgcctgcccttcctcatcaccatcgatggggagagcagcaactacatcaatgctgccctcatggacagctataaacagccttcagcttttatagtcacccagcatcctttgccaaacacagtgaaagacttttggagactggtcctggattatcactgcacatccgtagttatgctaaatgatgtggatcctgcccagttgtgtccacagtactggccagaaaacggagtacacagacacggccccatccaggtggaatttgtctctgctgacctggaagaggacatcatcagcaggatattccgcatttacaatgccgccagaccccaagatggatatcggatggtgcagcaattccagttcctgggctggccgatgtacagggacacaccagtgtctaagcgctccttcttgaagctcattcgccaggtggacaagtggcaagaggagtacaatggcggggaaggccgcacggttgtgcactgcttgaacgggggaggccgcagtgggacgttctgcgccatcagcatcgtatgtgagatgctccggcaccagagaaccgtggatgtctttcacgctgtgaagacactgaggaacaacaagcccaacatggtcgacctcctggatcagtacaagttctgctacgaggtggccctggaatacttgaattctggctgatggtgtaaacagctctgcaaacaatccctttcataccacaaagccaagacgttccatggtatttgtgcaaaagagatgaagacttctcaatatgcttattttgctttgcataattggctctttttaagagcccaagaaagtgtttctaaaattgcttgcactgcccaatcccagtaatgctgctgcctgacagaaacacacacacagccacagttgccaaatcccgtactccttgccaccggcttcctagagcagcgtagacagctggtaaactgaagagcacaactatattcttatgaaggaatttgtacctttggggtattattttgtggcccgtgaccctcgttattgttacagctgagtgtatgtttttgttctgtggagaatgctatctggcattatggtaatatattattttaggtaatatttgtactttaacatgttgcataatatatgcttatgtagctttccaggactaacagataaatgtgtaatgaacaaagata

SEQ ID NO: 171871 - DNA, 604 bp, Homo sapiens
  Payload ID: 13770
  Gene Symbol: PTPRM
  Gene Name: protein tyrosine phosphatase, receptor type, M
  ENST ID: ENST00000578916
  CDS Start-End: 85-604
tttctcactgcccaagctgaagctgcctgggaggaagggctgagcatgcctagcccagccccttctttggggagctgactgcctatgggaaccctctccctccatcctggcattgatgtgcgagatgctcctctgaaggaaatcaaggtgaccagctcccgacgcttcattgcttcatttaatgttgtgaataccaccaaacgagatgctggaaagtaccgctgcatgattcgcactgaaggaggtgttggaatatcaaactatgcagagttggtagttaaagaaccacccgttcctattgccccacctcagctcgcctctgtaggagccacctacctgtggatacagctcaacgccaactccatcaatggggatgggcccattgtggcccgagaggtggagtactgcacggccagtgggagctggaatgaccggcagccagtcgattccacgagctataaaattggacaccttgacccagatacagaatatgagattagtgtgctcctgaccaggccaggggagggtggcactggctctcctggtccagctctcaggacaagaacaaagtgtgctgatcccatgcgaggcccaagaaaactag

SEQ ID NO: 171872 - DNA, 701 bp, Homo sapiens
  Payload ID: 13770
  Gene Symbol: PTPRM
  Gene Name: protein tyrosine phosphatase, receptor type, M
  ENST ID: ENST00000577468
  CDS Start-End: 1-624
cacttccagaatgcttctctgctgaactcacagtactactttgctgcagaatttcctgcagacagcctccaagctgcgcagccttttacaattggtgataataagacatataatggatactggaacactccccttctcccctataaaagctacagaatttatttccaagctgctagtagagccaatggggaaaccaaaatagactgtgtccaagtggccacaaaaggagctgccactccgaaaccagtcccagaacccgagaaacagacagaccatacagttaaaattgctggagtcatcgcgggcatcttgctgttcgtgattatatttcttggagttgtgttggtaatgaagaaaaggaaactggccaagaagcggaaagagaccatgagcagcacccgacaggagatgactgtgatggtgaactcaatggacaagagctatgctgagcagggcacaaactgcgacgaggctttctcattcatggacacgcacaatctgaatgggagatctgtgtcttcaccatcgtccttcacaatgaaaacaaatacactgagcacatcggtgcctaattcctattacccagacccatttgtgccaactgcaattttagagcttctttgaagggcagtctgcaccatgggactcggctaagaaagatgagaacagaatgaagaacagatacgggaatatcattgcat

SEQ ID NO: 171873 - DNA, 3784 bp, Homo sapiens
  Payload ID: 13771
  Gene Symbol: PTPRN
  Gene Name: protein tyrosine phosphatase, receptor type, N
  Uniprot ID: Q16849
  ENST ID: ENST00000295718
  CDS Start-End: 242-3181
aggtaggtcccccgctccgacagggctcttacgccatatgtgacgcaaattagcttacgagccgggggtggaggtgtcgtcagcacccgcctgcggttggccgcgttgcagcgagaggggcatgtagaccccgcctcgtagggaggtggggagcggcaagccccgcctcagcccctctggcaggctcccgccagcgtcgctgcggctccggcccgggagcgagcgcccggagctcggaaagatgcggcgcccgcggcggcctgggggtctcgggggatccgggggtctccggctgctcctctgcctcctgctgctgagcagccgcccggggggctgcagcgccgttagtgcccacggctgtctatttgaccgcaggctctgctctcacctggaagtctgtattcaggatggcttgtttgggcagtgccaggtgggagtggggcaggcccggccccttttgcaagtcacctccccagttctccaacgcttacaaggtgtgctccgacaactcatgtcccaaggattgtcctggcacgatgacctcacccagtatgtgatctctcaggagatggagcgcatccccaggcttcgccccccagagccccgtccaagggacaggtctggcttggcacccaagagacctggtcctgctggagagctgcttttacaggacatccccactggctccgcccctgctgcccagcatcggcttccacaaccaccagtgggcaaaggtggagctggggccagctcctctctgtcccctctgcaggctgagctgctcccgcctctcttggagcacctgctgctgcccccacagcctccccacccttcactgagttacgaacctgccttgctgcagccctacctgttccaccagtttggctcccgtgatggctccagggtctcagagggctccccagggatggtcagtgtcggccccctgcccaaggctgaagcccctgccctcttcagcagaactgcctccaagggcatatttggggaccaccctggccactcctacggggaccttccagggccttcacctgcccagctttttcaagactctgggctgctctatctggcccaggagttgccagcacccagcagggccagggtgccaaggctgccagagcaagggagcagcagccgggcagaggactccccagagggctatgagaaggaaggactaggggatcgtggagagaagcctgcttccccagctgtgcagccagatgcggctctgcagaggctggccgctgtgctggcgggctatggggtagagctgcgtcagctgacccctgagcagctctccacactcctgaccctgctgcagctactgcccaagggtgcaggaagaaatccgggaggggttgtaaatgttggagctgatatcaagaaaacaatggaggggccggtggagggcagagacacagcagagcttccagcccgcacatcccccatgcctggacaccccactgccagccctacctccagtgaagtccagcaggtgccaagccctgtctcctctgagcctcccaaagctgccagaccccctgtgacacctgtcctgctagagaagaaaagcccactgggccagagccagcccacggtggcaggacagccctcagcccgcccagcagcagaggaatatggctacatcgtcactgatcagaagcccctgagcctggctgcaggagtgaagctgctggagatcctggctgagcatgtgcacatgtcctcaggcagcttcatcaacatcagtgtggtgggaccagccctcaccttccgcatccggcacaatgagcagaacctgtctttggctgatgtgacccaacaagcagggctggtgaagtctgaactggaagcacagacagggctccaaatcttgcagacaggagtgggacagagggaggaggcagctgcagtccttccccaaactgcgcacagcacctcacccatgcgctcagtgctgctcactctggtggccctggcaggtgtggctgggctgctggtggctctggctgtggctctgtgtgtgcggcagcatgcgcggcagcaagacaaggagcgcctggcagccctggggcctgagggggcccatggtgacactacctttgagtaccaggacctgtgccgccagcacatggccacgaagtccttgttcaaccgggcagagggtccaccggagccttcacgggtgagcagtgtgtcctcccagttcagcgacgcagcccaggccagccccagctcccacagcagcaccccgtcctggtgcgaggagccggcccaagccaacatggacatctccacgggacacatgattctggcatacatggaggatcacctgcggaaccgggaccgccttgccaaggagtggcaggccctctgtgcctaccaagcagagccaaacacctgtgccaccgcgcagggggagggcaacatcaaaaagaaccggcatcctgacttcctgccctatgaccatgcccgcataaaactgaaggtggagagcagcccttctcggagcgattacatcaacgccagccccattattgagcatgaccctcggatgccagcctacatagccacgcagggcccgctgtcccataccatcgcagacttctggcagatggtgtgggagagcggctgcaccgtcatcgtcatgctgaccccgctggtggaggatggtgtcaagcagtgtgaccgctactggccagatgagggtgcctccctctaccacgtatatgaggtgaacctggtgtcggagcacatctggtgcgaggactttctggtgcggagcttctacctgaagaacgtgcagacccaggagacgcgcacgctcacgcagttccacttcctcagctggccggcagagggcacaccggcctccacgcggcccctgctggacttccgcaggaaggtgaacaagtgctaccggggccgctcctgccccatcatcgtgcactgcagtgatggtgcggggaggaccggcacctacatcctcatcgacatggtcctgaaccgcatggcaaaaggagtgaaggagattgacatcgctgccaccctggagcatgtccgtgaccagcggcctggccttgtccgctctaaggaccagtttgaatttgccctgacagccgtggcggaggaagtgaatgccatcctcaaggccctgccccagtgagaccctggggccccttggcgggcagcccagcctctgtccctctttgcctgtgtgagcatctctgtgtacccactcctcactgccccaccagccacctcttgggcatgctcagcccttcctagaagagtcaggaagggaaagccagaaggggcacgcctgcccagcctcgcatgccagagcctggggcatcccagagcccagggcatcccatgggggtgctgcagccaggaggagaggaaaggacatgggtagcaattctacccagagccttctcctgcctacattccctggcctggctctcctgtagctctcctggggttctgggagttccctgaacatctgtgtgtgtccccctatgctccagtatggaagaatggggtggagggtcgccacacccggctccccctgcttctcagccccgggcctgcctctgactcacacttgggcgctctgccctccctggcctcacgcccagcctcctcccaccaccctcccaccatgcgctgctcaacctctctccttctggcgcaagagaacatttctagaaaaaactacttttgtaccagtgtgaataaagttagtgtgttgtctgtgcagctgcaa

SEQ ID NO: 171874 - DNA, 3622 bp, Homo sapiens
  Payload ID: 13771
  Gene Symbol: PTPRN
  Gene Name: protein tyrosine phosphatase, receptor type, N
  Uniprot ID: Q16849
  ENST ID: ENST00000409251
  CDS Start-End: 167-3019
gtcgtcagcacccgcctgcggttggccgcgttgcagcgagaggggcatgtagaccccgcctcgtagggaggtggggagcggcaagccccgcctcagcccctctggcaggctcccgccagcgtcgctgcggctccggcccgggagcgagcgcccggagctcggaaagatgcggcgcccgcggcggcctgggggtctcgggggatccgggggtctccggctgctcctctgcctcctgctgctgagcagccgcccggggggctgcagcgccgttagtgcccacggctgtctatttgaccgcaggctctgctctcacctggaagtctgtattcaggatggcttgtttgggcagtgccaggtgggagtggggcaggcccggccccttttgcaagtcacctccccagttctccaacgcttacaaggtgtgctccgacaactcatgtcccaaggattgtcctggcacgatgacctcacccagtatgtgatctctcaggagatggagcgcatccccaggcttcgccccccagagccccgtccaagggacaggtctggcttggcacccaagagacctggtcctgctggagagctgcttttacaggacatccccactggctccgcccctgctgcccagcatcggcttccacaaccaccagtgggcaaaggtggagctggggccagctcctctctgtcccctctgcaggctgagctgctcccgcctctcttggagcacctgctgctgcccccacagcctccccacccttcactgagttacgaacctgccttgctgcagccctacctgttccaccagtttggctcccgtgatggctccagggtctcagagggctccccagggatggtcagtgtcggccccctgcccaaggctgaagcccctgccctcttcagcagaactgcctccaagggcatatttggggaccaccctggccactcctacggggaccttccagggccttcacctgcccagctttttcaagactctgggctgctctatctggcccaggagttgccagcacccagcagggccagggtgccaaggctgccagagcaagggagcagcagccgggcagaggactccccagagggctatgagaaggaaggactaggggatcgtggagagaagcctgcttccccagctgtgcagccagatgcggctctgcagaggctggccgctgtgctggcgggctatggggtagagctgcgtcagctgacccctgagcagctctccacactcctgaccctgctgcagctactgcccaagggtgcaggaagaaatccgggaggggttgtaaatgttggagctgatatcaagaaaacaatggaggggccggtggagggcagagacacagcagagcttccagcccgcacatcccccatgcctggacaccccactgccagccctacctccagtgaagtccagcaggtgccaagccctgtctcctctgagcctcccaaagctgccagaccccctgtgacacctgtcctgctagagaagaaaagcccactgggccagagccagcccacggtggcaggacagccctcagcccgcccagcagcagaggaatatggctacatcgtcactgatcagaatgtggtgggaccagccctcaccttccgcatccggcacaatgagcagaacctgtctttggctgatgtgacccaacaagcagggctggtgaagtctgaactggaagcacagacagggctccaaatcttgcagacaggagtgggacagagggaggaggcagctgcagtccttccccaaactgcgcacagcacctcacccatgcgctcagtgctgctcactctggtggccctggcaggtgtggctgggctgctggtggctctggctgtggctctgtgtgtgcggcagcatgcgcggcagcaagacaaggagcgcctggcagccctggggcctgagggggcccatggtgacactacctttgagtaccaggacctgtgccgccagcacatggccacgaagtccttgttcaaccgggcagagggtccaccggagccttcacgggtgagcagtgtgtcctcccagttcagcgacgcagcccaggccagccccagctcccacagcagcaccccgtcctggtgcgaggagccggcccaagccaacatggacatctccacgggacacatgattctggcatacatggaggatcacctgcggaaccgggaccgccttgccaaggagtggcaggccctctgtgcctaccaagcagagccaaacacctgtgccaccgcgcagggggagggcaacatcaaaaagaaccggcatcctgacttcctgccctatgaccatgcccgcataaaactgaaggtggagagcagcccttctcggagcgattacatcaacgccagccccattattgagcatgaccctcggatgccagcctacatagccacgcagggcccgctgtcccataccatcgcagacttctggcagatggtgtgggagagcggctgcaccgtcatcgtcatgctgaccccgctggtggaggatggtgtcaagcagtgtgaccgctactggccagatgagggtgcctccctctaccacgtatatgaggtgaacctggtgtcggagcacatctggtgcgaggactttctggtgcggagcttctacctgaagaacgtgcagacccaggagacgcgcacgctcacgcagttccacttcctcagctggccggcagagggcacaccggcctccacgcggcccctgctggacttccgcaggaaggtgaacaagtgctaccggggccgctcctgccccatcatcgtgcactgcagtgatggtgcggggaggaccggcacctacatcctcatcgacatggtcctgaaccgcatggcaaaaggagtgaaggagattgacatcgctgccaccctggagcatgtccgtgaccagcggcctggccttgtccgctctaaggaccagtttgaatttgccctgacagccgtggcggaggaagtgaatgccatcctcaaggccctgccccagtgagaccctggggccccttggcgggcagcccagcctctgtccctctttgcctgtgtgagcatctctgtgtacccactcctcactgccccaccagccacctcttgggcatgctcagcccttcctagaagagtcaggaagggaaagccagaaggggcacgcctgcccagcctcgcatgccagagcctggggcatcccagagcccagggcatcccatgggggtgctgcagccaggaggagaggaaaggacatgggtagcaattctacccagagccttctcctgcctacattccctggcctggctctcctgtagctctcctggggttctgggagttccctgaacatctgtgtgtgtccccctatgctccagtatggaagaatggggtggagggtcgccacacccggctccccctgcttctcagccccgggcctgcctctgactcacacttgggcgctctgccctccctggcctcacgcccagcctcctcccaccaccctcccaccatgcgctgctcaacctctctccttctggcgcaagagaacatttctagaaaaaactacttttgtaccagtgtgaataaagttagtgtgttgtctgtgcagctgcaa

SEQ ID NO: 171875 - DNA, 563 bp, Homo sapiens
  Payload ID: 13771
  Gene Symbol: PTPRN
  Gene Name: protein tyrosine phosphatase, receptor type, N
  ENST ID: ENST00000412847
  CDS Start-End: 188-563
ctaagagaattgggctctggggaaaattgcaggctgtctatttgaccgcaggctctgctctcacctggaagtctgtattcaggatggcttgtttgggcagtgccaggtgggagtggggcaggcccggccccttttgcaagtcacctccccagttctccaacgcttacaaggtgtgctccgacaactcatgtcccaaggattgtcctggcacgatgacctcacccagtatgtgatctctcaggagatggagcgcatccccaggcttcgccccccagagccccgtccaagggacaggtctggcttggcacccaagagacctggtcctgctggagagctgcttttacaggacatccccactggctccgcccctgctgcccagcatcggcttccacaaccaccagtgggcaaaggtggagctggggccagctcctctctgtcccctctgcaggctgagctgctcccgcctctcttggagcacctgctgctgcccccacagcctccccacccttcactgagttacgaacctgccttgctgcagccctacctgttccaccagtttggct

SEQ ID NO: 171876 - DNA, 3313 bp, Homo sapiens
  Payload ID: 13771
  Gene Symbol: PTPRN
  Gene Name: protein tyrosine phosphatase, receptor type, N
  Uniprot ID: Q16849
  ENST ID: ENST00000423636
  CDS Start-End: 259-2928
attgcaggttcgggagaaggacacggggtgcatgtgggcagagggacttagagaccggctgcgagaccacaggagaagccacttgctccgaggcgcctgggaggctgtctatttgaccgcaggctctgctctcacctggaagtctgtattcaggatggcttgtttgggcagtgccaggtgggagtggggcaggcccggccccttttgcaagtcacctccccagttctccaacgcttacaaggtgtgctccgacaactcatgtcccaaggattgtcctggcacgatgacctcacccagtatgtgatctctcaggagatggagcgcatccccaggcttcgccccccagagccccgtccaagggacaggtctggcttggcacccaagagacctggtcctgctggagagctgcttttacaggacatccccactggctccgcccctgctgcccagcatcggcttccacaaccaccagtgggcaaaggtggagctggggccagctcctctctgtcccctctgcaggctgagctgctcccgcctctcttggagcacctgctgctgcccccacagcctccccacccttcactgagttacgaacctgccttgctgcagccctacctgttccaccagtttggctcccgtgatggctccagggtctcagagggctccccagggatggtcagtgtcggccccctgcccaaggctgaagcccctgccctcttcagcagaactgcctccaagggcatatttggggaccaccctggccactcctacggggaccttccagggccttcacctgcccagctttttcaagactctgggctgctctatctggcccaggagttgccagcacccagcagggccagggtgccaaggctgccagagcaagggagcagcagccgggcagaggactccccagagggctatgagaaggaaggactaggggatcgtggagagaagcctgcttccccagctgtgcagccagatgcggctctgcagaggctggccgctgtgctggcgggctatggggtagagctgcgtcagctgacccctgagcagctctccacactcctgaccctgctgcagctactgcccaagggtgcaggaagaaatccgggaggggttgtaaatgttggagctgatatcaagaaaacaatggaggggccggtggagggcagagacacagcagagcttccagcccgcacatcccccatgcctggacaccccactgccagccctacctccagtgaagtccagcaggtgccaagccctgtctcctctgagcctcccaaagctgccagaccccctgtgacacctgtcctgctagagaagaaaagcccactgggccagagccagcccacggtggcaggacagccctcagcccgcccagcagcagaggaatatggctacatcgtcactgatcagaagcccctgagcctggctgcaggagtgaagctgctggagatcctggctgagcatgtgcacatgtcctcaggcagcttcatcaacatcagtgtggtgggaccagccctcaccttccgcatccggcacaatgagcagaacctgtctttggctgatgtgacccaacaagcagggctggtgaagtctgaactggaagcacagacagggctccaaatcttgcagacaggagtgggacagagggaggaggcagctgcagtccttccccaaactgcgcacagcacctcacccatgcgctcagtgctgctcactctggtggccctggcaggtgtggctgggctgctggtggctctggctgtggctctgtgtgtgcggcagcatgcgcggcagcaagacaaggagcgcctggcagccctggggcctgagggggcccatggtgacactacctttgagtaccaggacctgtgccgccagcacatggccacgaagtccttgttcaaccgggcagagggtccaccggagccttcacgggtgagcagtgtgtcctcccagttcagcgacgcagcccaggccagccccagctcccacagcagcaccccgtcctggtgcgaggagccggcccaagccaacatggacatctccacgggacacatgattctggcatacatggaggatcacctgcggaaccgggaccgccttgccaaggagtggcaggccctctgtgcctaccaagcagagccaaacacctgtgccaccgcgcagggggagggcaacatcaaaaagaaccggcatcctgacttcctgccctatgaccatgcccgcataaaactgaaggtggagagcagcccttctcggagcgattacatcaacgccagccccattattgagcatgaccctcggatgccagcctacatagccacgcagggcccgctgtcccataccatcgcagacttctggcagatggtgtgggagagcggctgcaccgtcatcgtcatgctgaccccgctggtggaggatggtgtcaagcagtgtgaccgctactggccagatgagggtgcctccctctaccacgtatatgaggtgaacctggtgtcggagcacatctggtgcgaggactttctggtgcggagcttctacctgaagaacgtgcagacccaggagacgcgcacgctcacgcagttccacttcctcagctggccggcagagggcacaccggcctccacgcggcccctgctggacttccgcaggaaggtgaacaagtgctaccggggccgctcctgccccatcatcgtgcactgcagtgatggtgcggggaggaccggcacctacatcctcatcgacatggtcctgaaccgcatggcaaaaggagtgaaggagattgacatcgctgccaccctggagcatgtccgtgaccagcggcctggccttgtccgctctaaggaccagtttgaatttgccctgacagccgtggcggaggaagtgaatgccatcctcaaggccctgccccagtgagaccctggggccccttggcgggcagcccagcctctgtccctctttgcctgtgtgagcatctctgtgtacccactcctcactgccccaccagccacctcttgggcatgctcagcccttcctagaagagtcaggaagggaaagccagaaggggcacgcctgcccagcctcgcatgccagagcctggggcatcccagagcccagggcatcccatgggggtgctgcagccaggaggagaggaaaggacatgggtagcaattctacccagagccttctcctgcctacattccctggcctggctctcctgtagctctcctggggttctgggagttccctgaacatctgtgtgtgtccccctatgctccagtatggaagaatggggtggagg

SEQ ID NO: 171877 - DNA, 606 bp, Homo sapiens
  Payload ID: 13771
  Gene Symbol: PTPRN
  Gene Name: protein tyrosine phosphatase, receptor type, N
  ENST ID: ENST00000446182
  CDS Start-End: 233-606
gaagagggctacagggatggggccaagtgggaattctagcgaggcgcctactatttgatggaggagggatgggctaggctgtctatttgaccgcaggctctgctctcacctggaagtctgtattcaggatggcttgtttgggcagtgccaggtgggagtggggcaggcccggccccttttgcaagtcacctccccagttctccaacgcttacaaggtgtgctccgacaactcatgtcccaaggattgtcctggcacgatgacctcacccagtatgtgatctctcaggagatggagcgcatccccaggcttcgccccccagagccccgtccaagggacaggtctggcttggcacccaagagacctggtcctgctggagagctgcttttacaggacatccccactggctccgcccctgctgcccagcatcggcttccacaaccaccagtgggcaaaggtggagctggggccagctcctctctgtcccctctgcaggctgagctgctcccgcctctcttggagcacctgctgctgcccccacagcctccccacccttcactgagttacgaacctgccttgctgcagccctacctgttccaccagtttgg

SEQ ID NO: 171878 - DNA, 541 bp, Homo sapiens
  Payload ID: 13771
  Gene Symbol: PTPRN
  Gene Name: protein tyrosine phosphatase, receptor type, N
  ENST ID: ENST00000442029
  CDS Start-End: 282-541
aagagaattgggctctggggaaaattgcaggttcgggagaaggacacggggtgcatgtgggcagagggacttagagaccggctgcgagaccacaggagaagccacttgctccgaggcgcctgggaggctgtctatttgaccgcaggctctgctctcacctggaagtctgtattcaggatggcttgtttgggcagtgccaggtgggagtggggcaggcccggccccttttgcaagtcacctccccagttctccaacgcttacaaggtgtgctccgacaactcatgtcccaaggattgtcctggcacgatgacctcacccagtatgtgatctctcaggagatggagcgcatccccaggcttcgccccccagagccccgtccaagggacaggtctggcttggcacccaagagacctggtcctgctggagagctgcttttacaggacatccccactggctccgcccctgctgcccagcatcggcttccacaaccaccagtgggcaaaggtggagctggggccagctcctctctgtcccctctgca

SEQ ID NO: 171879 - DNA, 1051 bp, Homo sapiens
  Payload ID: 13771
  Gene Symbol: PTPRN
  Gene Name: protein tyrosine phosphatase, receptor type, N
  ENST ID: ENST00000443981
  CDS Start-End: 1-413
tgtgggagagcggctgcaccgtcatcgtcatgctgaccccgctggtggaggatggtgtcaagcagtgtgaccgctactggccagatgagggtgcctccctctaccacgtatatgaggtgaacctggtgtcggagcacatctggtgcgaggactttctggtgcggagcttctacctgaagaacgtgcagacccaggagacgcgcacgctcacgcagttccacttcctcagctggccggcagagggcacaccggcctccacgcggcccctgctggacttccgcaggaaggtgaacaagtgctaccggggccgctcctgccccatcatcgtgcactgcagtgatggtgcggggaggaccggcacctacatcctcatcgacatggtcctgaaccgcatggcaaaaggaccagtttgaatttgccctgacagccgtggcggaggaagtgaatgccatcctcaaggccctgccccagtgagaccctggggccccttggcgggcagcccagcctctgtccctctttgcctgtgtgagcatctctgtgtacccactcctcactgccccaccagccacctcttgggcatgctcagcccttcctagaagagtcaggaagggaaagccagaaggggcacgcctgcccagcctcgcatgccagagcctggggcatcccagagcccagggcatcccatgggggtgctgcagccaggaggagaggaaaggacatgggtagcaattctacccagagccttctcctgcctacattccctggcctggctctcctgtagctctcctggggttctgggagttccctgaacatctgtgtgtgtccccctatgctccagtatggaagaatggggtggagggtcgccacacccggctccccctgcttctcagccccgggcctgcctctgactcacacttgggcgctctgccctccctggcctcacgcccagcctcctcccaccaccctcccaccatgcgctgctcaacctctctccttctggcgcaagagaacatttctagaaaaaactacttttgtaccagtgtgaataaag

SEQ ID NO: 171880 - DNA, 466 bp, Homo sapiens
  Payload ID: 13771
  Gene Symbol: PTPRN
  Gene Name: protein tyrosine phosphatase, receptor type, N
  ENST ID: ENST00000451506
  CDS Start-End: 266-466
atatgtgacgcaaattagcttacgagccgggggtggaggtgtcgtcagcacccgcctgcggttggccgcgttgcagcgagaggggcatgtagaccccgcctcgtagggaggctgtctatttgaccgcaggctctgctctcacctggaagtctgtattcaggatggcttgtttgggcagtgccaggtgggagtggggcaggcccggccccttttgcaagtcacctccccagttctccaacgcttacaaggtgtgctccgacaactcatgtcccaaggattgtcctggcacgatgacctcacccagtatgtgatctctcaggagatggagcgcatccccaggcttcgccccccagagccccgtccaagggacaggtctggcttggcacccaagagacctggtcctgctggagagctgcttttacaggacatccccactggctccgcccctgctgcccagcatcggctt

SEQ ID NO: 171881 - DNA, 579 bp, Homo sapiens
  Payload ID: 13771
  Gene Symbol: PTPRN
  Gene Name: protein tyrosine phosphatase, receptor type, N
  ENST ID: ENST00000440552
  CDS Start-End: 82-579
agcttggggcctggagcgaaactcggtgggggtgagggtgaaatgtcatgaagctcggggagaatatgggttgggggaggcatgcgagatgaggaaggctgtctatttgaccgcaggctctgctctcacctggaagtctgtattcaggatggcttgtttgggcagtgccaggtgggagtggggcaggcccggccccttttgcaagtcacctccccagttctccaacgcttacaaggtgtgctccgacaactcatgtcccaaggattgtcctggcacgatgacctcacccagtatgtgatctctcaggagatggagcgcatccccaggcttcgccccccagagccccgtccaagggacaggtctggcttggcacccaagagacctggtcctgctggagagctgcttttacaggacatccccactggctccgcccctgctgcccagcatcggcttccacaaccaccagtgggcaaaggtggagctggggccagctcctctctgtcccctctgcaggctgagctgctcccgcctctcttggagcacctgctgctgcccccacagcctccccacccttcactg

SEQ ID NO: 171882 - DNA, 592 bp, Homo sapiens
  Payload ID: 13771
  Gene Symbol: PTPRN
  Gene Name: protein tyrosine phosphatase, receptor type, N
  ENST ID: ENST00000606213
  CDS Start-End: 50-208
agcgtcgctgcggctccggcccgggagcgagcgcccggagctcggaaagatgcggcgcccgcggcggcctgggggtctcgggggatccgggggtctccggctgctcctctgcctcctgctgctgagcagccgcccggggggctgcagcgccgttagtgcccacggttcgggagaaggacacggggtgcatgtgggcagagggacttagagaccggctgcgagaccacaggagaagccacttgctccgaggcgcctgggaggctgtctatttgaccgcaggctctgctctcacctggaagtctgtattcaggatggcttgtttgggcagtgccaggtgggagtggggcaggcccggccccttttgcaagtcacctccccagttctccaacgcttacaaggtgtgctccgacaactcatgtcccaaggattgtcctggcacgatgacctcacccagtatgtgatctctcaggagatggagcgcatccccaggcttcgccccccagagccccgtccaagggacaggtctggcttggcacccaagagacctggtcctgctggagagctgcttttacaggacatccccactggctcc

SEQ ID NO: 171883 - DNA, 4723 bp, Homo sapiens
  Payload ID: 13772
  Gene Symbol: PTPRN2
  Gene Name: protein tyrosine phosphatase, receptor type, N polypeptide 2
  Uniprot ID: Q92932
  ENST ID: ENST00000389413
  CDS Start-End: 105-3065
ggcgggaggagccggcggcgcgcgcctccctgggcccggactcggccgcctcccgccgcctcccgcgcggccatggactgagcgccgccggccaggccgcggggatggggccgccgctcccgctgctgctgctgctactgctgctgctgccgccacgcgtcctgcctgccgccccttcgtccgtcccccgcggccggcagctcccggggcgtctgggctgcctgctcgaggagggcctctgcggagcgtccgaggcctgtgtgaacgatggagtgtttggaaggtgccagaaggttccggcaatggacttttaccgctacgaggtgtcgcccgtggccctgcagcgcctgcgcgtggcgttgcagaagctttccggcacaggtttcacgtggcaggatgactatactcagtatgtgatggaccaggaacttgcagacctcccgaaaacctacctgaggcgtcctgaagcatccagcccagccaggccctcaaaacacagcgttggcagcgagaggaggtacagtcgggagggcggtgctgccctggccaacgccctccgacgccacctgcccttcctggaggccctgtcccaggccccagcctcagacgtgctcgccaggacccatacggcgcaggacagaccccccgctgagggtgatgaccgcttctccgagagcatcctgacctatgtggcccacacgtctgcgctgacctaccctcccgggtcccggacccagctccgcgaggacctcctgccgcggaccctcggccagctccagccagatgagctcagccctaaggtggacagtggtgtggacagacaccatctgatggcggccctcagtgcctatgctgcccagaggcccccagctccccccggggagggcagcctggagccacagtaccttctgcgtgcaccctcaagaatgcccaggcctttgctggcaccagccgccccccagaagtggccttcacctctgggagattccgaagacccctccagcacaggcgatggagcacggattcataccctcctgaaggacctgcagaggcagccggctgaggtgaggggcctgagtggcctggagctggacggcatggctgagctgatggctggcctgatgcaaggcgtggaccatggagtagctcgaggcagccctgggagagcggccctgggagagtctggagaacaggcggatggccccaaggccaccctccgtggagacagctttccagatgacggagtgcaggacgacgatgatagactttaccaagaggtccatcgtctgagtgccacactcgggggcctcctgcaggaccacgggtctcgactcttacctggagccctcccctttgcaaggcccctcgacatggagaggaagaagtccgagcaccctgagtcttccctgtcttcagaagaggagactgccggagtggagaacgtcaagagccagacgtattccaaagatctgctggggcagcagccgcattcggagcccggggccgctgcgtttggggagctccaaaaccagatgcctgggccctcgaaggaggagcagagccttccagcgggtgctcaggaggccctcagcgacggcctgcaattggaggtccagccttccgaggaagaggcgcggggctacatcgtgacagacagagaggttctcggaccagcagtgaccttcaaagtgagcgccaatgtccaaaacgtgaccactgaggatgtggagaaggccacagttgacaacaaagacaaactggaggaaacctctggactgaaaattcttcaaaccggagtcgggtcgaaaagcaaactcaagttcctgcctcctcaggcggagcaagaagactccaccaagttcatcgcgctcaccctggtctccctcgcctgcatcctgggcgtcctcctggcctctggcctcatctactgcctccgccatagctctcagcacaggctgaaggagaagctctcgggactagggggcgacccaggtgcagatgccactgccgcctaccaggagctgtgccgccagcgtatggccacgcggccaccagaccgacctgagggcccgcacacgtcacgcatcagcagcgtctcatcccagttcagcgacgggccgatccccagcccctccgcacgcagcagcgcctcatcctggtccgaggagcctgtgcagtccaacatggacatctccaccggccacatgatcctgtcctacatggaggaccacctgaagaacaagaaccggctggagaaggagtgggaagcgctgtgcgcctaccaggcggagcccaacagctcgttcgtggcccagagggaggagaacgtgcccaagaaccgctccctggccgtgctgacctatgaccactcccgggtcctgctgaaggcggagaacagccacagccactcagactacatcaacgctagccccatcatggatcacgacccgaggaaccccgcgtacatcgccacccagggaccgctgcccgccaccgtggctgacttttggcagatggtgtgggagagcggctgcgtggtgatcgtcatgctgacacccctcgcggagaacggcgtccggcagtgctaccactactggccggatgaaggctccaatctctaccacatctatgaggtgaacctggtctccgagcacatctggtgtgaggacttcctggtgaggagcttctatctgaagaacctgcagaccaacgagacgcgcaccgtgacgcagttccacttcctgagttggtatgaccgaggagtcccttcctcctcaaggtccctcctggacttccgcagaaaagtaaacaagtgctacaggggccgttcttgtccaataattgttcattgcagtgacggtgcaggccggagcggcacctacgtcctgatcgacatggttctcaacaagatggccaaaggtgctaaagagattgatatcgcagcgaccctggagcacttgagggaccagagacccggcatggtccagacgaaggagcagtttgagttcgcgctgacagccgtggctgaggaggtgaacgccatcctcaaggcccttccccagtgagcggcagcctcaggggcctcaggggagcccccaccccacggatgttgtcaggaatcatgatctgactttaattgtgtgtcttctattataactgcatagtaatagggcccttagctctcccgtagtcagcgcagtttagcagttaaaagtgtatttttgtttaatcaaacaataataaagagagatttgtggaaaaatccagttacgggtggaggggaatcggttcatcaattttcacttgcttaaaaaaaatactttttcttaaagcacccgttcaccttcttggttgaagttgtgttaacaatgcagtagccagcacgttcgaggcggtttccaggaagagtgtgcttgtcatctgccactttcgggagggtggatccactgtgcaggagtggccggggaagctggcagcactcagtgaggccgcccggcacacaaggcacgtttggcatttctctttgagagagtttatcattgggagaagccgcagggacagaactgaacgtcctgcagcttcggggcaagtgagacaatcacagctcctcgctgcgtctccatcaacactgcgccgggtaccatggacggccccgtcagccacacctgtcagcccaagcagagtgattcaggggctccccgggggcagacacctgtgcaccccatgagtagtgcccacttgaggctggcactcccctgacctcacctttgcaaagttacagatgcaccccaacattgagatgtgtttttaatgttaaaatattgatttctacgttatgaaaacagatgcccccgtgaatgcttacctgtgagataaccacaaccaggaagaacaaatctgggcattgagcaagctatgagggtccccgggagcacacgaaccctgccaggcccccgctggctcctccaggcacgtcccggacctgtggggccccagagaggggacatttccctcctgggagagaaggagatcagggcaactcggagagggctgcgagcatttccctcccgggagaggagatcagggcgacctgcacgcactgcgtagagcctggaagggaagtgagaaaccagccgaccggccctgcccctcttcccgggatcacttaatgaaccacgtgttttgacatcatgtaaacctaagcacgtagagatgattcggatttgacaaaataacatttgagtatccgattcgccatcaccccctaccccagaaataggacaattcacttcattgaccaagatgatcacatggaaggcggcacagaggcagctgtgtgggctgcagatttcctgtgtggggttcagcgtagaaaacgcacctccatcccgcccttcccacagcattcctccatcttagatagatggtactctccaaaggccctaccagagggaacacggcctactgagcggacagaatgatgccaaaatattgcttatgtctctacatggtattgtaatgaatatctgctttaatatagctatcatttcttttccaaaattacttctctctatctggaatttaattaatcgaaatgaatttatctgaatataggaagcatatgcctacttgtaatttctaactccttatgtttgaagagaaacctccggtgtgagatatacaaatatatttaattgtgtcatattaaacttctgatttcaca

SEQ ID NO: 171884 - DNA, 4692 bp, Homo sapiens
  Payload ID: 13772
  Gene Symbol: PTPRN2
  Gene Name: protein tyrosine phosphatase, receptor type, N polypeptide 2
  Uniprot ID: Q92932
  ENST ID: ENST00000389416
  CDS Start-End: 43-3039
ccgcgcggccatggactgagcgccgccggccaggccgcggggatggggccgccgctcccgctgctgctgctgctactgctgctgctgccgccacgcgtcctgcctgccgccccttcgtccgtcccccgcggccggcagctcccggggcgtctggatggagtgtttggaaggtgccagaaggttccggcaatggacttttaccgctacgaggtgtcgcccgtggccctgcagcgcctgcgcgtggcgttgcagaagctttccggcacaggtttcacgtggcaggatgactatactcagtatgtgatggaccaggaacttgcagacctcccgaaaacctacctgaggcgtcctgaagcatccagcccagccaggccctcaaaacacagcgttggcagcgagaggaggtacagtcgggagggcggtgctgccctggccaacgccctccgacgccacctgcccttcctggaggccctgtcccaggccccagcctcagacgtgctcgccaggacccatacggcgcaggacagaccccccgctgagggtgatgaccgcttctccgagagcatcctgacctatgtggcccacacgtctgcgctgacctaccctcccgggtcccggacccagctccgcgaggacctcctgccgcggaccctcggccagctccagccagatgagctcagccctaaggtggacagtggtgtggacagacaccatctgatggcggccctcagtgcctatgctgcccagaggcccccagctccccccggggagggcagcctggagccacagtaccttctgcgtgcaccctcaagaatgcccaggcctttgctggcaccagccgccccccagaagtggccttcacctctgggagattccgaagacccctccagcacaggcgatggagcacggattcataccctcctgaaggacctgcagaggcagccggctgaggtgaggggcctgagtggcctggagctggacggcatggctgagctgatggctggcctgatgcaaggcgtggaccatggagtagctcgaggcagccctgggagagcggccctgggagagtctggagaacaggcggatggccccaaggccaccctccgtggagacagctttccagatgacggagtgcaggacgacgatgatagactttaccaagaggtccatcgtctgagtgccacactcgggggcctcctgcaggaccacgggtctcgactcttacctggagccctcccctttgcaaggcccctcgacatggagaggaagaagtccgagcaccctgagtcttccctgtcttcagaagaggagactgccggagtggagaacgtcaagagccagacgtattccaaagatctgctggggcagcagccgcattcggagcccggggccgctgcgtttggggagctccaaaaccagatgcctgggccctcgaaggaggagcagagccttccagcgggtgctcaggaggccctcagcgacggcctgcaattggaggtccagccttccgaggaagaggcgcggggctacatcgtgacagacagagaccccctgcgccccgaggaaggaaggcggctggtggaggacgtcgcccgcctcctgcaggtgcccagcagtgcgttcgctgacgtggaggttctcggaccagcagtgaccttcaaagtgagcgccaatgtccaaaacgtgaccactgaggatgtggagaaggccacagttgacaacaaagacaaactggaggaaacctctggactgaaaattcttcaaaccggagtcgggtcgaaaagcaaactcaagttcctgcctcctcaggcggagcaagaagactccaccaagttcatcgcgctcaccctggtctccctcgcctgcatcctgggcgtcctcctggcctctggcctcatctactgcctccgccatagctctcagcacaggctgaaggagaagctctcgggactagggggcgacccaggtgcagatgccactgccgcctaccaggagctgtgccgccagcgtatggccacgcggccaccagaccgacctgagggcccgcacacgtcacgcatcagcagcgtctcatcccagttcagcgacgggccgatccccagcccctccgcacgcagcagcgcctcatcctggtccgaggagcctgtgcagtccaacatggacatctccaccggccacatgatcctgtcctacatggaggaccacctgaagaacaagaaccggctggagaaggagtgggaagcgctgtgcgcctaccaggcggagcccaacagctcgttcgtggcccagagggaggagaacgtgcccaagaaccgctccctggccgtgctgacctatgaccactcccgggtcctgctgaaggcggagaacagccacagccactcagactacatcaacgctagccccatcatggatcacgacccgaggaaccccgcgtacatcgccacccagggaccgctgcccgccaccgtggctgacttttggcagatggtgtgggagagcggctgcgtggtgatcgtcatgctgacacccctcgcggagaacggcgtccggcagtgctaccactactggccggatgaaggctccaatctctaccacatctatgaggtgaacctggtctccgagcacatctggtgtgaggacttcctggtgaggagcttctatctgaagaacctgcagaccaacgagacgcgcaccgtgacgcagttccacttcctgagttggtatgaccgaggagtcccttcctcctcaaggtccctcctggacttccgcagaaaagtaaacaagtgctacaggggccgttcttgtccaataattgttcattgcagtgacggtgcaggccggagcggcacctacgtcctgatcgacatggttctcaacaagatggccaaaggtgctaaagagattgatatcgcagcgaccctggagcacttgagggaccagagacccggcatggtccagacgaaggagcagtttgagttcgcgctgacagccgtggctgaggaggtgaacgccatcctcaaggcccttccccagtgagcggcagcctcaggggcctcaggggagcccccaccccacggatgttgtcaggaatcatgatctgactttaattgtgtgtcttctattataactgcatagtaatagggcccttagctctcccgtagtcagcgcagtttagcagttaaaagtgtatttttgtttaatcaaacaataataaagagagatttgtggaaaaatccagttacgggtggaggggaatcggttcatcaattttcacttgcttaaaaaaaatactttttcttaaagcacccgttcaccttcttggttgaagttgtgttaacaatgcagtagccagcacgttcgaggcggtttccaggaagagtgtgcttgtcatctgccactttcgggagggtggatccactgtgcaggagtggccggggaagctggcagcactcagtgaggccgcccggcacacaaggcacgtttggcatttctctttgagagagtttatcattgggagaagccgcagggacagaactgaacgtcctgcagcttcggggcaagtgagacaatcacagctcctcgctgcgtctccatcaacactgcgccgggtaccatggacggccccgtcagccacacctgtcagcccaagcagagtgattcaggggctccccgggggcagacacctgtgcaccccatgagtagtgcccacttgaggctggcactcccctgacctcacctttgcaaagttacagatgcaccccaacattgagatgtgtttttaatgttaaaatattgatttctacgttatgaaaacagatgcccccgtgaatgcttacctgtgagataaccacaaccaggaagaacaaatctgggcattgagcaagctatgagggtccccgggagcacacgaaccctgccaggcccccgctggctcctccaggcacgtcccggacctgtggggccccagagaggggacatttccctcctgggagagaaggagatcagggcaactcggagagggctgcgagcatttccctcccgggagaggagatcagggcgacctgcacgcactgcgtagagcctggaagggaagtgagaaaccagccgaccggccctgcccctcttcccgggatcacttaatgaaccacgtgttttgacatcatgtaaacctaagcacgtagagatgattcggatttgacaaaataacatttgagtatccgattcgccatcaccccctaccccagaaataggacaattcacttcattgaccaagatgatcacatggaaggcggcacagaggcagctgtgtgggctgcagatttcctgtgtggggttcagcgtagaaaacgcacctccatcccgcccttcccacagcattcctccatcttagatagatggtactctccaaaggccctaccagagggaacacggcctactgagcggacagaatgatgccaaaatattgcttatgtctctacatggtattgtaatgaatatctgctttaatatagctatcatttcttttccaaaattacttctctctatctggaatttaattaatcgaaatgaatttatctgaatataggaagcatatgcctacttgtaatttctaactccttatgtttgaagagaaacctccggtgtgagatatacaaatatatttaattgtgtcatattaaacttctgatt

SEQ ID NO: 171885 - DNA, 4706 bp, Homo sapiens
  Payload ID: 13772
  Gene Symbol: PTPRN2
  Gene Name: protein tyrosine phosphatase, receptor type, N polypeptide 2
  Uniprot ID: Q92932
  ENST ID: ENST00000389418
  CDS Start-End: 11-3058
ggccgcggggatggggccgccgctcccgctgctgctgctgctactgctgctgctgccgccacgcgtcctgcctgccgccccttcgtccgtcccccgcggccggcagctcccggggcgtctgggctgcctgctcgaggagggcctctgcggagcgtccgaggcctgtgtgaacgatggagtgtttggaaggtgccagaaggttccggcaatggacttttaccgctacgaggtgtcgcccgtggccctgcagcgcctgcgcgtggcgttgcagaagctttccggcacaggtttcacgtggcaggatgactatactcagtatgtgatggaccaggaacttgcagacctcccgaaaacctacctgaggcgtcctgaagcatccagcccagccaggccctcaaaacacagcgttggcagcgagaggaggtacagtcgggagggcggtgctgccctggccaacgccctccgacgccacctgcccttcctggaggccctgtcccaggccccagcctcagacgtgctcgccaggacccatacggcgcaggacagaccccccgctgagggtgatgaccgcttctccgagagcatcctgacctatgtggcccacacgtctgcgctgacctaccctcccgggtcccggacccagctccgcgaggacctcctgccgcggaccctcggccagctccagccagatgagctcagccctaaggtggacagtggtgtggacagacaccatctgatggcggccctcagtgcctatgctgcccagaggcccccagctccccccggggagggcagcctggagccacagtaccttctgcgtgcaccctcaagaatgcccaggcctttgctggcaccagccgccccccagaagtggccttcacctctgggagattccgaagacccctccagcacaggcgatggagcacggattcataccctcctgaaggacctgcagaggcagccggctgaggtgaggggcctgagtggcctggagctggacggcatggctgagctgatggctggcctgatgcaaggcgtggaccatggagtagctcgaggcagccctgggagagcggccctgggagagtctggagaacaggcggatggccccaaggccaccctccgtggagacagctttccagatgacggagtgcaggacgacgatgatagactttaccaagaggtccatcgtctgagtgccacactcgggggcctcctgcaggaccacgggtctcgactcttacctggagccctcccctttgcaaggcccctcgacatggagaggaagaagtccgagcaccctgagtcttccctgtcttcagaagaggagactgccggagtggagaacgtcaagagccagacgtattccaaagatctgctggggcagcagccgcattcggagcccggggccgctgcgtttggggagctccaaaaccagatgcctgggccctcgaaggaggagcagagccttccagcgggtgctcaggaggccctcagcgacggcctgcaattggaggtccagccttccgaggaagaggcgcggggctacatcgtgacagacagagaccccctgcgccccgaggaaggaaggcggctggtggaggacgtcgcccgcctcctgcaggtgcccagcagtgcgttcgctgacgtggaggttctcggaccagcagtgaccttcaaagtgagcgccaatgtccaaaacgtgaccactgaggatgtggagaaggccacagttgacaacaaagacaaactggaggaaacctctggactgaaaattcttcaaaccggagtcgggtcgaaaagcaaactcaagttcctgcctcctcaggcggagcaagaagactccaccaagttcatcgcgctcaccctggtctccctcgcctgcatcctgggcgtcctcctggcctctggcctcatctactgcctccgccatagctctcagcacaggctgaaggagaagctctcgggactagggggcgacccaggtgcagatgccactgccgcctaccaggagctgtgccgccagcgtatggccacgcggccaccagaccgacctgagggcccgcacacgtcacgcatcagcagcgtctcatcccagttcagcgacgggccgatccccagcccctccgcacgcagcagcgcctcatcctggtccgaggagcctgtgcagtccaacatggacatctccaccggccacatgatcctgtcctacatggaggaccacctgaagaacaagaaccggctggagaaggagtgggaagcgctgtgcgcctaccaggcggagcccaacagctcgttcgtggcccagagggaggagaacgtgcccaagaaccgctccctggccgtgctgacctatgaccactcccgggtcctgctgaaggcggagaacagccacagccactcagactacatcaacgctagccccatcatggatcacgacccgaggaaccccgcgtacatcgccacccagggaccgctgcccgccaccgtggctgacttttggcagatggtgtgggagagcggctgcgtggtgatcgtcatgctgacacccctcgcggagaacggcgtccggcagtgctaccactactggccggatgaaggctccaatctctaccacatctatgaggtgaacctggtctccgagcacatctggtgtgaggacttcctggtgaggagcttctatctgaagaacctgcagaccaacgagacgcgcaccgtgacgcagttccacttcctgagttggtatgaccgaggagtcccttcctcctcaaggtccctcctggacttccgcagaaaagtaaacaagtgctacaggggccgttcttgtccaataattgttcattgcagtgacggtgcaggccggagcggcacctacgtcctgatcgacatggttctcaacaagatggccaaaggtgctaaagagattgatatcgcagcgaccctggagcacttgagggaccagagacccggcatggtccagacgaaggagcagtttgagttcgcgctgacagccgtggctgaggaggtgaacgccatcctcaaggcccttccccagtgagcggcagcctcaggggcctcaggggagcccccaccccacggatgttgtcaggaatcatgatctgactttaattgtgtgtcttctattataactgcatagtaatagggcccttagctctcccgtagtcagcgcagtttagcagttaaaagtgtatttttgtttaatcaaacaataataaagagagatttgtggaaaaatccagttacgggtggaggggaatcggttcatcaattttcacttgcttaaaaaaaatactttttcttaaagcacccgttcaccttcttggttgaagttgtgttaacaatgcagtagccagcacgttcgaggcggtttccaggaagagtgtgcttgtcatctgccactttcgggagggtggatccactgtgcaggagtggccggggaagctggcagcactcagtgaggccgcccggcacacaaggcacgtttggcatttctctttgagagagtttatcattgggagaagccgcagggacagaactgaacgtcctgcagcttcggggcaagtgagacaatcacagctcctcgctgcgtctccatcaacactgcgccgggtaccatggacggccccgtcagccacacctgtcagcccaagcagagtgattcaggggctccccgggggcagacacctgtgcaccccatgagtagtgcccacttgaggctggcactcccctgacctcacctttgcaaagttacagatgcaccccaacattgagatgtgtttttaatgttaaaatattgatttctacgttatgaaaacagatgcccccgtgaatgcttacctgtgagataaccacaaccaggaagaacaaatctgggcattgagcaagctatgagggtccccgggagcacacgaaccctgccaggcccccgctggctcctccaggcacgtcccggacctgtggggccccagagaggggacatttccctcctgggagagaaggagatcagggcaactcggagagggctgcgagcatttccctcccgggagaggagatcagggcgacctgcacgcactgcgtagagcctggaagggaagtgagaaaccagccgaccggccctgcccctcttcccgggatcacttaatgaaccacgtgttttgacatcatgtaaacctaagcacgtagagatgattcggatttgacaaaataacatttgagtatccgattcgccatcaccccctaccccagaaataggacaattcacttcattgaccaagatgatcacatggaaggcggcacagaggcagctgtgtgggctgcagatttcctgtgtggggttcagcgtagaaaacgcacctccatcccgcccttcccacagcattcctccatcttagatagatggtactctccaaaggccctaccagagggaacacggcctactgagcggacagaatgatgccaaaatattgcttatgtctctacatggtattgtaatgaatatctgctttaatatagctatcatttcttttccaaaattacttctctctatctggaatttaattaatcgaaatgaatttatctgaatataggaagcatatgcctacttgtaatttctaactccttatgtttgaagagaaacctccggtgtgagatatacaaatatatttaattgtgtcatattaaacttc

SEQ ID NO: 171886 - DNA, 1374 bp, Homo sapiens
  Payload ID: 13772
  Gene Symbol: PTPRN2
  Gene Name: protein tyrosine phosphatase, receptor type, N polypeptide 2
  ENST ID: ENST00000404321
  CDS Start-End: 1-1374
acaggtttcacgtggcaggatgactatactcagtatgtgatggaccaggaacttgcagacctcccgaaaacctacctgaggcgtcctgaagcatccagcccagccaggccctcaaaacacagcgttggcagcgagaggaggtacagtcgggagggcggtgctgccctggccaacgccctccgacgccacctgcccttcctggaggccctgtcccaggccccagcctcagacgtgctcgccaggacccatacggcgcaggacagaccccccgctgagggtgatgaccgcttctccgagagcatcctgacctatgtggcccacacgtctgcgctgacctaccctcccgggtcccggacccagctccgcgaggacctcctgccgcggaccctcggccagctccagccagatgagctcagccctaaggtggacagtggtgtggacagacaccatctgatggcggccctcagtgcctatgctgcccagaggcccccagctccccccggggagggcagcctggagccacagtaccttctgcgtgcaccctcaagaatgcccaggcctttgctggcaccagccgccccccagaagtggccttcacctctgggagattccgaagacccctccagcacaggcgatggagcacggattcataccctcctgaaggacctgcagaggcagccggctgaggtgaggggcctgagtggcctggagctggacggcatggctgagctgatggctggcctgatgcaaggcgtggaccatggagtagctcgaggcagccctgggagagcggccctgggagagtctggagaacaggcggatggccccaaggccaccctccgtggagacagctttccagatgacggagtgcaggacgacgatgatagactttaccaagaggtccatcgtctgagtgccacactcgggggcctcctgcaggaccacgggtctcgactcttacctggagccctcccctttgcaaggcccctcgacatggagaggaagaagtccgagcaccctgagtcttccctgtcttcagaagaggagactgccggagtggagaacgtcaagagccagacgtattccaaagatctgctggggcagcagccgcattcggagcccggggccgctgcgtttggggagctccaaaaccagatgcctgggccctcgaaggaggagcagagccttccagcgggtgctcaggaggccctcagcgacggcctgcaattggaggtccagccttccgaggaagaggcgcggggctacatcgtgacagacagagaccccctgcgccccgaggaaggaaggcggctggtggaggacgtcgcccgcctcctgcaggtgcccagcagtgcgttcgctgacgtggagtaa

SEQ ID NO: 171887 - DNA, 4711 bp, Homo sapiens
  Payload ID: 13772
  Gene Symbol: PTPRN2
  Gene Name: protein tyrosine phosphatase, receptor type, N polypeptide 2
  ENST ID: ENST00000409483
  CDS Start-End: 120-3053
gagcgcgagaggcgcggcgggaggagccggcggcgcgcgcctccctgggcccggactcggccgcctcccgccgcctcccgcgcggccatggactgagcgccgccggccaggccgcggggatggggccgccgctcccgctgctgctgctgctactgctgctgctgccgccacgcgtcctgcctgccgccccttcgtccgtcccccgcggccggcagctcccggggcgtctgggctgcctgctcgaggagggcctctgcggagcgtccgaggcctgtgtgaacggtttcacgtggcaggatgactatactcagtatgtgatggaccaggaacttgcagacctcccgaaaacctacctgaggcgtcctgaagcatccagcccagccaggccctcaaaacacagcgttggcagcgagaggaggtacagtcgggagggcggtgctgccctggccaacgccctccgacgccacctgcccttcctggaggccctgtcccaggccccagcctcagacgtgctcgccaggacccatacggcgcaggacagaccccccgctgagggtgatgaccgcttctccgagagcatcctgacctatgtggcccacacgtctgcgctgacctaccctcccgggtcccggacccagctccgcgaggacctcctgccgcggaccctcggccagctccagccagatgagctcagccctaaggtggacagtggtgtggacagacaccatctgatggcggccctcagtgcctatgctgcccagaggcccccagctccccccggggagggcagcctggagccacagtaccttctgcgtgcaccctcaagaatgcccaggcctttgctggcaccagccgccccccagaagtggccttcacctctgggagattccgaagacccctccagcacaggcgatggagcacggattcataccctcctgaaggacctgcagaggcagccggctgaggtgaggggcctgagtggcctggagctggacggcatggctgagctgatggctggcctgatgcaaggcgtggaccatggagtagctcgaggcagccctgggagagcggccctgggagagtctggagaacaggcggatggccccaaggccaccctccgtggagacagctttccagatgacggagtgcaggacgacgatgatagactttaccaagaggtccatcgtctgagtgccacactcgggggcctcctgcaggaccacgggtctcgactcttacctggagccctcccctttgcaaggcccctcgacatggagaggaagaagtccgagcaccctgagtcttccctgtcttcagaagaggagactgccggagtggagaacgtcaagagccagacgtattccaaagatctgctggggcagcagccgcattcggagcccggggccgctgcgtttggggagctccaaaaccagatgcctgggccctcgaaggaggagcagagccttccagcgggtgctcaggaggccctcagcgacggcctgcaattggaggtccagccttccgaggaagaggcgcggggctacatcgtgacagacagagaccccctgcgccccgaggaaggaaggcggctggtggaggacgtcgcccgcctcctgcaggtgcccagcagtgcgttcgctgacgtggaggttctcggaccagcagtgaccttcaaagtgagcgccaatgtccaaaacgtgaccactgaggatgtggagaaggccacagttgacaacaaagacaaactggaggaaacctctggactgaaaattcttcaaaccggagtcgggtcgaaaagcaaactcaagttcctgcctcctcaggcggagcaagaagactccaccaagttcatcgcgctcaccctggtctccctcgcctgcatcctgggcgtcctcctggcctctggcctcatctactgcctccgccatagctctcagcacaggctgaaggagaagctctcgggactagggggcgacccaggtgcagatgccactgccgcctaccaggagctgtgccgccagcgtatggccacgcggccaccagaccgacctgagggcccgcacacgtcacgcatcagcagcgtctcatcccagttcagcgacgggccgatccccagcccctccgcacgcagcagcgcctcatcctggtccgaggagcctgtgcagtccaacatggacatctccaccggccacatgatcctgtcctacatggaggaccacctgaagaacaagaaccggctggagaaggagtgggaagcgctgtgcgcctaccaggcggagcccaacagctcgttcgtggcccagagggaggagaacgtgcccaagaaccgctccctggccgtgctgacctatgaccactcccgggtcctgctgaaggcggagaacagccacagccactcagactacatcaacgctagccccatcatggatcacgacccgaggaaccccgcgtacatcgccacccagggaccgctgcccgccaccgtggctgacttttggcagatggtgtgggagagcggctgcgtggtgatcgtcatgctgacacccctcgcggagaacggcgtccggcagtgctaccactactggccggatgaaggctccaatctctaccacatctatgaggtgaacctggtctccgagcacatctggtgtgaggacttcctggtgaggagcttctatctgaagaacctgcagaccaacgagacgcgcaccgtgacgcagttccacttcctgagttggtatgaccgaggagtcccttcctcctcaaggtccctcctggacttccgcagaaaagtaaacaagtgctacaggggccgttcttgtccaataattgttcattgcagtgacggtgcaggccggagcggcacctacgtcctgatcgacatggttctcaacaagatggccaaaggtgctaaagagattgatatcgcagcgaccctggagcacttgagggaccagagacccggcatggtccagacgaaggagcagtttgagttcgcgctgacagccgtggctgaggaggtgaacgccatcctcaaggcccttccccagtgagcggcagcctcaggggcctcaggggagcccccaccccacggatgttgtcaggaatcatgatctgactttaattgtgtgtcttctattataactgcatagtaatagggcccttagctctcccgtagtcagcgcagtttagcagttaaaagtgtatttttgtttaatcaaacaataataaagagagatttgtggaaaaatccagttacgggtggaggggaatcggttcatcaattttcacttgcttaaaaaaaatactttttcttaaagcacccgttcaccttcttggttgaagttgtgttaacaatgcagtagccagcacgttcgaggcggtttccaggaagagtgtgcttgtcatctgccactttcgggagggtggatccactgtgcaggagtggccggggaagctggcagcactcagtgaggccgcccggcacacaaggcacgtttggcatttctctttgagagagtttatcattgggagaagccgcagggacagaactgaacgtcctgcagcttcggggcaagtgagacaatcacagctcctcgctgcgtctccatcaacactgcgccgggtaccatggacggccccgtcagccacacctgtcagcccaagcagagtgattcaggggctccccgggggcagacacctgtgcaccccatgagtagtgcccacttgaggctggcactcccctgacctcacctttgcaaagttacagatgcaccccaacattgagatgtgtttttaatgttaaaatattgatttctacgttatgaaaacagatgcccccgtgaatgcttacctgtgagataaccacaaccaggaagaacaaatctgggcattgagcaagctatgagggtccccgggagcacacgaaccctgccaggcccccgctggctcctccaggcacgtcccggacctgtggggccccagagaggggacatttccctcctgggagagaaggagatcagggcaactcggagagggctgcgagcatttccctcccgggagaggagatcagggcgacctgcacgcactgcgtagagcctggaagggaagtgagaaaccagccgaccggccctgcccctcttcccgggatcacttaatgaaccacgtgttttgacatcatgtaaacctaagcacgtagagatgattcggatttgacaaaataacatttgagtatccgattcgccatcaccccctaccccagaaataggacaattcacttcattgaccaagatgatcacatggaaggcggcacagaggcagctgtgtgggctgcagatttcctgtgtggggttcagcgtagaaaacgcacctccatcccgcccttcccacagcattcctccatcttagatagatggtactctccaaaggccctaccagagggaacacggcctactgagcggacagaatgatgccaaaatattgcttatgtctctacatggtattgtaatgaatatctgctttaatatagctatcatttcttttccaaaattacttctctctatctggaatttaattaatcgaaatgaatttatctgaatataggaagcatatgcctacttgtaatttctaactccttatgtttgaagagaaacctccggtgtgagatatacaaatatatttaattgtgtcatattaaacttctgatttcaca

SEQ ID NO: 171888 - DNA, 114 bp, Homo sapiens
  Payload ID: 13772
  Gene Symbol: PTPRN2
  Gene Name: protein tyrosine phosphatase, receptor type, N polypeptide 2
  ENST ID: ENST00000631503
  CDS Start-End: 1-114
atggagtgtttggaaggtgccagaaggttccggcaatggacttttaccgctacgaggtgtcgcccgtggccctgcagcgcctgcgcgtggcgttgcagaagctttccggcacag

SEQ ID NO: 171889 - DNA, 114 bp, Homo sapiens; identical to SEQ ID NO: 171888
  Payload ID: 13772
  Gene Symbol: PTPRN2
  Gene Name: protein tyrosine phosphatase, receptor type, N polypeptide 2
  ENST ID: ENST00000633393
  CDS Start-End: 1-114

SEQ ID NO: 171890 - DNA, 114 bp, Homo sapiens; identical to SEQ ID NO: 171888
  Payload ID: 13772
  Gene Symbol: PTPRN2
  Gene Name: protein tyrosine phosphatase, receptor type, N polypeptide 2
  ENST ID: ENST00000633583
  CDS Start-End: 1-114

SEQ ID NO: 171891 - DNA, 5301 bp, Homo sapiens
  Payload ID: 13773
  Gene Symbol: PTPRO
  Gene Name: protein tyrosine phosphatase, receptor type, O
  Uniprot ID: Q16827
  ENST ID: ENST00000281171
  CDS Start-End: 331-3981
cgcggggtccccgcctctcgctcaccacacagaccccgcgcctcctctggcagccgcggtggtggcggcggcagagcctcgcccactccaatccccaccctctccatccttagtcattaaagaacagcagcgcctggcacgttcttggaggaccccgggcgcagaggaggaaagggagcaggcgcagggggactggaaaggcagcatgcgctcgccaggagcaacctcggcgcccagggtctgaggctgcagccccagttcgccattgtgagccgccgccgggggagtccgctagcgcagccgtgcccccgagtccccgtccgcgcagcgatggggcacctgcccacggggatacacggcgcccgccgcctcctgcctctgctctggctctttgtgctgttcaagaatgctacagctttccatgtaactgtccaagatgataataacatcgttgtctcattagaagcttcagacgtcatcagtccagcatctgtgtatgttgtgaagataactggtgaatccaaaaattatttcttcgaatttgaggaattcaacagcactttgcctcctcctgttattttcaaggccagttatcatggcctttattatataatcactctggtagtggtaaatggaaatgtggtgaccaagccatccagatcaatcactgtgttaacaaaacctctacctgtaaccagtgtttccatatatgactataaaccttctcctgaaacaggagtcctgtttgaaatacattatccagaaaaatataacgttttcacaagagtgaacattagctactgggaaggtaaagacttccggacaatgctatataaagatttctttaagggaaaaacagtatttaatcactggctgccaggaatgtgttatagtaatatcacctttcagctggtatctgaggcaacttttaataaaagtacccttgttgagtacagtggtgtcagtcacgaacccaaacagcacagaactgccccttatccacctcaaaatatttccgttcgtatcgtaaacttgaacaaaaacaactgggaagaacagagtggcaatttcccagaagaatccttcatgagatcacaagatacaataggaaaagaaaaactcttccattttacagaagaaacccctgaaattccctcgggcaacatttcttccggttggcctgattttaatagcagtgactatgaaactacgtctcagccatattggtgggacagtgcatctgcagctcctgaaagtgaagatgaatttgtcagcgtacttcccatggaatacgaaaataacagtacactcagtgagacagagaagtcaacatcaggctctttctcctttttccctgtgcaaatgatattgacctggttaccacccaaaccacccactgcttttgatgggttccatatccatattgaacgagaagagaactttactgaatatttgatggtggatgaagaagcacatgaatttgttgcagaactgaaggaacctgggaaatataagttatctgtgacaacctttagttcctcaggatcttgtgaaactcgaaaaagtcagtcagcaaaatcactcagcttttatatcagtccttcaggagagtggattgaagaactgaccgagaagccgcagcacgtgagtgtccacgttttaagctcaaccactgccttgatgtcctggacatcttcccaagagaactacaacagcaccattgtgtctgtggtgtcgctgacctgccagaaacaaaaggagagccagaggcttgaaaagcagtactgcactcaggtgaactcaagcaaacctattattgaaaatctggttcctggtgcccagtaccaggttgtaatatacctaaggaaaggccctttgattggaccaccttcagatcctgtgacatttgctattgttcccacaggaataaaggatttaatgctctatcctttgggtcctacggccgtggttctgagctggaccagaccttatttaggcgtgttcagaaaatacgtggttgaaatgttttatttcaaccctgctacaatgacatcagagtggaccacctactatgaaatagcagcaactgtttccttaactgcatccgtgagaatagctaatctgctgccagcatggtactacaacttccgggttaccatggtgacgtggggagatccagaattgagctgctgtgacagctctaccatcagcttcataacagccccagtggctccggaaatcacttctgtggaatatttcaacagtctgttatatatcagttggacatatggggatgatacaacggacttgtcccattctagaatgcttcactggatggtggttgcagaaggaaaaaagaaaattaaaaagagtgtaacacgcaatgtcatgactgcaattctcagcttgcctccaggcgacatctataacctctcagtaactgcttgtactgaaagaggaagtaatacctccatgctccgccttgtcaagctagaaccagctccacccaaatcactcttcgcagtgaacaaaacccagacttcagtgactttgctgtgggtggaagagggagtagctgatttctttgaagttttctgtcaacaagttggctccagtcagaaaaccaaacttcaggaaccagttgctgtttcttcccatgtcgtgaccatctccagccttcttcctgccactgcctacaattgtagtgtcaccagctttagccatgacagccccagtgtccctacgttcatagccgtctcaacaatggttacagagatgaatcccaatgtggtagtgatctccgtgctggccatccttagcacacttttaattggactgttgcttgttaccctcattattcttaggaaaaagcatctgcagatggctagggagtgtggagctggtacatttgtcaattttgcatccttagagagggatggaaagcttccatacaactggcgtaggagtatatttgctttcttaaccctgctaccctcatgtctttggactgattatcttttggcattttatattaatccttggagtaaaaatggtttaaagaagaggaaactgacaaacccggttcaactggatgactttgatgcctatattaaggatatggccaaagactctgactataaattttctcttcagtttgaggagttgaaattgattggactggatatcccacactttgctgcagatcttccactgaatcgatgtaaaaaccgttacacaaacatcctaccatatgacttcagccgtgtgagattagtctccatgaatgaagaggaaggtgcagactacatcaatgccaactatattcctggatacaactcaccccaggagtatattgccacccaggggccactgcctgaaaccagaaatgacttctggaagatggtcctgcaacaaaagtctcagattattgtcatgctcactcagtgtaatgagaaaaggagggtgaaatgtgaccattactggccattcacggaagaacctatagcctatggagacatcactgtggagatgatttcagaggaagagcaggacgactgggcctgtagacacttccggatcaactatgctgacgagatgcaggatgtgatgcattttaactacactgcatggcctgatcatggtgtgcccacagcaaatgctgcagaaagtatcctgcagtttgtacacatggtccgacagcaagctaccaagagcaaaggtcccatgatcattcactgcagtgctggcgtgggacggacaggaacattcattgccctggacaggctcttgcagcacattcgggatcatgagtttgttgacatcttagggctggtgtcagaaatgaggtcataccggatgtctatggtacagacagaggagcagtacatttttatccatcagtgtgtgcaactgatgtggatgaagaagaagcagcagttctgcatcagtgatgtcatatacgagaatgttagcaagtcctagttcagaatccggagcagagaggacatgatgtgcgcccatcctcccttgcttccagattgttttagtgggccctgatggtcatttttctaaacagaggccctgctttgtaatatgtggccaaggagataatttatctcacagaagcaccgggaagacttagccttaaagagcctacagtgtccttttggactctttcacttcgggacatttaataatggaccaaattcaacagaacaccaggaaggtcaagacgctctccaaagggcaggaagtacagcacttccgaagagtttagttggccctttgctggttgggctgagttttttatttttaagtgtttgtttttcagtgcaataatttttgtgtgtgtgtgattcttatcagaaagttgaattgttttctgcctacaccgttcatcagccccataacccaggaaggaacaggcattgttagcatcagattatacctcattattaaaaggaggcatggccacacatgaagaaatggtcattctacttcaaagaaattgagccagcactatctgtactccaacattaccggatctggattggggaggttggtcagggaagagaggggttctacccacagatcaactgtgtaatcttttactattcaagctataattcagcttcaaagtagagtagaaaaaaaattgtcttaactgttctagttcttgatggttttcttccttattaacagttggtgtttcttccttggcccttttggactaatgttactgtccaagttctttctcaagaaaccacatctggttcagaagagtgtcaagttggactctttgaactctgttgctgtctgagcaatcgtggtgcctagactttgcattccttgttctgttgacctgcatacatgtgagagctatttctttaagaactatataggctgtgaaaacgcactttctttcccccaaagagctgggaatttatgaagttatggcaatgaactgcagcatgctgggacaattatttgactacttttttttgtaatattgtcaaatgtctctatggattctgacagagatttctttttgttttgttattcttttggttgtcagtttcattttaacgagtgtaactagtaacattttattctttggattttgtataattacagtacatgattgtgtattgtgacatgaatgctgtcaaaatgacattgatggcattgtgaagcctgttactttgtgtcacttcctgataaataagaggtgatgacatggatatacaacagaaaacactttgagttgaaagtaaacacaagctggctgcttccctgtggcaa

SEQ ID NO: 171892 - DNA, 5061 bp, Homo sapiens
  Payload ID: 13773
  Gene Symbol: PTPRO
  Gene Name: protein tyrosine phosphatase, receptor type, O
  Uniprot ID: Q16827
  ENST ID: ENST00000348962
  CDS Start-End: 175-3741
gggcgcagaggaggaaagggagcaggcgcagggggactggaaaggcagcatgcgctcgccaggagcaacctcggcgcccagggtctgaggctgcagccccagttcgccattgtgagccgccgccgggggagtccgctagcgcagccgtgcccccgagtccccgtccgcgcagcgatggggcacctgcccacggggatacacggcgcccgccgcctcctgcctctgctctggctctttgtgctgttcaagaatgctacagctttccatgtaactgtccaagatgataataacatcgttgtctcattagaagcttcagacgtcatcagtccagcatctgtgtatgttgtgaagataactggtgaatccaaaaattatttcttcgaatttgaggaattcaacagcactttgcctcctcctgttattttcaaggccagttatcatggcctttattatataatcactctggtagtggtaaatggaaatgtggtgaccaagccatccagatcaatcactgtgttaacaaaacctctacctgtaaccagtgtttccatatatgactataaaccttctcctgaaacaggagtcctgtttgaaatacattatccagaaaaatataacgttttcacaagagtgaacattagctactgggaaggtaaagacttccggacaatgctatataaagatttctttaagggaaaaacagtatttaatcactggctgccaggaatgtgttatagtaatatcacctttcagctggtatctgaggcaacttttaataaaagtacccttgttgagtacagtggtgtcagtcacgaacccaaacagcacagaactgccccttatccacctcaaaatatttccgttcgtatcgtaaacttgaacaaaaacaactgggaagaacagagtggcaatttcccagaagaatccttcatgagatcacaagatacaataggaaaagaaaaactcttccattttacagaagaaacccctgaaattccctcgggcaacatttcttccggttggcctgattttaatagcagtgactatgaaactacgtctcagccatattggtgggacagtgcatctgcagctcctgaaagtgaagatgaatttgtcagcgtacttcccatggaatacgaaaataacagtacactcagtgagacagagaagtcaacatcaggctctttctcctttttccctgtgcaaatgatattgacctggttaccacccaaaccacccactgcttttgatgggttccatatccatattgaacgagaagagaactttactgaatatttgatggtggatgaagaagcacatgaatttgttgcagaactgaaggaacctgggaaatataagttatctgtgacaacctttagttcctcaggatcttgtgaaactcgaaaaagtcagtcagcaaaatcactcagcttttatatcagtccttcaggagagtggattgaagaactgaccgagaagccgcagcacgtgagtgtccacgttttaagctcaaccactgccttgatgtcctggacatcttcccaagagaactacaacagcaccattgtgtctgtggtgtcgctgacctgccagaaacaaaaggagagccagaggcttgaaaagcagtactgcactcaggtgaactcaagcaaacctattattgaaaatctggttcctggtgcccagtaccaggttgtaatatacctaaggaaaggccctttgattggaccaccttcagatcctgtgacatttgctattgttcccacaggaataaaggatttaatgctctatcctttgggtcctacggccgtggttctgagctggaccagaccttatttaggcgtgttcagaaaatacgtggttgaaatgttttatttcaaccctgctacaatgacatcagagtggaccacctactatgaaatagcagcaactgtttccttaactgcatccgtgagaatagctaatctgctgccagcatggtactacaacttccgggttaccatggtgacgtggggagatccagaattgagctgctgtgacagctctaccatcagcttcataacagccccagtggctccggaaatcacttctgtggaatatttcaacagtctgttatatatcagttggacatatggggatgatacaacggacttgtcccattctagaatgcttcactggatggtggttgcagaaggaaaaaagaaaattaaaaagagtgtaacacgcaatgtcatgactgcaattctcagcttgcctccaggcgacatctataacctctcagtaactgcttgtactgaaagaggaagtaatacctccatgctccgccttgtcaagctagaaccagctccacccaaatcactcttcgcagtgaacaaaacccagacttcagtgactttgctgtgggtggaagagggagtagctgatttctttgaagttttctgtcaacaagttggctccagtcagaaaaccaaacttcaggaaccagttgctgtttcttcccatgtcgtgaccatctccagccttcttcctgccactgcctacaattgtagtgtcaccagctttagccatgacagccccagtgtccctacgttcatagccgtctcaacaatggttacagagatgaatcccaatgtggtagtgatctccgtgctggccatccttagcacacttttaattggactgttgcttgttaccctcattattcttaggaaaaagcatctgcagatggctagggagtgtggagctggtacatttgtcaattttgcatccttagagagggatggaaagcttccatacaactggagtaaaaatggtttaaagaagaggaaactgacaaacccggttcaactggatgactttgatgcctatattaaggatatggccaaagactctgactataaattttctcttcagtttgaggagttgaaattgattggactggatatcccacactttgctgcagatcttccactgaatcgatgtaaaaaccgttacacaaacatcctaccatatgacttcagccgtgtgagattagtctccatgaatgaagaggaaggtgcagactacatcaatgccaactatattcctggatacaactcaccccaggagtatattgccacccaggggccactgcctgaaaccagaaatgacttctggaagatggtcctgcaacaaaagtctcagattattgtcatgctcactcagtgtaatgagaaaaggagggtgaaatgtgaccattactggccattcacggaagaacctatagcctatggagacatcactgtggagatgatttcagaggaagagcaggacgactgggcctgtagacacttccggatcaactatgctgacgagatgcaggatgtgatgcattttaactacactgcatggcctgatcatggtgtgcccacagcaaatgctgcagaaagtatcctgcagtttgtacacatggtccgacagcaagctaccaagagcaaaggtcccatgatcattcactgcagtgctggcgtgggacggacaggaacattcattgccctggacaggctcttgcagcacattcgggatcatgagtttgttgacatcttagggctggtgtcagaaatgaggtcataccggatgtctatggtacagacagaggagcagtacatttttatccatcagtgtgtgcaactgatgtggatgaagaagaagcagcagttctgcatcagtgatgtcatatacgagaatgttagcaagtcctagttcagaatccggagcagagaggacatgatgtgcgcccatcctcccttgcttccagattgttttagtgggccctgatggtcatttttctaaacagaggccctgctttgtaatatgtggccaaggagataatttatctcacagaagcaccgggaagacttagccttaaagagcctacagtgtccttttggactctttcacttcgggacatttaataatggaccaaattcaacagaacaccaggaaggtcaagacgctctccaaagggcaggaagtacagcacttccgaagagtttagttggccctttgctggttgggctgagttttttatttttaagtgtttgtttttcagtgcaataatttttgtgtgtgtgtgattcttatcagaaagttgaattgttttctgcctacaccgttcatcagccccataacccaggaaggaacaggcattgttagcatcagattatacctcattattaaaaggaggcatggccacacatgaagaaatggtcattctacttcaaagaaattgagccagcactatctgtactccaacattaccggatctggattggggaggttggtcagggaagagaggggttctacccacagatcaactgtgtaatcttttactattcaagctataattcagcttcaaagtagagtagaaaaaaaattgtcttaactgttctagttcttgatggttttcttccttattaacagttggtgtttcttccttggcccttttggactaatgttactgtccaagttctttctcaagaaaccacatctggttcagaagagtgtcaagttggactctttgaactctgttgctgtctgagcaatcgtggtgcctagactttgcattccttgttctgttgacctgcatacatgtgagagctatttctttaagaactatataggctgtgaaaacgcactttctttcccccaaagagctgggaatttatgaagttatggcaatgaactgcagcatgctgggacaattatttgactacttttttttgtaatattgtcaaatgtctctatggattctgacagagatttctttttgttttgttattcttttggttgtcagtttcattttaacgagtgtaactagtaacattttattctttggattttgtataattacagtacatgattgtgtattgtgacatgaatgctgtcaaaatgacattgatggcattgtgaagcctgttactttgtgtcacttcctgataaataagaggtgatgacatggatatacaacagaaaacactttgagttgaaagtaaacacaagctggctgcttccctgtggcaa

SEQ ID NO: 171893 - DNA, 4062 bp, Homo sapiens
  Payload ID: 13773
  Gene Symbol: PTPRO
  Gene Name: protein tyrosine phosphatase, receptor type, O
  Uniprot ID: Q16827
  ENST ID: ENST00000445537
  CDS Start-End: 487-1704
aagtaaaaaaatggaagggggaaaaggcaaagtattctgccttccaagttagatagctatctttatgaaaggacatatttcaaaggcaatataaagtctttatggtgctcttacctacctatatttgaattgggggatgcttcacctgcttattagtgaaagaagaaagaatacacttagtaaattaaattttttttaaaactttgtctttgctcagaaccagctccacccaaatcactcttcgcagtgaacaaaacccagacttcagtgactttgctgtgggtggaagagggagtagctgatttctttgaagttttctgtcaacaagttggctccagtcagaaaaccaaacttcaggaaccagttgctgtttcttcccatgtcgtgaccatctccagccttcttcctgccactgcctacaattgtagtgtcaccagctttagccatgacagccccagtgtccctacgttcatagccgtctcaacaatggttacagagatgaatcccaatgtggtagtgatctccgtgctggccatccttagcacacttttaattggactgttgcttgttaccctcattattcttaggaaaaagcatctgcagatggctagggagtgtggagctggtacatttgtcaattttgcatccttagagagggatggaaagcttccatacaactggcgtaggagtatatttgctttcttaaccctgctaccctcatgtctttggactgattatcttttggcattttatattaatccttggagtaaaaatggtttaaagaagaggaaactgacaaacccggttcaactggatgactttgatgcctatattaaggatatggccaaagactctgactataaattttctcttcagtttgaggagttgaaattgattggactggatatcccacactttgctgcagatcttccactgaatcgatgtaaaaaccgttacacaaacatcctaccatatgacttcagccgtgtgagattagtctccatgaatgaagaggaaggtgcagactacatcaatgccaactatattcctggatacaactcaccccaggagtatattgccacccaggggccactgcctgaaaccagaaatgacttctggaagatggtcctgcaacaaaagtctcagattattgtcatgctcactcagtgtaatgagaaaaggagggtgaaatgtgaccattactggccattcacggaagaacctatagcctatggagacatcactgtggagatgatttcagaggaagagcaggacgactgggcctgtagacacttccggatcaactatgctgacgagatgcaggatgtgatgcattttaactacactgcatggcctgatcatggtgtgcccacagcaaatgctgcagaaagtatcctgcagtttgtacacatggtccgacagcaagctaccaagagcaaaggtcccatgatcattcactgcagtgctggcgtgggacggacaggaacattcattgccctggacaggctcttgcagcacattcgggatcatgagtttgttgacatcttagggctggtgtcagaaatgaggtcataccggatgtctatggtacagacagaggagcagtacatttttatccatcagtgtgtgcaactgatgtggatgaagaagaagcagcagttctgcatcagtgatgtcatatacgagaatgttagcaagtcctagttcagaatccggagcagtaagtggagaagagctctccacgagtgctcagtcttagaactattagagggggatgtgatggatgggacaaaagacagcagtagccatttgtattgactctgacttcacatgagtatttcttcccagctcctggcctcacatgggtggtcacagggagaaacaagtactgtagcagatctttgagtttcaatgcaccttggttggtgttggcaacaaacaggagcttctgcacatcatgatgactttacctccattccctctacccagaaccctaaattattctgttattggatctgtgcctgtaatatcaggatactaccatccaaatctatctagatatcttgtgcaaatattttattgattacaagggctgtatacggggttacaaaaagacatgagctggattggacactcctaaaaccaaaaacaacagtgacaatagagtctcaggatagcagagtctgaaaataccttggtctcccccattatgtgagcccttacttgagagcttcatgaagacacttgtaacatattcaacgtcctgtactccagttttgactacgagatcagattttggaggtgtaagtaaacttggctgaggtaacagtaatctgcccatttagttcagtaaacagactgtagagtgtctgactatactgggggaagaggagccaatgacagggtagggagatgacagtggtgcatgatgggagaatcatgaaagtctgggaagcatatggaccagtgggaaggataggattagcactgcacctctacatccatcaagagagacagagcgcacaatggagcaggaaggataaaaaataaagaaagacagagagaaacaaatttgctgggagagggaaagacattcagacccacagaaaggaggcagcacacagagaaagatgcacagatcaacccacatctgcatgggttgtgagactgagcatagtgagagcagtggtggagcaatagaagattgctgtgacaccaggctgcttactgtctttctttgtctcattcacaggagaggacatgatgtgcgcccatcctcccttgcttccagattgttttagtgggccctgatggtcatttttctaaacagaggccctgctttgtaatatgtggccaaggagataatttatctcacagaagcaccgggaagacttagccttaaagagcctacagtgtccttttggactctttcacttcgggacatttaataatggaccaaattcaacagaacaccaggaaggtcaagacgctctccaaagggcaggaagtacagcacttccgaagagtttagttggccctttgctggttgggctgagttttttatttttaagtgtttgtttttcagtgcaataatttttgtgtgtgtgtgattcttatcagaaagttgaattgttttctgcctacaccgttcatcagccccataacccaggaaggaacaggcattgttagcatcagattatacctcattattaaaaggaggcatggccacacatgaagaaatggtcattctacttcaaagaaattgagccagcactatctgtactccaacattaccggatctggattggggaggttggtcagggaagagaggggttctacccacagatcaactgtgtaatcttttactattcaagctataattcagcttcaaagtagagtagaaaaaaaattgtcttaactgttctagttcttgatggttttcttccttattaacagttggtgtttcttccttggcccttttggactaatgttactgtccaagttctttctcaagaaaccacatctggttcagaagagtgtcaagttggactctttgaactctgttgctgtctgagcaatcgtggtgcctagactttgcattccttgttctgttgacctgcatacatgtgagagctatttctttaagaactatataggctgtgaaaacgcactttctttcccccaaagagctgggaatttatgaagttatggcaatgaactgcagcatgctgggacaattatttgactacttttttttgtaatattgtcaaatgtctctatggattctgacagagatttctttttgttttgttattcttttggttgtcagtttcattttaacgagtgtaactagtaacattttattctttggattttgtataattacagtacatgattgtgtattgtgacatgaatgctgtcaaaatgacattgatggcattgtgaagcctgttactttgtgtcacttcctgataaataagaggtgatgacatggatatacaacagaaaacactttgagttgaaagtaaacacaagctggctgcttccctgtggcaactgtgg

SEQ ID NO: 171894 - DNA, 3030 bp, Homo sapiens
  Payload ID: 13773
  Gene Symbol: PTPRO
  Gene Name: protein tyrosine phosphatase, receptor type, O
  Uniprot ID: Q16827
  ENST ID: ENST00000442921
  CDS Start-End: 487-1704
aagtaaaaaaatggaagggggaaaaggcaaagtattctgccttccaagttagatagctatctttatgaaaggacatatttcaaaggcaatataaagtctttatggtgctcttacctacctatatttgaattgggggatgcttcacctgcttattagtgaaagaagaaagaatacacttagtaaattaaattttttttaaaactttgtctttgctcagaaccagctccacccaaatcactcttcgcagtgaacaaaacccagacttcagtgactttgctgtgggtggaagagggagtagctgatttctttgaagttttctgtcaacaagttggctccagtcagaaaaccaaacttcaggaaccagttgctgtttcttcccatgtcgtgaccatctccagccttcttcctgccactgcctacaattgtagtgtcaccagctttagccatgacagccccagtgtccctacgttcatagccgtctcaacaatggttacagagatgaatcccaatgtggtagtgatctccgtgctggccatccttagcacacttttaattggactgttgcttgttaccctcattattcttaggaaaaagcatctgcagatggctagggagtgtggagctggtacatttgtcaattttgcatccttagagagggatggaaagcttccatacaactggcgtaggagtatatttgctttcttaaccctgctaccctcatgtctttggactgattatcttttggcattttatattaatccttggagtaaaaatggtttaaagaagaggaaactgacaaacccggttcaactggatgactttgatgcctatattaaggatatggccaaagactctgactataaattttctcttcagtttgaggagttgaaattgattggactggatatcccacactttgctgcagatcttccactgaatcgatgtaaaaaccgttacacaaacatcctaccatatgacttcagccgtgtgagattagtctccatgaatgaagaggaaggtgcagactacatcaatgccaactatattcctggatacaactcaccccaggagtatattgccacccaggggccactgcctgaaaccagaaatgacttctggaagatggtcctgcaacaaaagtctcagattattgtcatgctcactcagtgtaatgagaaaaggagggtgaaatgtgaccattactggccattcacggaagaacctatagcctatggagacatcactgtggagatgatttcagaggaagagcaggacgactgggcctgtagacacttccggatcaactatgctgacgagatgcaggatgtgatgcattttaactacactgcatggcctgatcatggtgtgcccacagcaaatgctgcagaaagtatcctgcagtttgtacacatggtccgacagcaagctaccaagagcaaaggtcccatgatcattcactgcagtgctggcgtgggacggacaggaacattcattgccctggacaggctcttgcagcacattcgggatcatgagtttgttgacatcttagggctggtgtcagaaatgaggtcataccggatgtctatggtacagacagaggagcagtacatttttatccatcagtgtgtgcaactgatgtggatgaagaagaagcagcagttctgcatcagtgatgtcatatacgagaatgttagcaagtcctagttcagaatccggagcagagaggacatgatgtgcgcccatcctcccttgcttccagattgttttagtgggccctgatggtcatttttctaaacagaggccctgctttgtaatatgtggccaaggagataatttatctcacagaagcaccgggaagacttagccttaaagagcctacagtgtccttttggactctttcacttcgggacatttaataatggaccaaattcaacagaacaccaggaaggtcaagacgctctccaaagggcaggaagtacagcacttccgaagagtttagttggccctttgctggttgggctgagttttttatttttaagtgtttgtttttcagtgcaataatttttgtgtgtgtgtgattcttatcagaaagttgaattgttttctgcctacaccgttcatcagccccataacccaggaaggaacaggcattgttagcatcagattatacctcattattaaaaggaggcatggccacacatgaagaaatggtcattctacttcaaagaaattgagccagcactatctgtactccaacattaccggatctggattggggaggttggtcagggaagagaggggttctacccacagatcaactgtgtaatcttttactattcaagctataattcagcttcaaagtagagtagaaaaaaaattgtcttaactgttctagttcttgatggttttcttccttattaacagttggtgtttcttccttggcccttttggactaatgttactgtccaagttctttctcaagaaaccacatctggttcagaagagtgtcaagttggactctttgaactctgttgctgtctgagcaatcgtggtgcctagactttgcattccttgttctgttgacctgcatacatgtgagagctatttctttaagaactatataggctgtgaaaacgcactttctttcccccaaagagctgggaatttatgaagttatggcaatgaactgcagcatgctgggacaattatttgactacttttttttgtaatattgtcaaatgtctctatggattctgacagagatttctttttgttttgttattcttttggttgtcagtttcattttaacgagtgtaactagtaacattttattctttggattttgtataattacagtacatgattgtgtattgtgacatgaatgctgtcaaaatgacattgatggcattgtgaagcctgttactttgtgtcacttcctgataaataagaggtgatgacatggatatacaacagaaaacactttgagttgaaagtaaacacaagctggctgcttccctgtggcaactgtgg

SEQ ID NO: 171895 - DNA, 2946 bp, Homo sapiens
  Payload ID: 13773
  Gene Symbol: PTPRO
  Gene Name: protein tyrosine phosphatase, receptor type, O
  Uniprot ID: Q16827
  ENST ID: ENST00000542557
  CDS Start-End: 487-1620
aagtaaaaaaatggaagggggaaaaggcaaagtattctgccttccaagttagatagctatctttatgaaaggacatatttcaaaggcaatataaagtctttatggtgctcttacctacctatatttgaattgggggatgcttcacctgcttattagtgaaagaagaaagaatacacttagtaaattaaattttttttaaaactttgtctttgctcagaaccagctccacccaaatcactcttcgcagtgaacaaaacccagacttcagtgactttgctgtgggtggaagagggagtagctgatttctttgaagttttctgtcaacaagttggctccagtcagaaaaccaaacttcaggaaccagttgctgtttcttcccatgtcgtgaccatctccagccttcttcctgccactgcctacaattgtagtgtcaccagctttagccatgacagccccagtgtccctacgttcatagccgtctcaacaatggttacagagatgaatcccaatgtggtagtgatctccgtgctggccatccttagcacacttttaattggactgttgcttgttaccctcattattcttaggaaaaagcatctgcagatggctagggagtgtggagctggtacatttgtcaattttgcatccttagagagggatggaaagcttccatacaactggagtaaaaatggtttaaagaagaggaaactgacaaacccggttcaactggatgactttgatgcctatattaaggatatggccaaagactctgactataaattttctcttcagtttgaggagttgaaattgattggactggatatcccacactttgctgcagatcttccactgaatcgatgtaaaaaccgttacacaaacatcctaccatatgacttcagccgtgtgagattagtctccatgaatgaagaggaaggtgcagactacatcaatgccaactatattcctggatacaactcaccccaggagtatattgccacccaggggccactgcctgaaaccagaaatgacttctggaagatggtcctgcaacaaaagtctcagattattgtcatgctcactcagtgtaatgagaaaaggagggtgaaatgtgaccattactggccattcacggaagaacctatagcctatggagacatcactgtggagatgatttcagaggaagagcaggacgactgggcctgtagacacttccggatcaactatgctgacgagatgcaggatgtgatgcattttaactacactgcatggcctgatcatggtgtgcccacagcaaatgctgcagaaagtatcctgcagtttgtacacatggtccgacagcaagctaccaagagcaaaggtcccatgatcattcactgcagtgctggcgtgggacggacaggaacattcattgccctggacaggctcttgcagcacattcgggatcatgagtttgttgacatcttagggctggtgtcagaaatgaggtcataccggatgtctatggtacagacagaggagcagtacatttttatccatcagtgtgtgcaactgatgtggatgaagaagaagcagcagttctgcatcagtgatgtcatatacgagaatgttagcaagtcctagttcagaatccggagcagagaggacatgatgtgcgcccatcctcccttgcttccagattgttttagtgggccctgatggtcatttttctaaacagaggccctgctttgtaatatgtggccaaggagataatttatctcacagaagcaccgggaagacttagccttaaagagcctacagtgtccttttggactctttcacttcgggacatttaataatggaccaaattcaacagaacaccaggaaggtcaagacgctctccaaagggcaggaagtacagcacttccgaagagtttagttggccctttgctggttgggctgagttttttatttttaagtgtttgtttttcagtgcaataatttttgtgtgtgtgtgattcttatcagaaagttgaattgttttctgcctacaccgttcatcagccccataacccaggaaggaacaggcattgttagcatcagattatacctcattattaaaaggaggcatggccacacatgaagaaatggtcattctacttcaaagaaattgagccagcactatctgtactccaacattaccggatctggattggggaggttggtcagggaagagaggggttctacccacagatcaactgtgtaatcttttactattcaagctataattcagcttcaaagtagagtagaaaaaaaattgtcttaactgttctagttcttgatggttttcttccttattaacagttggtgtttcttccttggcccttttggactaatgttactgtccaagttctttctcaagaaaccacatctggttcagaagagtgtcaagttggactctttgaactctgttgctgtctgagcaatcgtggtgcctagactttgcattccttgttctgttgacctgcatacatgtgagagctatttctttaagaactatataggctgtgaaaacgcactttctttcccccaaagagctgggaatttatgaagttatggcaatgaactgcagcatgctgggacaattatttgactacttttttttgtaatattgtcaaatgtctctatggattctgacagagatttctttttgttttgttattcttttggttgtcagtttcattttaacgagtgtaactagtaacattttattctttggattttgtataattacagtacatgattgtgtattgtgacatgaatgctgtcaaaatgacattgatggcattgtgaagcctgttactttgtgtcacttcctgataaataagaggtgatgacatggatatacaacagaaaacactttgagttgaaagtaaacacaagctggctgcttccctgtggcaactgtgg

SEQ ID NO: 171896 - DNA, 3978 bp, Homo sapiens
  Payload ID: 13773
  Gene Symbol: PTPRO
  Gene Name: protein tyrosine phosphatase, receptor type, O
  Uniprot ID: Q16827
  ENST ID: ENST00000544244
  CDS Start-End: 487-1620
aagtaaaaaaatggaagggggaaaaggcaaagtattctgccttccaagttagatagctatctttatgaaaggacatatttcaaaggcaatataaagtctttatggtgctcttacctacctatatttgaattgggggatgcttcacctgcttattagtgaaagaagaaagaatacacttagtaaattaaattttttttaaaactttgtctttgctcagaaccagctccacccaaatcactcttcgcagtgaacaaaacccagacttcagtgactttgctgtgggtggaagagggagtagctgatttctttgaagttttctgtcaacaagttggctccagtcagaaaaccaaacttcaggaaccagttgctgtttcttcccatgtcgtgaccatctccagccttcttcctgccactgcctacaattgtagtgtcaccagctttagccatgacagccccagtgtccctacgttcatagccgtctcaacaatggttacagagatgaatcccaatgtggtagtgatctccgtgctggccatccttagcacacttttaattggactgttgcttgttaccctcattattcttaggaaaaagcatctgcagatggctagggagtgtggagctggtacatttgtcaattttgcatccttagagagggatggaaagcttccatacaactggagtaaaaatggtttaaagaagaggaaactgacaaacccggttcaactggatgactttgatgcctatattaaggatatggccaaagactctgactataaattttctcttcagtttgaggagttgaaattgattggactggatatcccacactttgctgcagatcttccactgaatcgatgtaaaaaccgttacacaaacatcctaccatatgacttcagccgtgtgagattagtctccatgaatgaagaggaaggtgcagactacatcaatgccaactatattcctggatacaactcaccccaggagtatattgccacccaggggccactgcctgaaaccagaaatgacttctggaagatggtcctgcaacaaaagtctcagattattgtcatgctcactcagtgtaatgagaaaaggagggtgaaatgtgaccattactggccattcacggaagaacctatagcctatggagacatcactgtggagatgatttcagaggaagagcaggacgactgggcctgtagacacttccggatcaactatgctgacgagatgcaggatgtgatgcattttaactacactgcatggcctgatcatggtgtgcccacagcaaatgctgcagaaagtatcctgcagtttgtacacatggtccgacagcaagctaccaagagcaaaggtcccatgatcattcactgcagtgctggcgtgggacggacaggaacattcattgccctggacaggctcttgcagcacattcgggatcatgagtttgttgacatcttagggctggtgtcagaaatgaggtcataccggatgtctatggtacagacagaggagcagtacatttttatccatcagtgtgtgcaactgatgtggatgaagaagaagcagcagttctgcatcagtgatgtcatatacgagaatgttagcaagtcctagttcagaatccggagcagtaagtggagaagagctctccacgagtgctcagtcttagaactattagagggggatgtgatggatgggacaaaagacagcagtagccatttgtattgactctgacttcacatgagtatttcttcccagctcctggcctcacatgggtggtcacagggagaaacaagtactgtagcagatctttgagtttcaatgcaccttggttggtgttggcaacaaacaggagcttctgcacatcatgatgactttacctccattccctctacccagaaccctaaattattctgttattggatctgtgcctgtaatatcaggatactaccatccaaatctatctagatatcttgtgcaaatattttattgattacaagggctgtatacggggttacaaaaagacatgagctggattggacactcctaaaaccaaaaacaacagtgacaatagagtctcaggatagcagagtctgaaaataccttggtctcccccattatgtgagcccttacttgagagcttcatgaagacacttgtaacatattcaacgtcctgtactccagttttgactacgagatcagattttggaggtgtaagtaaacttggctgaggtaacagtaatctgcccatttagttcagtaaacagactgtagagtgtctgactatactgggggaagaggagccaatgacagggtagggagatgacagtggtgcatgatgggagaatcatgaaagtctgggaagcatatggaccagtgggaaggataggattagcactgcacctctacatccatcaagagagacagagcgcacaatggagcaggaaggataaaaaataaagaaagacagagagaaacaaatttgctgggagagggaaagacattcagacccacagaaaggaggcagcacacagagaaagatgcacagatcaacccacatctgcatgggttgtgagactgagcatagtgagagcagtggtggagcaatagaagattgctgtgacaccaggctgcttactgtctttctttgtctcattcacaggagaggacatgatgtgcgcccatcctcccttgcttccagattgttttagtgggccctgatggtcatttttctaaacagaggccctgctttgtaatatgtggccaaggagataatttatctcacagaagcaccgggaagacttagccttaaagagcctacagtgtccttttggactctttcacttcgggacatttaataatggaccaaattcaacagaacaccaggaaggtcaagacgctctccaaagggcaggaagtacagcacttccgaagagtttagttggccctttgctggttgggctgagttttttatttttaagtgtttgtttttcagtgcaataatttttgtgtgtgtgtgattcttatcagaaagttgaattgttttctgcctacaccgttcatcagccccataacccaggaaggaacaggcattgttagcatcagattatacctcattattaaaaggaggcatggccacacatgaagaaatggtcattctacttcaaagaaattgagccagcactatctgtactccaacattaccggatctggattggggaggttggtcagggaagagaggggttctacccacagatcaactgtgtaatcttttactattcaagctataattcagcttcaaagtagagtagaaaaaaaattgtcttaactgttctagttcttgatggttttcttccttattaacagttggtgtttcttccttggcccttttggactaatgttactgtccaagttctttctcaagaaaccacatctggttcagaagagtgtcaagttggactctttgaactctgttgctgtctgagcaatcgtggtgcctagactttgcattccttgttctgttgacctgcatacatgtgagagctatttctttaagaactatataggctgtgaaaacgcactttctttcccccaaagagctgggaatttatgaagttatggcaatgaactgcagcatgctgggacaattatttgactacttttttttgtaatattgtcaaatgtctctatggattctgacagagatttctttttgttttgttattcttttggttgtcagtttcattttaacgagtgtaactagtaacattttattctttggattttgtataattacagtacatgattgtgtattgtgacatgaatgctgtcaaaatgacattgatggcattgtgaagcctgttactttgtgtcacttcctgataaataagaggtgatgacatggatatacaacagaaaacactttgagttgaaagtaaacacaagctggctgcttccctgtggcaactgtgg

SEQ ID NO: 171897 - DNA, 2070 bp, Homo sapiens
  Payload ID: 13773
  Gene Symbol: PTPRO
  Gene Name: protein tyrosine phosphatase, receptor type, O
  Uniprot ID: Q16827
  ENST ID: ENST00000543886
  CDS Start-End: 185-1978
ggaggaccccgggcgcagaggaggaaagggagcaggcgcagggggactggaaaggcagcatgcgctcgccaggagcaacctcggcgcccagggtctgaggctgcagccccagttcgccattgtgagccgccgccgggggagtccgctagcgcagccgtgcccccgagtccccgtccgcgcagcgatggggcacctgcccacggggatacacggcgcccgccgcctcctgcctctgctctggctctttgtgctgttcaagaatgctacagctttccatgtaactgtccaagatgataataacatcgttgtctcattagaagcttcagacgtcatcagtccagcatctgtgtatgttgtgaagataactggtgaatccaaaaattatttcttcgaatttgaggaattcaacagcactttgcctcctcctgttattttcaaggccagttatcatggcctttattatataatcactctggtagtggtaaatggaaatgtggtgaccaagccatccagatcaatcactgtgttaacaaaacctctacctgtaaccagtgtttccatatatgactataaaccttctcctgaaacaggagtcctgtttgaaatacattatccagaaaaatataacgttttcacaagagtgaacattagctactgggaaggtaaagacttccggacaatgctatataaagatttctttaagggaaaaacagtatttaatcactggctgccaggaatgtgttatagtaatatcacctttcagctggtatctgaggcaacttttaataaaagtacccttgttgagtacagtggtgtcagtcacgaacccaaacagcacagaactgccccttatccacctcaaaatatttccgttcgtatcgtaaacttgaacaaaaacaactgggaagaacagagtggcaatttcccagaagaatccttcatgagatcacaagatacaataggaaaagaaaaactcttccattttacagaagaaacccctgaaattccctcgggcaacatttcttccggttggcctgattttaatagcagtgactatgaaactacgtctcagccatattggtgggacagtgcatctgcagctcctgaaagtgaagatgaatttgtcagcgtacttcccatggaatacgaaaataacagtacactcagtgagacagagaagtcaacatcaggctctttctcctttttccctgtgcaaatgatattgacctggttaccacccaaaccacccactgcttttgatgggttccatatccatattgaacgagaagagaactttactgaatatttgatggtggatgaagaagcacatgaatttgttgcagaactgaaggaacctgggaaatataagttatctgtgacaacctttagttcctcaggatcttgtgaaactcgaaaaagtcagtcagcaaaatcactcagcttttatatcagtccttcaggagagtggattgaagaactgaccgagaagccgcagcacgtgagtgtccacgttttaagctcaaccactgccttgatgtcctggacatcttcccaagagaactacaacagcaccattgtgtctgtggtgtcgctgacctgccagaaacaaaaggagagccagaggcttgaaaagcagtactgcactcaggtgaactcaagcaaacctattattgaaaatctggttcctggtgcccagtaccaggttgtaatatacctaaggaaaggccctttgattggaccaccttcagatcctgtgacatttgctattgttcccacaggaataaaggatttaatgctctatcctttgggtcctacggccgtggttctgagctggaccagaccttatttaggcgtgttcagaaaatacgtggttgaaatgttttatttcaaccctgctacaatgacatcagagtggaccacctactatgaaatagcagcaactgtttccttaactgcatccgtggtaatcttcccttaaccaactgtcagtctttcctatgggaacaggcaaacctttatgtaccaaatgtgtctttaagaaattatctataaatttgattattttgtaaa

SEQ ID NO: 171898 - DNA, 533 bp, Homo sapiens
  Payload ID: 13773
  Gene Symbol: PTPRO
  Gene Name: protein tyrosine phosphatase, receptor type, O
  ENST ID: ENST00000535311
  CDS Start-End: 1-265
agtgactttgctgtgggtggaagagggagtagctgatttctttgaagttttctgtcaacaagttggctccagtcagaaaaccaaacttcaggaaccagttgctgtttcttcccatgtcgtgaccatctccagccttcttcctgccactgcctacaattgtagtgtcaccagctttagccatgacagccccagtgtccctacgttcatagccgtctcaacaatggggagtgtggagctggtacatttgtcaattttgcatccttagagagggatggaaagcttccatacaactggagtaaaaatggtttaaagaagaggaaactgacaaacccggttcaactggatgactttgatgcctatattaaggatatggccaaagactctgactataaattttctcttcagtttgaggagttgaaattgattggactggatatcccacactttgctgcagatcttccactgaatcgatgtaaaaaccgttacacaaacatcctaccatatgacttcagccgtgtgagattagtctccat

SEQ ID NO: 171899 - DNA, 472 bp, Homo sapiens
  Payload ID: 13773
  Gene Symbol: PTPRO
  Gene Name: protein tyrosine phosphatase, receptor type, O
  ENST ID: ENST00000535322
  CDS Start-End: 1-351
tggaagatggtcctgcaacaaaagtctcagattattgtcatgctcactcagtgtaatgagaaaaggagggtgaaatgtgaccattactggccattcacggaagaacctatagcctatggagacatcactgtggagatgatttcagaggaagagcaggacgactgggcctgtagacacttccggatcaactatgctgacgagatgcaggatgtgatgcattttaactacactgcatggcctgatcatggtgtgcccacagcaaatgctgcagaaagtatcctgcagtttgtacacatggtccgacagcaagctaccaagagcaaaggtcccatgatcattcactgcaggtaacctcatcaactgcattttctattaaatattaggagttggttttgtaaggggaacagctcaccattccataagcccttatcaggtttagttgaaaattaaataaactctgatgttttttaaa

SEQ ID NO: 171900 - DNA, 2336 bp, Homo sapiens
  Payload ID: 13774
  Gene Symbol: PTPRQ
  Gene Name: protein tyrosine phosphatase, receptor type, Q
  ENST ID: ENST00000551042
  CDS Start-End: 1341-2336
ttttgtattttcgtatctcaggtcaaacaatcaaataataatatggactggtcttaatgatatgaagaaagaaggtcttcttacatgggcagatggatcatcttttggccttaagaaaaatgaaatattttctttttcattgctatccaagaatgaaacacattgctacattttacagcaaaatgcaactggatcaaactatttctttacaagatttttctgttacgttccattgccatatgtttgcgaatatgaattaccttctctgcaggaaagctttttgctttacataaaggatgttggaacaactgaagttgtattatttggaataatttgaatttttggaataatttgaataagtgggtgaaattgggatataagattatcattaaatattctttagattatacagaagaacaatattttgaaagcatgcccccaaatactacagaaaaagcaattacccaactgtttcctggtcatatttatagatttttactcttcgcaataaatgaatgggaggcaaaaactactttaagtccaatattcactgtagaaacacgccctttgtcagcccaaaatttcagagttacacatgttaccataacagaagtatttttacactgggatcctccagatcctgtattttttcatcattaccttatcactattttggatgttgaaaacaatacatcagaagaggtgcttgttgaaaaacgcaacacagcaaccatagttggagacctcaagtcttttcatcattatctggtatatctattcagtgtagcagaaagaggaactttaagttgcttggagaaaccactttcagtcattacagaacccaaaccagtctggattgttatcccctatgaaagtcatagtacctctgtaatcttatttgttcaaatgcccaatgttgaagtgtttgatggactacatattgtaattgaaggaggggcaaatgtgaccatggctttacaccatggtctggaagcaccactgaatatccatgaaggcaaagttacagattcttctatagacattctctggaatcgagttgatgggaatttccagcattatgaaatcacatgcataaactatgctgctgctttcatggttcagaaggtagttcaagaaacagcaatattctctaacctggatcctgccacagtgtacaccttttctattcgggctgaaaaagaaggttttaaagacattactgctaacataaaagaaatacagacaggttaccgcctatgtaggcaccttaggagtttctttcatgttcagatatttccttggtcctttaagggaagattaccccaagtgcagctgaatttatgaaacatagcagagacccaaatgcagtaactgttagctggccttcagctagaagtcttctggatggatatattatttcaatatccagtgaaagcttaatgagagaagaaattctgccctccactaaaaggacattcacatttaatagcctttctccagggactgactttttaattagtattatgactaacaagggactgaaaagaagccatcctactgtcctcatggttagcacttatccagatccatcagatttgctaatctgggggcaagaagaaaacacgatatgtttgtcttggaaactatcagaaggagggtttgaaaagtttcagatatcatactgcatgccatccagacaggaaaagctgattaaagtgattgtttatggcaacaaagccaaagtaaaaaaattgactctgggcatggactacatgtttcaagtgaagaaagttaaaggcaaaggttacagtgtatctgtaatgaaaaaagtgcctataaaaccagaacaacctgagaaacttagagccttcaatatttccacacattccttttctctgcactggagcctaccctctggtcatgtggaaaggtatcaagtggatcttgttcctgacagtggctttgttactatcagagatcttggaggtggagaatatcaggttgatgtttccaatgtcgttcctggtactaggtacgatataaccatctcttcaatttctacaacatacacctcacctgttactagaatagtgacaacaaatgtaacaaaaccagggcctccagtcttcctagccggggaaagagtcggatctgctgggattcttctgtcttggaatacaccacctaatccaaatggaaggattatatcttacattgtcaaatataaggaagtttgtccgtggatgcaaacagtatatacacaagtcagatcaaagccagacagtctggaagttcttcttactaatcttaatcctggaacaacatatgaaattaag

SEQ ID NO: 171901 - DNA, 1700 bp, Homo sapiens
  Payload ID: 13774
  Gene Symbol: PTPRQ
  Gene Name: protein tyrosine phosphatase, receptor type, Q
  ENST ID: ENST00000547376
  CDS Start-End: 640-1700
aacccaaaccagtctggattgttatcccctatgaaagtcatagtacctctgtaatcttatttgttcaaatgcccaatgttgaagtgtttgatggactacatattgtaattgaaggaggggcaaatgtgaccatggctttacaccatggtctggaagcaccactgaatatccatgaaggcaaagttacagattcttctatagacattctctggaatcgagttgatgggaatttccagcattatgaaatcacatgcataaactatgctgctgctttcatggttcagaaggtagttcaagaaacagcaatattctctaacctggatcctgccacagtgtacaccttttctattcgggctgaaaaagaaggttttaaagacattactgctaacataaaagaaatacagacaggttaccgcctatgtaggcaccttaggagtttctttcatgttcagatatttccttggtcctttaagggaagattagaaagaagggaggcatttcatattcagattgcaattaactttcctgctaattagacttggcactccttggtatttaattaggatgagtcctaaaaataattaaatatttctgaagtcagtggttacacaagactaagccccaagtgcagctgaatttatgaaacatagcagagacccaaatgcagtaactgttagctggccttcagctagaagtcttctggatggatatattatttcaatatccagtgaaagcttaatgagagaagaaattctgccctccactaaaaggacattcacatttaatagcctttctccagggactgactttttaattagtattatgactaacaagggactgaaaagaagccatcctactgtcctcatggttagcacttatccagatccatcagatttgctaatctgggggcaagaagaaaacacgatatgtttgtcttggaaactatcagaaggagggtttgaaaagtttcagatatcatactgcatgccatccagacaggaaaagctgattaaagtgattgtttatggcaacaaagccaaagtaaaaaaattgactctgggcatggactacatgtttcaagtgaagaaagttaaaggcaaaggttacagtgtatctgtaatgaaaaaagtgcctataaaaccatctaggatttgtggcttaattttgaaagctgtgaatatttcttcaaatttaatgtggaatacaacagagatcaatttcacccattataagatttatatatcaaatagaacatttgcaaaagactgtcttatttgggaagtggtgactgagcacacagttacagatgtgactcctggtgtaatatataacatcatggtacacagaataagaggcaaccttggaggatgtggcatgtttaccagggttgttgcagaaccagaacaacctgagaaacttagagccttcaatatttccacacattccttttctctgcactggagcctaccctctggtcatgtggaaaggtatcaagtggatcttgttcctgacagtggctttgttactatcagagatcttggaggtggagaatatcaggttgatgtttccaatgtcgttcctggtactaggtacgatataaccatctcttcaatttctacaacatacacctcacctgttactagaatagtgacaacaaatgtaacaaaaccagggcctccagtcttcctagccggggaaag

SEQ ID NO: 171902 - DNA, 1097 bp, Homo sapiens
  Payload ID: 13774
  Gene Symbol: PTPRQ
  Gene Name: protein tyrosine phosphatase, receptor type, Q
  ENST ID: ENST00000551573
  CDS Start-End: 247-1097
caaaccagtctggattgttatcccctatgaaagtcatagtacctctgtaatcttatttgttcaaatgcccaatgttgaagtgtttgatggactacatattgtaattgaaggaggggcaaatgtgaccatggctttacaccatggtctggaagcaccactgaatatccatgaaggcaaagttacagattcttctatagacattctctggaatcgagttgatgggaatttccagcattatgaaatcacatgcataaactatgctgctgctttcatgccccaagtgcagctgaatttatgaaacatagcagagacccaaatgcagtaactgttagctggccttcagctagaagtcttctggatggatatattatttcaatatccagtgaaagcttaatgagagaagaaattctgccctccactaaaaggacattcacatttaatagcctttctccagggactgactttttaattagtattatgactaacaagggactgaaaagaagccatcctactgtcctcatggttagcacttatccagatccatcagatttgctaatctgggggcaagaagaaaacacgatatgtttgtcttggaaactatcagaaggagggtttgaaaagtttcagatatcatactgcatgccatccagacaggaaaagctgattaaagtgattgtttatggcaacaaagccaaagtaaaaaaattgactctgggcatggactacatgtttcaagtgaagaaagttaaaggcaaaggttacagtgtatctgtaatgaaaaaagtgcctataaaaccagaacaacctgagaaacttagagccttcaatatttccacacattccttttctctgcactggagcctaccctctggtcatgtggaaaggtatcaagtggatcttgttcctgacagtggctttgttactatcagagatcttggaggtggagaatatcaggttgatgtttccaatgtcgttcctggtactaggtacgatataaccatctcttcaatttctacaacatacacctcacctgttactagaatagtgacaacaaatgtaacaaaaccagggcctccagtcttcctagccggggaaag

SEQ ID NO: 171903 - DNA, 439 bp, Homo sapiens
  Payload ID: 13774
  Gene Symbol: PTPRQ
  Gene Name: protein tyrosine phosphatase, receptor type, Q
  ENST ID: ENST00000547881
  CDS Start-End: 1-439
tcattctttccgtcactttgtgtatcctttcaataattctccttggaacagctatttttgcatttgcaagaattcgacagaagcagaaagaaggtggcacatactctcctcaggatgcagaaattattgacactaaattgaagctggatcagctcatcacagtggcagacctggaactgaaggacgagagattaacgcggccaataagcaagaaatccttcctgcaacatgttgaagagctttgcacaaacaacaacctaaagtttcaagaagaattttcggaattaccaaaatttcttcaggatctttcttcaactgatgctgatctgccttggaatagagcaaaaaaccgcttcccaaacataaaaccatataataataacagagtaaagctgatagctgacgctagtgttccaggttcggattatattaatgccag

SEQ ID NO: 171904 - DNA, 8289 bp, Homo sapiens
  Payload ID: 13774
  Gene Symbol: PTPRQ
  Gene Name: protein tyrosine phosphatase, receptor type, Q
  ENST ID: ENST00000614701
  CDS Start-End: 179-7078
acagccagtcatccaagggttcatgaatagtttaacaaagaaaaggcagagctattgagtaatatgggctcattaattgtgtacttgccagaaggatctgtctttaaatcattaatgcaggcaacatttctctctagagccatcaatgtgattctactggctgaaaaatgtaataaagatggattttcttatcatttttcttttactttttattgggacttcagagacacaggttgatgtttccaatgtcgttcctggtactaggtacgatataaccatctcttcaatttctacaacatacacctcacctgttactagaatagtgacaacaaatgtaacaaaaccagggcctccagtcttcctagccggggaaagagtcggatctgctgggattcttctgtcttggaatacaccacctaatccaaatggaaggattatatcttacattgtcaaatataaggaagtttgtccgtggatgcaaacagtatatacacaagtcagatcaaagccagacagtctggaagttcttcttactaatcttaatcctggaacaacatatgaaattaaggttgctgctgaaaacagtgctggcattggagtgtttagtgatccatttctcttccaaactgcagaaagtgctccaggaaaagtggtgaatctcacagttgaggcctacaacgcttcagcagttaagctgatttggtatttacctcggcaaccaaatggcaaaattaccagcttcaagattagtgtcaagcatgccagaagtgggatagtagtgaaagatgtctcaatcagagtagaggacattttgactgggaaattgccagaatgcaatgagaatagtgaatcttttttatggagtacagccagcccttctccaacccttggtagagttacacctccatcgcgtaccacacattcatcaagcacgttgacacagaatgagatcagctctgtgtggaaagagcctatcagttttgtagtgacacacttgagaccttatacaacatatctttttgaagtttcagctgctacaactgaagcaggttatattgatagtacgattgtcagaacaccagaatcagtgcctgaaggaccaccacaaaactgcgtaacaggcaacatcacaggaaagtccttttcaattttatgggacccaccaactatagtaacagggaaatttagttatagagttgaattatatggaccatcaggtcgcattttggataacagcacaaaagacctcaagtttgcattcactaacctaacaccatttacaatgtatgatgtctatattgcggctgaaaccagtgcagggactgggcccaagtcaaatatttcagtattcactccaccagatgttccaggggcagtgtttgatttacaacttgcagaggtagaatccacgcaagtaagaattacttggaagaaaccacgacaaccaaatggaattattaaccaataccgagtgaaagtgctagttccagagacaggaataattttggaaaatactttgctcactggaaataatgagtatataaatgaccccatggctccagaaattgtgaacatagtagagccaatggtaggattatatgagggttcagcagagatgtcgtctgaccttcactcacttgctacatttatatataacagccatccagataaaaactttcctgcaaggaatagagctgaagaccagacttcaccagttgtaactacaaggaatcagtatattactgacattgcagctgaacagctgtcttatgttatcaggagacttgtacctttcactgagcacatgattagtgtatctgctttcaccatcatgggagaaggaccaccaacagttctcagtgttaggacacgtcagcaagtgccaagctccattaaaattataaactataaaaatattagttcttcatctattttgttatattgggatcctccagaatatcccaatggaaaaataactcactatacgatttatgcaatggaattggatacaaacagagcattccagataactaccatagataacagctttctcataacagggttaaagaaatacacaaaatacaaaatgagagtggcagcctcaacccacgttggagaaagttctttgtctgaagaaaatgacatctttgtgagaacttcagaagatgaaccggaatcatcacctcaagatgtcgaagtaattgatgttaccgcagatgaaataaggttgaagtggtcaccacccgaaaagcccaatgggatcattattgcttatgaagtgctatataaaaatatagatactttatatatgaagaacacatcaacaacagacataatattaaggaacttaagacctcacaccctctataacatttctgtaaggtcttacaccagatttggtcatggcaatcaggtatcttctttactctctgtaaggacttcggagactgtgcctgatagtgcaccagaaaatatcacttacaaaaatatttcttctggagagattgagctatcattccttcccccaagtagtcccaatggaatcatacaaaaatatacaatttatctcaagagaagtaatggaaatgaggaaagaactataaatacaacctctttaacccaaaacattaaagtactgaagaaatatacccaatatatcattgaggtgtctgctagtacactcaaaggtgaaggagttcggagtgctcccataagtatactgacggaggaagatgctcctgattctccccctcaagacttctctgtaaaacagttgtctggtgtcacggtgaagttgtcatggcaaccacccctggagccaaatggaattatcctttattacacagtttatgtctggaatagatcatcattaaaaactattaatgtcactgaaacatcattggagttatcagatttggattataatgttgaatacagtgcttatgtaacagctagcaccagatttggtgatgggaaaacaagaagcaatatcattagctttcaaacaccagagggagcaccaagcgatcctcccaaagatgtttattatgcaaacctcagttcttcatcaataattcttttctggacacctccttcaaaacctaatgggattatacaatattactctgtttattacagaaatacttcaggtacttttatgcagaattttacactccatgaagtaaccaatgactttgacaatatgactgtatccacaattatagataaactgacaatattcagctactatacattttggttaacagcaagtacttcagttggaaatgggaataaaagcagtgacatcattgaagtatacacagatcaagacatacctgaagggtttgttggaaacctgacttacgaatccatttcgtcaactgcaataaatgtaagctgggtcccaccggctcaaccaaacggtctagtcttctactatgtttcactgatcttacagcagactcctcgccatgtgagaccacctcttgttacatatgagagaagcatatattttgataatctggaaaaatacactgattatatattaaaaattactccatcaacagaaaagggattctctgatacctatactgcccagctatacatcaagactgaagaagatgtcccagaaacttcaccaataatcaacacttttaaaaacctttcctctacctcagttctcttatcatgggatcccccagtaaagccaaatggtgcaataataagttatgatttaactttacaaggaccaaatgaaaattattctttcattacttctgataattacataatattggaagagctttcaccatttacattatatagcttttttgctgccgcaagaactagaaaaggacttggtccttccagtattcttttcttttacacagatgagtcagtgccgttagcacctccacaaaatttgactttaatcaactgtacttcagactttgtatggctgaaatggagcccaagtcctcttccaggtggtattgttaaagtatatagttttaaaattcatgaacatgaaactgacactatatattataagaatatatcaggatttaaaactgaagccaaacttgttggactggaaccagtcagcacctactctatccgtgtatctgcgttcaccaaagttggaaatggcaatcaatttagtaatgtagtaaaattcacaacccaagaatcagttccagatgtcgtgcagaatatgcagtgcatggcaactagctggcagtcagttttagtgaaatgggatccacccaaaaaggcaaatggaataataacgcagtatatggtaacagttgaaaggaattctacaaaagtttctccccaagatcacatgtacactttcataaagcttcttgccaatacctcatatgtctttaaagtaagagcttcaacctcagctggtgaaggtgatgaaagcacatgccatgtcagcacactacctgaaacagttcccagtgttcccacaaatattgctttttctgatgttcagtcaactagtgcaacattgacatggataagacctgacactatccttggctactttcaaaattacaaaattaccactcaacttcgtgctcaaaaatgcaaagaatgggaatccgaagaatgtgttgaatatcaaaaaattcaatacctctatgaagctcacttaactgaagagacagtatatggattaaagaaatttagatggtatagattccaagtggctgccagcaccaatgctggctatggcaatgcttcaaactggatttctacaaaaactctgcctggccctccagatggtcctcctgaaaatgttcatgtagtagcaacatcaccttttagcatcagcataagctggagtgaacctgctgtcattactggaccaacatgttatctgattgatgtcaaatcggtagataatgatgaatttaatatatccttcatcaagtcaaatgaagaaaataaaaccatagaaattaaagatttagaaatattcacaaggtattctgtagtgatcactgcatttactgggaacattagtgctgcatatgtagaagggaagtcaagtgctgaaatgattgttactactttagaatcagccccaaaggacccacctaacaacatgacatttcagaagataccagatgaagttacaaaatttcaattaacgttccttcctccttctcaacctaatggaaatatccaagtatatcaagctctggtttaccgagaagatgatcctactgctgtccagattcacaacctcagtattatacagaaaaccaacacattcgtcattgcaatgctagaaggactaaaaggtggacatacatacaatatcagtgtttacgcagtcaatagtgctggtgcaggtccaaaggttccgatgagaataaccatggatatcaaagctccagcacgaccaaaaaccaaaccaacccctatttatgatgccacaggaaaactgcttgtgacttcaacaacaattacaatcagaatgccaatatgttactacagtgatgatcatggaccaataaaaaatgtacaagtgcttgtgacagaaacaggagctcagcatgatggaaatgtaacaaagtggtatgatgcatattttaataaagcaaggccatattttacaaatgaaggctttcctaaccctccatgtacagaaggaaagacaaagtttagtggcaatgaagaaatctacatcataggtgctgataatgcatgcatgattcctggcaatgaagacaaaatttgcaatggaccactgaaaccaaaaaagcaatacttatttaaatttagagctacaaatattatgggacaatttactgactctgattattctgaccctgttaagactttaggggaaggactttcagaaagaaccgtagagatcattctttccgtcactttgtgtatcctttcaataattctccttggaacagctatttttgcatttgcaagaattcgacagaagcagaaagaaggtggcacatactctcctcaggatgcagaaattattgacactaaattgaagctggatcagctcatcacagtggcagacctggaactgaaggacgagagattaacgcggttacttagttatagaaaatccatcaagccaataagcaagaaatccttcctgcaacatgttgaagagctttgcacaaacaacaacctaaagtttcaagaagaattttcggaattaccaaaatttcttcaggatctttcttcaactgatgctgatctgccttggaatagagcaaaaaaccgcttcccaaacataaaaccatataataataacagagtaaagctgatagctgacgctagtgttccaggttcggattatattaatgccagctatatttctggttatttatgtccaaatgaatttattgctactcaaggtccactaccaggaacagttggagatttttggagaatggtgtgggaaaccagagcaaaaacattagtaatgctaacacagtgttttgaaaaaggacggatcagatgccatcagtattggccagaggacaacaagccagttactgtctttggagatatagtgattacaaagctaatggaggatgttcaaatagattggactatcagggatctgaaaattgaaaggcatggggattgcatgactgttcgacagtgtaactttactgcctggccagagcatggggttcctgagaacagcgcccctctaattcactttgtgaagttggttcgagcaagcagggcacatgacaccacacctatgattgttcactgcagtgctggagttggaagaactggagtttttattgctctggaccatttaacacaacatataaatgaccatgattttgtggatatatatggactagtagctgaactgagaagtgaaagaatgtgcatggtgcagaatctggcacagtatatctttttacaccagtgcattctggatctcttatcaaataagggaagtaatcagcccatctgttttgttaactattcagcacttcagaagatggactctttggacgccatggaaggtgatgttgagcttgaatgggaagaaaccactatgtaaatattcagaccaaaggatacaattggaagagatttttaaatcccaggggccaaagttaccccctcattcttccgaattgaaatgtgcaaccttaaagaaatatctatgcttctctcactgtgcctttccaaacggattgaacattttaagactagttcttgaaaatagctaatacagaataattatttgttttgtacagaataaatattatgcattttaaatgcttaagaaaagacatcccatatgtttttgaagtcctccatattttggaataagccaaatagaaaattattattatattagcattaatgtttcaatgtgaattttccctatgtattggatttaattttgagcaaaagttgtaaatgttgattcagtagtgttgttttggcttacagggtattgatgtttcttgtggataatttccaggactgtcataatgatctgtacttccatgtacacccctgtgttttgaatcctctgttttatgagtgctgagatatcatctcatgatcccgaacagctgaacagtaaccccctgacactgcagggattacttggcctttatacaacacacagtagctcttcagggacacttagggctatttaatttgcattgtgatcttcagtttgagaaccttaaaagaaaaattaaaagtgcaattgcacacatgaaattacagagtaccattctagcaaacctacatttgtaaactttaaaacacaagttttaccccctgtattgtatattcaaatatatagtaaatgtatcagagtatttgcccattagatatagtcaacctaatattaacaattctgaagagtttcttcagcaaaaatgtatcaaaagagtaataaaaacactgtgcgtgtttcaagcttgtaaaccaatgatgtgctgctgtggtgccaacagagacttccaaatggattatgttaaatggccgtcatttcatttcccaaggttgattttgagcagtatacttggtggaactgaaaacaaagaaattaaccatgtatagcaaattcaaggtttctttatagaaaatctttcagcctccatcttattaaatagtgacaatgtggtaagttttgaattacatgaactcattttgtcatagatttcaattaagagtaataaatagtattaattattctcttctatgataagaagtatatcttatgcttatttccgctggaacatatatata

SEQ ID NO: 171905 - DNA, 8165 bp, Homo sapiens
  Payload ID: 13774
  Gene Symbol: PTPRQ
  Gene Name: protein tyrosine phosphatase, receptor type, Q
  ENST ID: ENST00000616559
  CDS Start-End: 1-6999
atgaaaaaagtgcctataaaaccagaacaacctgagaaacttagagccttcaatatttccacacattccttttctctgcactggagcctaccctctggtcatgtggaaaggtatcaagtggatcttgttcctgacagtggctttgttactatcagagatcttggaggtggagaatatcaggttgatgtttccaatgtcgttcctggtactaggtacgatataaccatctcttcaatttctacaacatacacctcacctgttactagaatagtgacaacaaatgtaacaaaaccagggcctccagtcttcctagccggggaaagagtcggatctgctgggattcttctgtcttggaatacaccacctaatccaaatggaaggattatatcttacattgtcaaatataaggaagtttgtccgtggatgcaaacagtatatacacaagtcagatcaaagccagacagtctggaagttcttcttactaatcttaatcctggaacaacatatgaaattaaggttgctgctgaaaacagtgctggcattggagtgtttagtgatccatttctcttccaaactgcagaaagtgctccaggaaaagtggtgaatctcacagttgaggcctacaacgcttcagcagttaagctgatttggtatttacctcggcaaccaaatggcaaaattaccagcttcaagattagtgtcaagcatgccagaagtgggatagtagtgaaagatgtctcaatcagagtagaggacattttgactgggaaattgccagaatgcaatgagaatagtgaatcttttttatggagtacagccagcccttctccaacccttggtagagttacacctccatcgcgtaccacacattcatcaagcacgttgacacagaatgagatcagctctgtgtggaaagagcctatcagttttgtagtgacacacttgagaccttatacaacatatctttttgaagtttcagctgctacaactgaagcaggttatattgatagtacgattgtcagaacaccagaatcagtgcctgaaggaccaccacaaaactgcgtaacaggcaacatcacaggaaagtccttttcaattttatgggacccaccaactatagtaacagggaaatttagttatagagttgaattatatggaccatcaggtcgcattttggataacagcacaaaagacctcaagtttgcattcactaacctaacaccatttacaatgtatgatgtctatattgcggctgaaaccagtgcagggactgggcccaagtcaaatatttcagtattcactccaccagatgttccaggggcagtgtttgatttacaacttgcagaggtagaatccacgcaagtaagaattacttggaagaaaccacgacaaccaaatggaattattaaccaataccgagtgaaagtgctagttccagagacaggaataattttggaaaatactttgctcactggaaataatgagtatataaatgaccccatggctccagaaattgtgaacatagtagagccaatggtaggattatatgagggttcagcagagatgtcgtctgaccttcactcacttgctacatttatatataacagccatccagataaaaactttcctgcaaggaatagagctgaagaccagacttcaccagttgtaactacaaggaatcagtatattactgacattgcagctgaacagctgtcttatgttatcaggagacttgtacctttcactgagcacatgattagtgtatctgctttcaccatcatgggagaaggaccaccaacagttctcagtgttaggacacgtcagcaagtgccaagctccattaaaattataaactataaaaatattagttcttcatctattttgttatattgggatcctccagaatatcccaatggaaaaataactcactatacgatttatgcaatggaattggatacaaacagagcattccagataactaccatagataacagctttctcataacagggttaaagaaatacacaaaatacaaaatgagagtggcagcctcaacccacgttggagaaagttctttgtctgaagaaaatgacatctttgtgagaacttcagaagatgaaccggaatcatcacctcaagatgtcgaagtaattgatgttaccgcagatgaaataaggttgaagtggtcaccacccgaaaagcccaatgggatcattattgcttatgaagtgctatataaaaatatagatactttatatatgaagaacacatcaacaacagacataatattaaggaacttaagacctcacaccctctataacatttctgtaaggtcttacaccagatttggtcatggcaatcaggtatcttctttactctctgtaaggacttcggagactgtgcctgatagtgcaccagaaaatatcacttacaaaaatatttcttctggagagattgagctatcattccttcccccaagtagtcccaatggaatcatacaaaaatatacaatttatctcaagagaagtaatggaaatgaggaaagaactataaatacaacctctttaacccaaaacattaaagtactgaagaaatatacccaatatatcattgaggtgtctgctagtacactcaaaggtgaaggagttcggagtgctcccataagtatactgacggaggaagatgctcctgattctccccctcaagacttctctgtaaaacagttgtctggtgtcacggtgaagttgtcatggcaaccacccctggagccaaatggaattatcctttattacacagtttatgtctggaatagatcatcattaaaaactattaatgtcactgaaacatcattggagttatcagatttggattataatgttgaatacagtgcttatgtaacagctagcaccagatttggtgatgggaaaacaagaagcaatatcattagctttcaaacaccagagggagcaccaagcgatcctcccaaagatgtttattatgcaaacctcagttcttcatcaataattcttttctggacacctccttcaaaacctaatgggattatacaatattactctgtttattacagaaatacttcaggtacttttatgcagaattttacactccatgaagtaaccaatgactttgacaatatgactgtatccacaattatagataaactgacaatattcagctactatacattttggttaacagcaagtacttcagttggaaatgggaataaaagcagtgacatcattgaagtatacacagatcaagacatacctgaagggtttgttggaaacctgacttacgaatccatttcgtcaactgcaataaatgtaagctgggtcccaccggctcaaccaaacggtctagtcttctactatgtttcactgatcttacagcagactcctcgccatgtgagaccacctcttgttacatatgagagaagcatatattttgataatctggaaaaatacactgattatatattaaaaattactccatcaacagaaaagggattctctgatacctatactgcccagctatacatcaagactgaagaagatgtcccagaaacttcaccaataatcaacacttttaaaaacctttcctctacctcagttctcttatcatgggatcccccagtaaagccaaatggtgcaataataagttatgatttaactttacaaggaccaaatgaaaattattctttcattacttctgataattacataatattggaagagctttcaccatttacattatatagcttttttgctgccgcaagaactagaaaaggacttggtccttccagtattcttttcttttacacagatgagtcagtgccgttagcacctccacaaaatttgactttaatcaactgtacttcagactttgtatggctgaaatggagcccaagtcctcttccaggtggtattgttaaagtatatagttttaaaattcatgaacatgaaactgacactatatattataagaatatatcaggatttaaaactgaagccaaacttgttggactggaaccagtcagcacctactctatccgtgtatctgcgttcaccaaagttggaaatggcaatcaatttagtaatgtagtaaaattcacaacccaagaatcagttccagatgtcgtgcagaatatgcagtgcatggcaactagctggcagtcagttttagtgaaatgggatccacccaaaaaggcaaatggaataataacgcagtatatggtaacagttgaaaggaattctacaaaagtttctccccaagatcacatgtacactttcataaagcttcttgccaatacctcatatgtctttaaagtaagagcttcaacctcagctggtgaaggtgatgaaagcacatgccatgtcagcacactacctgaaacagttcccagtgttcccacaaatattgctttttctgatgttcagtcaactagtgcaacattgacatggataagacctgacactatccttggctactttcaaaattacaaaattaccactcaacttcgtgctcaaaaatgcaaagaatgggaatccgaagaatgtgttgaatatcaaaaaattcaatacctctatgaagctcacttaactgaagagacagtatatggattaaagaaatttagatggtatagattccaagtggctgccagcaccaatgctggctatggcaatgcttcaaactggatttctacaaaaactctgcctggccctccagatggtcctcctgaaaatgttcatgtagtagcaacatcaccttttagcatcagcataagctggagtgaacctgctgtcattactggaccaacatgttatctgattgatgtcaaatcggtagataatgatgaatttaatatatccttcatcaagtcaaatgaagaaaataaaaccatagaaattaaagatttagaaatattcacaaggtattctgtagtgatcactgcatttactgggaacattagtgctgcatatgtagaagggaagtcaagtgctgaaatgattgttactactttagaatcagccccaaaggacccacctaacaacatgacatttcagaagataccagatgaagttacaaaatttcaattaacgttccttcctccttctcaacctaatggaaatatccaagtatatcaagctctggtttaccgagaagatgatcctactgctgtccagattcacaacctcagtattatacagaaaaccaacacattcgtcattgcaatgctagaaggactaaaaggtggacatacatacaatatcagtgtttacgcagtcaatagtgctggtgcaggtccaaaggttccgatgagaataaccatggatatcaaagctccagcacgaccaaaaaccaaaccaacccctatttatgatgccacaggaaaactgcttgtgacttcaacaacaattacaatcagaatgccaatatgttactacagtgatgatcatggaccaataaaaaatgtacaagtgcttgtgacagaaacaggagctcagcatgatggaaatgtaacaaagtggtatgatgcatattttaataaagcaaggccatattttacaaatgaaggctttcctaaccctccatgtacagaaggaaagacaaagtttagtggcaatgaagaaatctacatcataggtgctgataatgcatgcatgattcctggcaatgaagacaaaatttgcaatggaccactgaaaccaaaaaagcaatacttatttaaatttagagctacaaatattatgggacaatttactgactctgattattctgaccctgttaagactttaggggaaggactttcagaaagaaccgtagagatcattctttccgtcactttgtgtatcctttcaataattctccttggaacagctatttttgcatttgcaagaattcgacagaagcagaaagaaggtggcacatactctcctcaggatgcagaaattattgacactaaattgaagctggatcagctcatcacagtggcagacctggaactgaaggacgagagattaacgcggccaataagcaagaaatccttcctgcaacatgttgaagagctttgcacaaacaacaacctaaagtttcaagaagaattttcggaattaccaaaatttcttcaggatctttcttcaactgatgctgatctgccttggaatagagcaaaaaaccgcttcccaaacataaaaccatataataataacagagtaaagctgatagctgacgctagtgttccaggttcggattatattaatgccagctatatttctggttatttatgtccaaatgaatttattgctactcaaggtccactaccaggaacagttggagatttttggagaatggtgtgggaaaccagagcaaaaacattagtaatgctaacacagtgttttgaaaaaggacggatcagatgccatcagtattggccagaggacaacaagccagttactgtctttggagatatagtgattacaaagctaatggaggatgttcaaatagattggactatcagggatctgaaaattgaaaggcatggggattgcatgactgttcgacagtgtaactttactgcctggccagagcatggggttcctgagaacagcgcccctctaattcactttgtgaagttggttcgagcaagcagggcacatgacaccacacctatgattgttcactgcagtgctggagttggaagaactggagtttttattgctctggaccatttaacacaacatataaatgaccatgattttgtggatatatatggactagtagctgaactgagaagtgaaagaatgtgcatggtgcagaatctggcacagtatatctttttacaccagtgcattctggatctcttatcaaataagggaagtaatcagcccatctgttttgttaactattcagcacttcagaagatggactctttggacgccatggaaggtgatgttgagcttgaatgggaagaaaccactatgtaaatattcagaccaaaggatacaattggaagagatttttaaatcccaggggccaaagttaccccctcattcttccgaattgaaatgtgcaaccttaaagaaatatctatgcttctctcactgtgcctttccaaacggattgaacattttaagactagttcttgaaaatagctaatacagaataattatttgttttgtacagaataaatattatgcattttaaatgcttaagaaaagacatcccatatgtttttgaagtcctccatattttggaataagccaaatagaaaattattattatattagcattaatgtttcaatgtgaattttccctatgtattggatttaattttgagcaaaagttgtaaatgttgattcagtagtgttgttttggcttacagggtattgatgtttcttgtggataatttccaggactgtcataatgatctgtacttccatgtacacccctgtgttttgaatcctctgttttatgagtgctgagatatcatctcatgatcccgaacagctgaacagtaaccccctgacactgcagggattacttggcctttatacaacacacagtagctcttcagggacacttagggctatttaatttgcattgtgatcttcagtttgagaaccttaaaagaaaaattaaaagtgcaattgcacacatgaaattacagagtaccattctagcaaacctacatttgtaaactttaaaacacaagttttaccccctgtattgtatattcaaatatatagtaaatgtatcagagtatttgcccattagatatagtcaacctaatattaacaattctgaagagtttcttcagcaaaaatgtatcaaaagagtaataaaaacactgtgcgtgtttcaagcttgtaaaccaatgatgtgctgctgtggtgccaacagagacttccaaatggattatgttaaatggccgtcatttcatttcccaaggttgattttgagcagtatacttggtggaactgaaaacaaagaaattaaccatgtatagcaaattcaaggtttctttatagaaaatctttcagcctccatcttattaaatagtgacaatgtggtaagttttgaattacatgaactcattttgtcatagatttcaattaagagtaataaatagtattaattattctcttctatg

SEQ ID NO: 171906 - DNA, 3529 bp, Homo sapiens
  Payload ID: 13775
  Gene Symbol: PTPRR
  Gene Name: protein tyrosine phosphatase, receptor type, R
  Uniprot ID: Q15256
  ENST ID: ENST00000283228
  CDS Start-End: 454-2427
accaccccagcgatggagcctactctgctccaagccgccgctaagacccggagaagcggaatttcactttgaaattcccttgcctcgtgagggccggcgctgggcatgctcagtagccgcggcgctgctgctgggctgctgggctggcgcggagtccaccctgccgtctccgccttggcttctgggcgtccagaaggccaggcatttgccgcctctgagcgcttctgttccccttacccgcaacctcctactgctcttcctctctccctctcttagggaggttgaagctggtgctggtttctgtcggcgccacagactgactgctctgcaaaccccagccgaggacctgaatcccggagactagaagacccttggcggtggctctttctaatagcactttacctgaagtggggtcgtggtggagtttctcctccacctctcaatgcaaacactatgcggagagcagtctgcttccctgcgctgtgcctgctccttaatcttcacgctgcagggtgcttttcaggaaacaatgatcattttttggcaattaatcagaagaagagtgggaagccggtattcatttataagcattcacaagacattgagaagagcctggatatagccccacaaaaaatctacagacatagctaccattcctcttccgaagctcaagtaagcaaacgccaccagattgtcaattcagcatttcctagacccgcatatgacccgtctctcaatctgctggccatggatggtcaagatcttgaagtggaaaatctcccaatcccagcagcaaatgtaattgtggtgacactgcaaatggatgtaaacaagctgaacataaccttgcttcggatcttccgccaaggagtggctgcagctttaggactcttaccccagcaagtgcacatcaatcgcctcattggaaagaagaacagtattgaactgtttgtgtctcccataaaccgaaaaacaggaatttctgatgctctgccctctgaggaagttcttcgttcacttaatatcaatgttttgcatcaaagtttatcccagtttggaattacagaagtctctcctgagaaaaatgttttacaagggcagcatgaagcggacaaaatctggagcaaagaaggattttatgctgttgtcatttttctcagcatctttgttattatagtaacgtgtttgatgattctttacagattaaaagaaagatttcagctttccttaagacaagacaaagagaaaaaccaggagatccacctatcgcccatcacattacagccagcactgtccgaggcaaagacagtccacagcatggtccaacctgagcaggccccaaaggtactgaatgttgtcgtggaccctcaaggccgaggtgctcctgagatcaaagctaccaccgctacctctgtttgcccttctcctttcaaaatgaagcccataggacttcaagagagaagagggtccaacgtatctcttacattggacatgagtagcttggggaacattgaaccctttgtgtctataccaacaccacgggagaaggtagcaatggagtatctgcagtcagccagccgaattctcacaaggtctcagctgagggacgtcgtggcaagttcacatttactccaaagtgaattcatggaaataccaatgaactttgtggatcccaaagaaattgatattccgcgtcatggaactaaaaatcgctataagaccattttaccaaatcccctcagcagagtgtgtttaagaccaaaaaatgtaaccgattcattgagcacctacattaatgctaattatattaggggctacagtggcaaggagaaagccttcattgccacgcagggccccatgatcaacaccgtggatgatttctggcagatggtttggcaggaagacagccctgtgattgttatgatcacaaaactcaaagaaaaaaatgagaaatgtgtgctatactggccggaaaagagagggatatatggaaaagttgaggttctggttatcagtgtaaatgaatgtgataactacaccattcgaaaccttgtcttaaagcaaggaagccacacccaacatgtgaagcattactggtacacctcatggcctgatcacaagactccagacagtgcccagcccctcctacagctcatgctggatgtagaagaagacagacttgcttcccagggccgagggcctgtggttgtccactgcagtgcaggaataggtagaacagggtgttttattgctacatccattggctgtcaacagctgaaagaagaaggagttgtggatgcactaagcattgtctgccagcttcgtatggatagaggtggaatggtgcaaaccagtgagcagtatgaatttgtgcaccatgctctgtgcctgtatgagagcagactttcagcagagactgtccagtgagtcattgaagacttgtcagaccatcaatctcttggggtgattaatcaaattacccacccaaggcttctagaaggagcttcctgcaatggaaggaaggagaagctctgaagcccatgtatggcatggattgtggaagactgggcaacatatttaagatttccagctccttgtgtatatgaatgcatttgtaagcatcccccaaattattctgaaggttttttgatgatggaggtatgataggtttatcacacagcctaaggcagattttgttttgtctgtactgactctatctgccacacagaatgtatgtatgtaatattcagtaataaatgtcatcaggtgatgactggatgagctgctgaagacattcgtattatgtgttagatgctttaatgtttgcaaaatctgtcttgtgaatggactgtcagctgttaaactgttcctgttttgaagtgctattacctttctcagttaccagaatcttgctgctaaagttgcaagtgattgataatggatttttaacagagaagtctttgtttttgaaaaacaaaaatcaaaaacagtaactattttatatggaaatgtgtcttgataatattacctattaaatgtgtatttatagtccctcctatcaaacaattacagagcacaatgattgtcattgggtatatatgtatttactctctattattgggcataaaggtggcttctgctccagaactctatccactgtatttccacatcgtgagtcattttactttaaaagggaaaaacaaatttgtagcaactctgaagtatcaagagttttaactacttgtctctcttttgctaagaagggatttttgaatatgctatctacctggaatctctctctcaacaaaaggtatatgccttcaggaatgatataatctgtcccattttcgaggctccttataaggacatttccatgtatgtccttacatttctgaaagctttcaatcttcaagagacaaaaaaaattaaaataactaccctcagcaaacactagctgttctgctcatatatgaatttttaatgcagcaatgttgactttgtttcatactgccaataaactcttaatact

SEQ ID NO: 171907 - DNA, 2037 bp, Homo sapiens
  Payload ID: 13775
  Gene Symbol: PTPRR
  Gene Name: protein tyrosine phosphatase, receptor type, R
  Uniprot ID: Q15256
  ENST ID: ENST00000342084
  CDS Start-End: 147-1784
aaacagtaccaggcggttacctccaggtgactaaatgaggcttcatctcagcacacaagcttagaaagctttacgattagtcctgcttgctatggtaaggaaataacacaaagaagagtgcaaatggaagtcgacttcatcacaacatgcagtcaatttccaaacagacactgcaaatggatgtaaacaagctgaacataaccttgcttcggatcttccgccaaggagtggctgcagctttaggactcttaccccagcaagtgcacatcaatcgcctcattggaaagaagaacagtattgaactgtttgtgtctcccataaaccgaaaaacaggaatttctgatgctctgccctctgaggaagttcttcgttcacttaatatcaatgttttgcatcaaagtttatcccagtttggaattacagaagtctctcctgagaaaaatgttttacaagggcagcatgaagcggacaaaatctggagcaaagaaggattttatgctgttgtcatttttctcagcatctttgttattatagtaacgtgtttgatgattctttacagattaaaagaaagatttcagctttccttaagacaagacaaagagaaaaaccaggagatccacctatcgcccatcacattacagccagcactgtccgaggcaaagacagtccacagcatggtccaacctgagcaggccccaaaggtactgaatgttgtcgtggaccctcaaggccgaggtgctcctgagatcaaagctaccaccgctacctctgtttgcccttctcctttcaaaatgaagcccataggacttcaagagagaagagggtccaacgtatctcttacattggacatgagtagcttggggaacattgaaccctttgtgtctataccaacaccacgggagaaggtagcaatggagtatctgcagtcagccagccgaattctcacaaggtctcagctgagggacgtcgtggcaagttcacatttactccaaagtgaattcatggaaataccaatgaactttgtggatcccaaagaaattgatattccgcgtcatggaactaaaaatcgctataagaccattttaccaaatcccctcagcagagtgtgtttaagaccaaaaaatgtaaccgattcattgagcacctacattaatgctaattatattaggggctacagtggcaaggagaaagccttcattgccacgcagggccccatgatcaacaccgtggatgatttctggcagatggtttggcaggaagacagccctgtgattgttatgatcacaaaactcaaagaaaaaaatgagaaatgtgtgctatactggccggaaaagagagggatatatggaaaagttgaggttctggttatcagtgtaaatgaatgtgataactacaccattcgaaaccttgtcttaaagcaaggaagccacacccaacatgtgaagcattactggtacacctcatggcctgatcacaagactccagacagtgcccagcccctcctacagctcatgctggatgtagaagaagacagacttgcttcccagggccgagggcctgtggttgtccactgcagtgcaggaataggtagaacagggtgttttattgctacatccattggctgtcaacagctgaaagaagaaggagttgtggatgcactaagcattgtctgccagcttcgtatggatagaggtggaatggtgcaaaccagtgagcagtatgaatttgtgcaccatgctctgtgcctgtatgagagcagactttcagcagagactgtccagtgagtcattgaagacttgtcagaccatcaatctcttggggtgattaatcaaattacccacccaaggcttctagaaggagcttcctgcaatggaaggaaggagaagctctgaagcccatgtatggcatggattgtggaagactgggcaacatatttaagatttccagctccttgtgtatatgaatgcatttgtaagcatcccccaaattattctgaaggttttttgatgatggaggtatgataggtttatcacacag

SEQ ID NO: 171908 - DNA, 2632 bp, Homo sapiens
  Payload ID: 13775
  Gene Symbol: PTPRR
  Gene Name: protein tyrosine phosphatase, receptor type, R
  Uniprot ID: Q15256
  ENST ID: ENST00000378778
  CDS Start-End: 167-1522
aatgcaccacaagcttttgtttgcacttgtttcacttttgtttaaaagtaaagaggtagtacagcacgtaatccagggtgctgatgttgtgggaggggacttaaaacagagtaaggaaatcagaaacaatttcctccacacagaaaagaacagaactctcttacctatgaaccagaaaaatgttttacaagggcagcatgaagcggacaaaatctggagcaaagaaggattttatgctgttgtcatttttctcagcatctttgttattatagtaacgtgtttgatgattctttacagattaaaagaaagatttcagctttccttaagacaagacaaagagaaaaaccaggagatccacctatcgcccatcacattacagccagcactgtccgaggcaaagacagtccacagcatggtccaacctgagcaggccccaaaggtactgaatgttgtcgtggaccctcaaggccgaggtgctcctgagatcaaagctaccaccgctacctctgtttgcccttctcctttcaaaatgaagcccataggacttcaagagagaagagggtccaacgtatctcttacattggacatgagtagcttggggaacattgaaccctttgtgtctataccaacaccacgggagaaggtagcaatggagtatctgcagtcagccagccgaattctcacaaggtctcagctgagggacgtcgtggcaagttcacatttactccaaagtgaattcatggaaataccaatgaactttgtggatcccaaagaaattgatattccgcgtcatggaactaaaaatcgctataagaccattttaccaaatcccctcagcagagtgtgtttaagaccaaaaaatgtaaccgattcattgagcacctacattaatgctaattatattaggggctacagtggcaaggagaaagccttcattgccacgcagggccccatgatcaacaccgtggatgatttctggcagatggtttggcaggaagacagccctgtgattgttatgatcacaaaactcaaagaaaaaaatgagaaatgtgtgctatactggccggaaaagagagggatatatggaaaagttgaggttctggttatcagtgtaaatgaatgtgataactacaccattcgaaaccttgtcttaaagcaaggaagccacacccaacatgtgaagcattactggtacacctcatggcctgatcacaagactccagacagtgcccagcccctcctacagctcatgctggatgtagaagaagacagacttgcttcccagggccgagggcctgtggttgtccactgcagtgcaggaataggtagaacagggtgttttattgctacatccattggctgtcaacagctgaaagaagaaggagttgtggatgcactaagcattgtctgccagcttcgtatggatagaggtggaatggtgcaaaccagtgagcagtatgaatttgtgcaccatgctctgtgcctgtatgagagcagactttcagcagagactgtccagtgagtcattgaagacttgtcagaccatcaatctcttggggtgattaatcaaattacccacccaaggcttctagaaggagcttcctgcaatggaaggaaggagaagctctgaagcccatgtatggcatggattgtggaagactgggcaacatatttaagatttccagctccttgtgtatatgaatgcatttgtaagcatcccccaaattattctgaaggttttttgatgatggaggtatgataggtttatcacacagcctaaggcagattttgttttgtctgtactgactctatctgccacacagaatgtatgtatgtaatattcagtaataaatgtcatcaggtgatgactggatgagctgctgaagacattcgtattatgtgttagatgctttaatgtttgcaaaatctgtcttgtgaatggactgtcagctgttaaactgttcctgttttgaagtgctattacctttctcagttaccagaatcttgctgctaaagttgcaagtgattgataatggatttttaacagagaagtctttgtttttgaaaaacaaaaatcaaaaacagtaactattttatatggaaatgtgtcttgataatattacctattaaatgtgtatttatagtccctcctatcaaacaattacagagcacaatgattgtcattgggtatatatgtatttactctctattattgggcataaaggtggcttctgctccagaactctatccactgtatttccacatcgtgagtcattttactttaaaagggaaaaacaaatttgtagcaactctgaagtatcaagagttttaactacttgtctctcttttgctaagaagggatttttgaatatgctatctacctggaatctctctctcaacaaaaggtatatgccttcaggaatgatataatctgtcccattttcgaggctccttataaggacatttccatgtatgtccttacatttctgaaagctttcaatcttcaagagacaaaaaaaattaaaataactaccctcagcaaacactagctgttctgctcatatatgaatttttaatgcagcaatgttgactttgtttcatactgccaataaactcttaatactaaatactg

SEQ ID NO: 171909 - DNA, 2818 bp, Homo sapiens
  Payload ID: 13775
  Gene Symbol: PTPRR
  Gene Name: protein tyrosine phosphatase, receptor type, R
  Uniprot ID: Q15256
  ENST ID: ENST00000440835
  CDS Start-End: 469-1707
acttaaaacagagtaaggaaatcagaaacaatttcctccacacagaaaagaacagaactctcttacctatgaaccaggtagtttccaagagagacgctgagggatgtttagaaagcctgggacctgcagatgccatgtcaggcacgcttgctcctgcataggagactaaataatctcgatatataaggatggcagtctgttgtcttagatcagtttgagaagcagctctggcagcggggggtgtaggtgtgttgcactacactgaatggaataaggctaaaaatatgtttagtgtctgataagaacgccagttttctcaagctctcatttaacgtcggactttctgttttgcttttaaagaaaaatgttttacaagggcagcatgaagcggacaaaatctggagcaaagaaggattttatgctgttgtcatttttctcagcatctttgttattatagtaacgtgtttgatgattctttacagattaaaagaaagatttcagctttccttaagacaagacaaagagaaaaaccaggagatccacctatcgcccatcacattacagccagcactgtccgaggcaaagacagtccacagcatggtccaacctgagcaggccccaaaggtactgaatgttgtcgtggaccctcaaggccgaggtgctcctgagatcaaagctaccaccgctacctctgtttgcccttctcctttcaaaatgaagcccataggacttcaagagagaagagggtccaacgtatctcttacattggacatgagtagcttggggaacattgaaccctttgtgtctataccaacaccacgggagaaggtagcaatggagtatctgcagtcagccagccgaattctcacaaggtctcagctgagggacgtcgtggcaagttcacatttactccaaagtgaattcatggaaataccaatgaactttgtggatcccaaagaaattgatattccgcgtcatggaactaaaaatcgctataagaccattttaccaaatcccctcagcagagtgtgtttaagaccaaaaaatgtaaccgattcattgagcacctacattaatgctaattatattaggggctacagtggcaaggagaaagccttcattgccacgcagggccccatgatcaacaccgtggatgatttctggcagatggtttggcaggaagacagccctgtgattgttatgatcacaaaactcaaagaaaaaaatgagaaatgtgtgctatactggccggaaaagagagggatatatggaaaagttgaggttctggttatcagtgtaaatgaatgtgataactacaccattcgaaaccttgtcttaaagcaaggaagccacacccaacatgtgaagcattactggtacacctcatggcctgatcacaagactccagacagtgcccagcccctcctacagctcatgctggatgtagaagaagacagacttgcttcccagggccgagggcctgtggttgtccactgcagtgcaggaataggtagaacagggtgttttattgctacatccattggctgtcaacagctgaaagaagaaggagttgtggatgcactaagcattgtctgccagcttcgtatggatagaggtggaatggtgcaaaccagtgagcagtatgaatttgtgcaccatgctctgtgcctgtatgagagcagactttcagcagagactgtccagtgagtcattgaagacttgtcagaccatcaatctcttggggtgattaatcaaattacccacccaaggcttctagaaggagcttcctgcaatggaaggaaggagaagctctgaagcccatgtatggcatggattgtggaagactgggcaacatatttaagatttccagctccttgtgtatatgaatgcatttgtaagcatcccccaaattattctgaaggttttttgatgatggaggtatgataggtttatcacacagcctaaggcagattttgttttgtctgtactgactctatctgccacacagaatgtatgtatgtaatattcagtaataaatgtcatcaggtgatgactggatgagctgctgaagacattcgtattatgtgttagatgctttaatgtttgcaaaatctgtcttgtgaatggactgtcagctgttaaactgttcctgttttgaagtgctattacctttctcagttaccagaatcttgctgctaaagttgcaagtgattgataatggatttttaacagagaagtctttgtttttgaaaaacaaaaatcaaaaacagtaactattttatatggaaatgtgtcttgataatattacctattaaatgtgtatttatagtccctcctatcaaacaattacagagcacaatgattgtcattgggtatatatgtatttactctctattattgggcataaaggtggcttctgctccagaactctatccactgtatttccacatcgtgagtcattttactttaaaagggaaaaacaaatttgtagcaactctgaagtatcaagagttttaactacttgtctctcttttgctaagaagggatttttgaatatgctatctacctggaatctctctctcaacaaaaggtatatgccttcaggaatgatataatctgtcccattttcgaggctccttataaggacatttccatgtatgtccttacatttctgaaagctttcaatcttcaagagacaaaaaaaattaaaataactaccctcagcaaacactagctgttctgctcatatatgaatttttaatgcagcaatgttgactttgtttcatactgccaataaactcttaatactaaatactga

SEQ ID NO: 171910 - DNA, 1603 bp, Homo sapiens
  Payload ID: 13775
  Gene Symbol: PTPRR
  Gene Name: protein tyrosine phosphatase, receptor type, R
  Uniprot ID: Q15256
  ENST ID: ENST00000549308
  CDS Start-End: 241-1479
aaaagtaaagaggtagtacagcacgtaatccagggtgctgatgttgtgggaggggacttaaaacagagtaaggaaatcagaaacaatttcctccacacagaaaagaacagaactctcttacctatgaaccagaaaaatgttttacaagggcagcatgaagcggacaaaatctggagcaaagaaggattttatgctgttgtcatttttctcagcatctttgttattatagtaacgtgtttgatgattctttacagattaaaagaaagatttcagctttccttaagacaagacaaagagaaaaaccaggagatccacctatcgcccatcacattacagccagcactgtccgaggcaaagacagtccacagcatggtccaacctgagcaggccccaaaggtactgaatgttgtcgtggaccctcaaggccgaggtgctcctgagatcaaagctaccaccgctacctctgtttgcccttctcctttcaaaatgaagcccataggacttcaagagagaagagggtccaacgtatctcttacattggacatgagtagcttggggaacattgaaccctttgtgtctataccaacaccacgggagaaggtagcaatggagtatctgcagtcagccagccgaattctcacaaggtctcagctgagggacgtcgtggcaagttcacatttactccaaagtgaattcatggaaataccaatgaactttgtggatcccaaagaaattgatattccgcgtcatggaactaaaaatcgctataagaccattttaccaaatcccctcagcagagtgtgtttaagaccaaaaaatgtaaccgattcattgagcacctacattaatgctaattatattaggggctacagtggcaaggagaaagccttcattgccacgcagggccccatgatcaacaccgtggatgatttctggcagatggtttggcaggaagacagccctgtgattgttatgatcacaaaactcaaagaaaaaaatgagaaatgtgtgctatactggccggaaaagagagggatatatggaaaagttgaggttctggttatcagtgtaaatgaatgtgataactacaccattcgaaaccttgtcttaaagcaaggaagccacacccaacatgtgaagcattactggtacacctcatggcctgatcacaagactccagacagtgcccagcccctcctacagctcatgctggatgtagaagaagacagacttgcttcccagggccgagggcctgtggttgtccactgcagtgcaggaataggtagaacagggtgttttattgctacatccattggctgtcaacagctgaaagaagaaggagttgtggatgcactaagcattgtctgccagcttcgtatggatagaggtggaatggtgcaaaccagtgagcagtatgaatttgtgcaccatgctctgtgcctgtatgagagcagactttcagcagagactgtccagtgagtcattgaagacttgtcagaccatcaatctcttggggtgattaatcaaattacccacccaaggcttctagaaggagcttcctgcaatggaaggaaggagaagctctgaagcccatgtatggcat

SEQ ID NO: 171911 - DNA, 2966 bp, Homo sapiens
  Payload ID: 13775
  Gene Symbol: PTPRR
  Gene Name: protein tyrosine phosphatase, receptor type, R
  ENST ID: ENST00000551219
  CDS Start-End: 680-1105
gaaccaggtagtttccaagagagacgctgagggatgtttagaaagcctgggacctgcagatgccatgtcaggcacgcttgctcctgcataggagactaaataatctcgatatataaggatggcagtctgttgtcttagatcagtttgagaagcagctctggcagcggggggtgtaggtgtgttgcactacactgaatggaataaggctaaaaatatgtttagtgtctgataagaacgccagttttctcaagctctcatttaacgtcggactttctgttttgcttttaaagaaaaatgttttacaagggcagcatgaagcggacaaaatctggagcaaagaaggattttatgctgttgtcatttttctcagcatctttgttattatagtaacgtgtttgatgattctttacagattaaaagaaagatttcagctttccttaagacaagacaaagagaaaaaccaggagatccacctatcgcccatcacattacagccagcactgtccgaggcaaagacagtccacagcatggtccaacctgagcaggccccaaaggtactgaatgttgtcgtggaccctcaaggccgaggtgctcctgagatcaaagctaccaccgctacctctgtttgcccttctcctttcaaaatgaagcccataggacttcaagagaggaaataccaatgaactttgtggatcccaaagaaattgatattccgcgtcatggaactaaaaatcgctataagaccattttaccaaatcccctcagcagagtgtgtttaagaccaaaaaatgtaaccgattcattgagcacctacattaatgctaattatattaggggctacagtggcaaggagaaagccttcattgccacgcagggccccatgatcaacaccgtggatgatttctggcagatggtttggcaggaagacagccctgtgattgttatgatcacaaaactcaaagaaaaaaatgagaagaggaggcttacagggctggcacctgcccacacctggcattcgacatttccctgggctaagctgagtgggagcagatgcccccatcctatgaccagggcctgtgcaggagccatcacaccaccttgctgatgatgacacctagttcttcaatttcacactggacttcatctcccttcttgagaaagacagaaggtttcctgaatacaccaacacctggggaggtcccagtcaggatgacatcccctgggtaaaagaaatgtgtgctatactggccggaaaagagagggatatatggaaaagttgaggttctggttatcagtgtaaatgaatgtgataactacaccattcgaaaccttgtcttaaagcaaggaagccacacccaacatgtgaagcattactggtacacctcatggcctgatcacaagactccagacagtgcccagcccctcctacagctcatgctggatgtagaagaagacagacttgcttcccagggccgagggcctgtggttgtccactgcagtgcaggaataggtagaacagggtgttttattgctacatccattggctgtcaacagctgaaagaagaaggagttgtggatgcactaagcattgtctgccagcttcgtatggatagaggaagaaactaaagtgcaaggggtttcgaggaatttgtccaagatgcatacagctaagaattggcagaggagggatttgaactcaccttggctgatgccaaatccaagtacttgatcattaggctgtaccacctccccagtaatgttacacagaggtggaatggtgcaaaccagtgagcagtatgaatttgtgcaccatgctctgtgcctgtatgagagcagactttcagcagagactgtccagtgagtcattgaagacttgtcagaccatcaatctcttggggtgattaatcaaattacccacccaaggcttctagaaggagcttcctgcaatggaaggaaggagaagctctgaagcccatgtatggcatggattgtggaagactgggcaacatatttaagatttccagctccttgtgtatatgaatgcatttgtaagcatcccccaaattattctgaaggttttttgatgatggaggtatgataggtttatcacacagcctaaggcagattttgttttgtctgtactgactctatctgccacacagaatgtatgtatgtaatattcagtaataaatgtcatcaggtgatgactggatgagctgctgaagacattcgtattatgtgttagatgctttaatgtttgcaaaatctgtcttgtgaatggactgtcagctgttaaactgttcctgttttgaagtgctattacctttctcagttaccagaatcttgctgctaaagttgcaagtgattgataatggatttttaacagagaagtctttgtttttgaaaaacaaaaatcaaaaacagtaactattttatatggaaatgtgtcttgataatattacctattaaatgtgtatttatagtccctcctatcaaacaattacagagcacaatgattgtcattgggtatatatgtatttactctctattattgggcataaaggtggcttctgctccagaactctatccactgtatttccacatcgtgagtcattttactttaaaagggaaaaacaaatttgtagcaactctgaagtatcaagagttttaactacttgtctctcttttgctaagaagggatttttgaatatgctatctacctggaatctctctctcaacaaaaggtatatgccttcaggaatgatataatctgtcccattttcgaggctccttataaggacatttccatgtatgtccttacatttctgaaagctttcaatcttcaagagacaaaaaaaattaaaataactaccctcagcaaacactagctgttctgctcatatatgaatttttaatgcagcaatgttgactttgtttcatactgccaataaactcttaatactaaa

SEQ ID NO: 171912 - DNA, 1024 bp, Homo sapiens
  Payload ID: 13775
  Gene Symbol: PTPRR
  Gene Name: protein tyrosine phosphatase, receptor type, R
  ENST ID: ENST00000550661
  CDS Start-End: 429-1024
acttgtttcacttttgtttaaaagtaaagaggtagtacagcacgtaatccagggtgctgatgttgtgggaggggacttaaaacagagtaaggaaatcagaaacaatttcctccacacagaaaagaacagaactctcttacctatgaaccaggtagtttccaagagagacgctgagggatgtttagaaagcctgggacctgcagatgccatgtcaggcacgcttgctcctgcataggagactaaataatctcgatatataaggatggcagtctgttgtcttagatcagtttgagaagcagctctggcagcggggggtgtagaaaaatgttttacaagggcagcatgaagcggacaaaatctggagcaaagaaggattttatgctgttgtcatttttctcagcatctttgttattatagtaacgtgtttgatgattctttacagattaaaagaaagatttcagctttccttaagacaagacaaagagaaaaaccaggagatccacctatcgcccatcacattacagccagcactgtccgaggcaaagacagtccacagcatggtccaacctgagcaggccccaaaggtactgaatgttgtcgtggaccctcaaggccgaggtgctcctgagatcaaagctaccaccgctacctctgtttgcccttctcctttcaaaatgaagcccataggacttcaagagagaagagggtccaacgtatctcttacattggacatgagtagcttggggaacattgaaccctttgtgtctataccaacaccacgggagaaggtagcaatggagtatctgcagtcagccagccgaattctcacaaggtctcagctgagggacgtcgtggcaagttcacatttactccaaagtgaattcatggaaataccaatgaactttgtggatcccaaagaaattgatattccgcgtcatggaactaaaaatcgctataagaccattttaccaaatcccctcagcagagtgtgtttaagaccaaaaaatgtaaccgattcattgag

SEQ ID NO: 171913 - DNA, 4766 bp, Homo sapiens
  Payload ID: 13776
  Gene Symbol: PTPRS
  Gene Name: protein tyrosine phosphatase, receptor type, S
  ENST ID: ENST00000262963
  CDS Start-End: 24-4529
gagatcggaggtcgctgccaagcatggcgcccacctggggccctggcatggtgtctgtggttggtcccatgggcctccttgtggtcctgctcgttggaggctgtgcagcagaagagccccccaggtttatcaaagaacccaaggaccagatcggcgtgtcggggggtgtggcctctttcgtgtgtcaggccacgggtgaccccaagccacgagtgacctggaacaagaagggcaagaaggtcaactctcagcgctttgagacgattgagtttgatgagagtgcaggggcagtgctgaggatccagccgctgaggacaccgcgggatgaaaacgtgtacgagtgtgtggcccagaactcggttggggagatcacagtccatgccaagcttactgtcctccgagaggaccagctgccctctggcttccccaacatcgacatgggcccacagttgaaggtggtggagcggacacggacagccaccatgctctgtgcagccagcggcaaccctgaccctgagatcacctggttcaaggacttcctgcctgtggatcctagtgccagcaatggacgcatcaaacagctgcgatcaggagccctgcagattgaaagcagtgaggaaaccgaccagggcaaatatgagtgtgtggccaccaacagcgccggcgtgcgctactcctcacctgccaacctctacgtgcgagtccgccgcgtggccccgcgcttctccatcctgcccatgagccacgagatcatgccagggggcaacgtgaacatcacctgcgtggccgtgggctcgcccatgccatacgtgaagtggatgcagggggccgaggacctgacccccgaggatgacatgcccgtgggtcggaacgtgctggaactcacagatgtcaaggactcggccaactacacctgcgtggccatgtccagcctgggcgtcattgaggcggttgctcagatcacggtgaaatctctccccaaagctcccgggactcccatggtgactgagaacacagccaccagcatcaccatcacgtgggactcgggcaacccagatcctgtgtcctattacgtcatcgaatataaatccaagagccaagacgggccgtatcagattaaagaggacatcaccaccacacgttacagcatcggcggcctgagccccaactcggagtacgagatctgggtgtcggccgtcaactccatcggccaggggccccccagcgagtccgtggtcacccgcacaggcgagcaggccccggccagcgcgccgcggaacgtgcaagcccggatgctcagcgcgaccaccatgattgtgcagtgggaggagccggtggagcccaacggcctgatccgcggctaccgcgtctactacaccatggaaccggagcaccccgtgggcaactggcagaagcacaacgtggacgacagcctgctgaccaccgtgggcagcctgctggaggacgagacctacaccgtgcgggtgctcgccttcacctccgtcggcgacgggcccctctcggaccccatccaggtcaagacgcagcagggagtgccgggccagcccatgaacctgcgggccgaggccaggtcggagaccagcatcacgctgtcctggagccccccgcggcaggagagtatcatcaagtacgagctcctcttccgggaaggcgaccatggccgggaggtgggaaggaccttcgacccgacgacttcctacgtggtggaggacctgaagcccaacacggagtacgccttccgcctggcggcccgctcgccgcagggcctgggcgccttcacccccgtggtgcggcagcgcacgctgcagtccatctcgcccaagaacttcaaggtgaaaatgatcatgaagacatcagttctgctcagctgggagttccctgacaactacaactcacccacaccctacaagatccagtacaatgggctcacactggatgtggatggccgtaccaccaagaagctcatcacgcacctcaagccccacaccttctacaactttgtgctgaccaatcgcggcagcagcctgggcggcctccagcagacggtcaccgcctggactgccttcaacctgctcaacggcaagcccagcgtcgcccccaagcctgatgctgacggcttcatcatggtgtatcttcctgacggccagagccccgtgcctgtccagagctatttcattgtgatggtgccactgcgcaagtctcgtggaggccaattcctgaccccgctgggtagcccagaggacatggatctggaagagctcatccaggacatctcacggctacagaggcgcagcctgcggcactcgcgtcagctggaggtgccccggccctatattgcagctcgcttctctgtgctgccacccacgttccatcccggcgaccagaagcagtatggcggcttcgataaccggggcctggagcccggccaccgctatgtcctcttcgtgcttgccgtgcttcagaagagcgagcctacctttgcagccagtcccttctcagaccccttccagctggataacccggacccccagcccatcgtggatggcgaggaggggcttatctgggtgatcgggcctgtgctggccgtggtcttcataatctgcattgtcattgctatcctgctctacaagaagaagccccatagtaaacgcaaggactcagaaccccgcaccaaatgcctcctgaacaatgccgacctcgcccctcaccaccccaaggaccctgtggaaatgagacgcattaacttccagactccaggcatgcttagccacccgccaattcccatcgcagacatggcggagcacacggagcggctcaaggccaacgacagcctcaagctctcccaggagtatgagtccatcgaccctggacagcagttcacatgggaacattccaacctggaagtgaacaagccgaagaaccgctatgccaacgtcatcgcctatgaccactcccgtgtcatcctccagcccattgaaggcatcatgggcagtgattacatcaatgccaactacgtggacggctaccggtgtcagaacgcgtacattgccacgcaggggccgctgcctgagacctttggggacttctggcgtatggtgtgggagcagcggtcggcgaccatcgtcatgatgacgcggctggaggagaagtcacggatcaagtgtgatcagtattggcccaacagaggcacggagacctacggcttcatccaggtcacgttgctagataccatcgagctggccacattctgcgtcaggacattctctctgcacaagaatggctccagtgagaaacgcgaggtccgccagttccagtttacggcgtggccggaccatggcgtgcccgaatacccaacgcccttcctggctttcctgcggagagtcaagacctgcaacccgccagatgccggccccatcgtggttcactgcagtgccggtgtgggccgcacaggctgctttatcgtcatcgacgccatgcttgagcggatcaagccagagaagacagtcgatgtctatggccacgtgacgctcatgaggtcccagcgcaactacatggtgcagacggaggaccagtacagcttcatccacgaggccctgctggaggccgtgggctgtggcaacacagaagtgcccgcacgcagcctctatgcctacatccagaagctggcccaggtggagcctggcgaacacgtcactggcatggaactcgagttcaagcggctggctaactccaaggcccacacgtcacgcttcatcagtgccaatctgccttgtaacaagttcaagaaccgcctggtgaacatcatgccctatgagagcacacgggtctgtctgcaacccatccggggtgtggagggctctgactacatcaacgccagcttcattgatggctacaggcagcagaaggcctacatcgcgacacaggggccgctggcggagaccacggaagacttctggcgcatgctgtgggagaacaattcgacgatcgtggtgatgctgaccaagctgcgggagatgggccgggagaagtgtcaccagtactggccggccgagcgctctgcccgctaccagtactttgtggtagatccgatggcagaatacaacatgcctcagtatatcctgcgagagttcaaggtcacagatgcccgggatggccagtcccggactgtccggcagttccagttcacagactggccggaacagggtgtgccaaagtcgggggagggcttcatcgacttcattggccaagtgcataagactaaggagcagtttggccaggacggccccatctctgtccactgcagtgccggcgtgggcaggacgggcgtcttcatcacgcttagcatcgtgctggagcggatgcggtatgaaggcgtggtggacatctttcagacggtgaagatgctacgaacccagcggccggccatggtgcagacagaggatgagtaccagttctgttaccaggcggcactggagtacctcggaagctttgaccactatgcaacctaaagccatggttccccccaggcccgacaccactggccccggatgcctctgcccctcccgggcggacctcctgaggcctggacccccagtgggcagggcaggaggtggcagcggcagcagctgtgtttctgcaccatttccgaggacgacgcagcccctcgagcccccccaccggccccggccgccccagcgacctccctggcaccggccgccgccttcaaatacttggcacattcctcc

SEQ ID NO: 171914 - DNA, 7233 bp, Homo sapiens
  Payload ID: 13776
  Gene Symbol: PTPRS
  Gene Name: protein tyrosine phosphatase, receptor type, S
  Uniprot ID: Q13332
  ENST ID: ENST00000348075
  CDS Start-End: 235-5967
cctcgcgccgcccgcccggcagcccggccggcgcgcgcacgccgcgagccgctggcgctcgggctccgctcggatcccatgcaacagccacgatgtgaagcggggcagagccgggggagcccagcccagccagcctccagacgttgccccatctgacgctcggctcgaggcctctctgtgagggaccggggggccatccccctccagggcggagatcggaggtcgctgccaagcatggcgcccacctggggccctggcatggtgtctgtggttggtcccatgggcctccttgtggtcctgctcgttggaggctgtgcagcagaagagccccccaggtttatcaaagaacccaaggaccagatcggcgtgtcggggggtgtggcctctttcgtgtgtcaggccacgggtgaccccaagccacgagtgacctggaacaagaagggcaagaaggtcaactctcagcgctttgagacgattgagtttgatgagagtgcaggggcagtgctgaggatccagccgctgaggacaccgcgggatgaaaacgtgtacgagtgtgtggcccagaactcggttggggagatcacagtccatgccaagcttactgtcctccgagaggaccagctgccctctggcttccccaacatcgacatgggcccacagttgaaggtggtggagcggacacggacagccaccatgctctgtgcagccagcggcaaccctgaccctgagatcacctggttcaaggacttcctgcctgtggatcctagtgccagcaatggacgcatcaaacagctgcgatcaggagccctgcagattgaaagcagtgaggaaaccgaccagggcaaatatgagtgtgtggccaccaacagcgccggcgtgcgctactcctcacctgccaacctctacgtgcgagtccgccgcgtggccccgcgcttctccatcctgcccatgagccacgagatcatgccagggggcaacgtgaacatcacctgcgtggccgtgggctcgcccatgccatacgtgaagtggatgcagggggccgaggacctgacccccgaggatgacatgcccgtgggtcggaacgtgctggaactcacagatgtcaaggactcggccaactacacctgcgtggccatgtccagcctgggcgtcattgaggcggttgctcagatcacggtgaaatctctccccaaagctcccgggactcccatggtgactgagaacacagccaccagcatcaccatcacgtgggactcgggcaacccagatcctgtgtcctattacgtcatcgaatataaatccaagagccaagacgggccgtatcagattaaagaggacatcaccaccacacgttacagcatcggcggcctgagccccaactcggagtacgagatctgggtgtcggccgtcaactccatcggccaggggccccccagcgagtccgtggtcacccgcacaggcgagcaggccccggccagcgcgccgcggaacgtgcaagcccggatgctcagcgcgaccaccatgattgtgcagtgggaggagccggtggagcccaacggcctgatccgcggctaccgcgtctactacaccatggaaccggagcaccccgtgggcaactggcagaagcacaacgtggacgacagcctgctgaccaccgtgggcagcctgctggaggacgagacctacaccgtgcgggtgctcgccttcacctccgtcggcgacgggcccctctcggaccccatccaggtcaagacgcagcagggagtgccgggccagcccatgaacctgcgggccgaggccaggtcggagaccagcatcacgctgtcctggagccccccgcggcaggagagtatcatcaagtacgagctcctcttccgggaaggcgaccatggccgggaggtgggaaggaccttcgacccgacgacttcctacgtggtggaggacctgaagcccaacacggagtacgccttccgcctggcggcccgctcgccgcagggcctgggcgccttcacccccgtggtgcggcagcgcacgctgcagtccaaaccgtcagccccccctcaagacgttaaatgtgtcagcgtgcgctccacggccattttggtaagttggcgcccgccgccgccggaaacgcacaacggggccctggtgggctacagcgtccgctaccgaccgctgggctcagaggacccggaacccaaggaggtgaacggcatccccccgaccaccactcagatcctgctggaggccttggagaagtggacccagtaccgcatcacgactgtcgctcacacagaggtgggaccagggcccgagagctcgcccgtggtcgtccgcaccgacgaggatgtgcccagcgcgccgccgcggaaggtggaggcggaggcgctcaacgccacggccatccgcgtgctgtggcgctcgcccgcgcccggccggcagcacggccagatccgcggctaccaggtccactacgtgcgcatggagggcgccgaggcccgcgggccgccgcgcatcaaggacgtcatgctggccgatgcccaggagatggtcatcacaaacttgcagcctgagaccgcgtactccatcacggtagccgcctacaccatgaagggcgatggcgctcgcagcaaacccaaggtggttgtgaccaagggagcagtgctgggccgcccaaccctgtcggtgcagcagacccccgagggcagcctgctggcacgctgggagcccccggctggcaccgcggaggaccaggtgctgggctaccgcctgcagtttggccgtgaggactcgacgcccctggccaccctggagttcccgccctccgaggaccgctacacggcatcaggcgtgcacaagggggccacgtatgtgttccggcttgcggcccggagccgcggcggcctgggcgaggaggcagccgaggtcctgagcatcccggaggacacgccccgtggccacccgcagattctggaggcggccggcaacgcctcggccgggaccgtccttctccgctggctgccacccgtgcccgccgagcgcaacggggccatcgtcaaatacacggtggccgtgcgggaggccggtgccctgggccctgcccgagagactgagctgccggcagcggctgagccgggcgcggagaacgcgctcacgctgcagggcctgaagcccgacacggcctatgacctccaagtgcgagcccacacgcgccggggccctggccccttcagcccccccgtccgctaccggacgttcctgcgggaccaagtctcgcccaagaacttcaaggtgaaaatgatcatgaagacatcagttctgctcagctgggagttccctgacaactacaactcacccacaccctacaagatccagtacaatgggctcacactggatgtggatggccgtaccaccaagaagctcatcacgcacctcaagccccacaccttctacaactttgtgctgaccaatcgcggcagcagcctgggcggcctccagcagacggtcaccgcctggactgccttcaacctgctcaacggcaagcccagcgtcgcccccaagcctgatgctgacggcttcatcatggtgtatcttcctgacggccagagccccgtgcctgtccagagctatttcattgtgatggtgccactgcgcaagtctcgtggaggccaattcctgaccccgctgggtagcccagaggacatggatctggaagagctcatccaggacatctcacggctacagaggcgcagcctgcggcactcgcgtcagctggaggtgccccggccctatattgcagctcgcttctctgtgctgccacccacgttccatcccggcgaccagaagcagtatggcggcttcgataaccggggcctggagcccggccaccgctatgtcctcttcgtgcttgccgtgcttcagaagagcgagcctacctttgcagccagtcccttctcagaccccttccagctggataacccggacccccagcccatcgtggatggcgaggaggggcttatctgggtgatcgggcctgtgctggccgtggtcttcataatctgcattgtcattgctatcctgctctacaagaacaaacccgacagtaaacgcaaggactcagaaccccgcaccaaatgcctcctgaacaatgccgacctcgcccctcaccaccccaaggaccctgtggaaatgagacgcattaacttccagactccaggcatgcttagccacccgccaattcccatcgcagacatggcggagcacacggagcggctcaaggccaacgacagcctcaagctctcccaggagtatgagtccatcgaccctggacagcagttcacatgggaacattccaacctggaagtgaacaagccgaagaaccgctatgccaacgtcatcgcctatgaccactcccgtgtcatcctccagcccattgaaggcatcatgggcagtgattacatcaatgccaactacgtggacggctaccggtgtcagaacgcgtacattgccacgcaggggccgctgcctgagacctttggggacttctggcgtatggtgtgggagcagcggtcggcgaccatcgtcatgatgacgcggctggaggagaagtcacggatcaagtgtgatcagtattggcccaacagaggcacggagacctacggcttcatccaggtcacgttgctagataccatcgagctggccacattctgcgtcaggacattctctctgcacaagaatggctccagtgagaaacgcgaggtccgccagttccagtttacggcgtggccggaccatggcgtgcccgaatacccaacgcccttcctggctttcctgcggagagtcaagacctgcaacccgccagatgccggccccatcgtggttcactgcagtgccggtgtgggccgcacaggctgctttatcgtcatcgacgccatgcttgagcggatcaagccagagaagacagtcgatgtctatggccacgtgacgctcatgaggtcccagcgcaactacatggtgcagacggaggaccagtacagcttcatccacgaggccctgctggaggccgtgggctgtggcaacacagaagtgcccgcacgcagcctctatgcctacatccagaagctggcccaggtggagcctggcgaacacgtcactggcatggaactcgagttcaagcggctggctaactccaaggcccacacgtcacgcttcatcagtgccaatctgccttgtaacaagttcaagaaccgcctggtgaacatcatgccctatgagagcacacgggtctgtctgcaacccatccggggtgtggagggctctgactacatcaacgccagcttcattgatggctacaggcagcagaaggcctacatcgcgacacaggggccgctggcggagaccacggaagacttctggcgcatgctgtgggagaacaattcgacgatcgtggtgatgctgaccaagctgcgggagatgggccgggagaagtgtcaccagtactggccggccgagcgctctgcccgctaccagtactttgtggtagatccgatggcagaatacaacatgcctcagtatatcctgcgagagttcaaggtcacagatgcccgggatggccagtcccggactgtccggcagttccagttcacagactggccggaacagggtgtgccaaagtcgggggagggcttcatcgacttcattggccaagtgcataagactaaggagcagtttggccaggacggccccatctctgtccactgcagtgccggcgtgggcaggacgggcgtcttcatcacgcttagcatcgtgctggagcggatgcggtatgaaggcgtggtggacatctttcagacggtgaagatgctacgaacccagcggccggccatggtgcagacagaggatgagtaccagttctgttaccaggcggcactggagtacctcggaagctttgaccactatgcaacctaaagccatggttccccccaggcccgacaccactggccccggatgcctctgcccctcccgggcggacctcctgaggcctggacccccagtgggcagggcaggaggtggcagcggcagcagctgtgtttctgcaccatttccgaggacgacgcagcccctcgagcccccccaccggccccggccgccccagcgacctccctggcaccggccgccgccttcaaatacttggcacattcctcctttccttccaattccaaaaccagattccggggtggggggtggggggatggtgagcaaataggagtgctccccagaaccagaggagggtggggcacagaccatagacggacccctcgtcctcccccagcggtggtagggggacccggggggctcctccccgctctgcagcctggggacactgggctgggaccagaatccagctttcttttaaaactctcagtgtaactgtatcccgtgacatttcattttttttaaatagtgtatttttttttccatttttttttttaagagaaacaaacaaaagactcgccagtcaatgactttcaaagagaactaactttggcttattcatattctgttcaaagacagtctattttttcactgtagaaagcgtccttgtgtgatagttacgttcgcaaacgcgcacgccaggcccatggctgtaccttggcttttttttttttttttttttttttaatttttcctaccatcagaaagtgtgctttgctcacagaagaatgggatgtccttttttctttcttggctttttttttccccctttttgtttcatttttataaattaaattttcagacatatcaaatacagttctgagggtaaggtcatgggggagctcggacccagtggcgttgggtgcggttgagggggacgctgctgtaagaggagagagatgacagtggtcctcctctgagagcctgagctgtctccccgtctcccgcccccaaggagacagagaggatcctacttcttcggggacagtggctgtatggctgtgctgccccacatcagggaccctttccccctgggactgtggggcagtttgggagcaaaaccagaaggacaggcccccctctacccgcctaccctgagcaagcgagttgttcctctttgtacaagggcaggtctgcggttactttcaacactgtttattccagcggaagcagccgggtggttttcccacccccgtgtatgtagatatatcgactttgtattaaaggaagatcgtctga

SEQ ID NO: 171915 - DNA, 6018 bp, Homo sapiens
  Payload ID: 13776
  Gene Symbol: PTPRS
  Gene Name: protein tyrosine phosphatase, receptor type, S
  ENST ID: ENST00000353284
  CDS Start-End: 235-4752
cctcgcgccgcccgcccggcagcccggccggcgcgcgcacgccgcgagccgctggcgctcgggctccgctcggatcccatgcaacagccacgatgtgaagcggggcagagccgggggagcccagcccagccagcctccagacgttgccccatctgacgctcggctcgaggcctctctgtgagggaccggggggccatccccctccagggcggagatcggaggtcgctgccaagcatggcgcccacctggggccctggcatggtgtctgtggttggtcccatgggcctccttgtggtcctgctcgttggaggctgtgcagcagaagagccccccaggtttatcaaagaacccaaggaccagatcggcgtgtcggggggtgtggcctctttcgtgtgtcaggccacgggtgaccccaagccacgagtgacctggaacaagaagggcaagaaggtcaactctcagcgctttgagacgattgagtttgatgagagtgcaggggcagtgctgaggatccagccgctgaggacaccgcgggatgaaaacgtgtacgagtgtgtggcccagaactcggttggggagatcacagtccatgccaagcttactgtcctccgagaggaccagctgccctctggcttccccaacatcgacatgggcccacagttgaaggtggtggagcggacacggacagccaccatgctctgtgcagccagcggcaaccctgaccctgagatcacctggttcaaggacttcctgcctgtggatcctagtgccagcaatggacgcatcaaacagctgcgatcaggagccctgcagattgaaagcagtgaggaaaccgaccagggcaaatatgagtgtgtggccaccaacagcgccggcgtgcgctactcctcacctgccaacctctacgtgcgagagcttcgagaagtccgccgcgtggccccgcgcttctccatcctgcccatgagccacgagatcatgccagggggcaacgtgaacatcacctgcgtggccgtgggctcgcccatgccatacgtgaagtggatgcagggggccgaggacctgacccccgaggatgacatgcccgtgggtcggaacgtgctggaactcacagatgtcaaggactcggccaactacacctgcgtggccatgtccagcctgggcgtcattgaggcggttgctcagatcacggtgaaatctctccccaaagctcccgggactcccatggtgactgagaacacagccaccagcatcaccatcacgtgggactcgggcaacccagatcctgtgtcctattacgtcatcgaatataaatccaagagccaagacgggccgtatcagattaaagaggacatcaccaccacacgttacagcatcggcggcctgagccccaactcggagtacgagatctgggtgtcggccgtcaactccatcggccaggggccccccagcgagtccgtggtcacccgcacaggcgagcaggccccggccagcgcgccgcggaacgtgcaagcccggatgctcagcgcgaccaccatgattgtgcagtgggaggagccggtggagcccaacggcctgatccgcggctaccgcgtctactacaccatggaaccggagcaccccgtgggcaactggcagaagcacaacgtggacgacagcctgctgaccaccgtgggcagcctgctggaggacgagacctacaccgtgcgggtgctcgccttcacctccgtcggcgacgggcccctctcggaccccatccaggtcaagacgcagcagggagtgccgggccagcccatgaacctgcgggccgaggccaggtcggagaccagcatcacgctgtcctggagccccccgcggcaggagagtatcatcaagtacgagctcctcttccgggaaggcgaccatggccgggaggtgggaaggaccttcgacccgacgacttcctacgtggtggaggacctgaagcccaacacggagtacgccttccgcctggcggcccgctcgccgcagggcctgggcgccttcacccccgtggtgcggcagcgcacgctgcagtccatctcgcccaagaacttcaaggtgaaaatgatcatgaagacatcagttctgctcagctgggagttccctgacaactacaactcacccacaccctacaagatccagtacaatgggctcacactggatgtggatggccgtaccaccaagaagctcatcacgcacctcaagccccacaccttctacaactttgtgctgaccaatcgcggcagcagcctgggcggcctccagcagacggtcaccgcctggactgccttcaacctgctcaacggcaagcccagcgtcgcccccaagcctgatgctgacggcttcatcatggtgtatcttcctgacggccagagccccgtgcctgtccagagctatttcattgtgatggtgccactgcgcaagtctcgtggaggccaattcctgaccccgctgggtagcccagaggacatggatctggaagagctcatccaggacatctcacggctacagaggcgcagcctgcggcactcgcgtcagctggaggtgccccggccctatattgcagctcgcttctctgtgctgccacccacgttccatcccggcgaccagaagcagtatggcggcttcgataaccggggcctggagcccggccaccgctatgtcctcttcgtgcttgccgtgcttcagaagagcgagcctacctttgcagccagtcccttctcagaccccttccagctggataacccggacccccagcccatcgtggatggcgaggaggggcttatctgggtgatcgggcctgtgctggccgtggtcttcataatctgcattgtcattgctatcctgctctacaagaacaaacccgacagtaaacgcaaggactcagaaccccgcaccaaatgcctcctgaacaatgccgacctcgcccctcaccaccccaaggaccctgtggaaatgagacgcattaacttccagactccaggcatgcttagccacccgccaattcccatcgcagacatggcggagcacacggagcggctcaaggccaacgacagcctcaagctctcccaggagtatgagtccatcgaccctggacagcagttcacatgggaacattccaacctggaagtgaacaagccgaagaaccgctatgccaacgtcatcgcctatgaccactcccgtgtcatcctccagcccattgaaggcatcatgggcagtgattacatcaatgccaactacgtggacggctaccggtgtcagaacgcgtacattgccacgcaggggccgctgcctgagacctttggggacttctggcgtatggtgtgggagcagcggtcggcgaccatcgtcatgatgacgcggctggaggagaagtcacggatcaagtgtgatcagtattggcccaacagaggcacggagacctacggcttcatccaggtcacgttgctagataccatcgagctggccacattctgcgtcaggacattctctctgcacaagaatggctccagtgagaaacgcgaggtccgccagttccagtttacggcgtggccggaccatggcgtgcccgaatacccaacgcccttcctggctttcctgcggagagtcaagacctgcaacccgccagatgccggccccatcgtggttcactgcagtgccggtgtgggccgcacaggctgctttatcgtcatcgacgccatgcttgagcggatcaagccagagaagacagtcgatgtctatggccacgtgacgctcatgaggtcccagcgcaactacatggtgcagacggaggaccagtacagcttcatccacgaggccctgctggaggccgtgggctgtggcaacacagaagtgcccgcacgcagcctctatgcctacatccagaagctggcccaggtggagcctggcgaacacgtcactggcatggaactcgagttcaagcggctggctaactccaaggcccacacgtcacgcttcatcagtgccaatctgccttgtaacaagttcaagaaccgcctggtgaacatcatgccctatgagagcacacgggtctgtctgcaacccatccggggtgtggagggctctgactacatcaacgccagcttcattgatggctacaggcagcagaaggcctacatcgcgacacaggggccgctggcggagaccacggaagacttctggcgcatgctgtgggagaacaattcgacgatcgtggtgatgctgaccaagctgcgggagatgggccgggagaagtgtcaccagtactggccggccgagcgctctgcccgctaccagtactttgtggtagatccgatggcagaatacaacatgcctcagtatatcctgcgagagttcaaggtcacagatgcccgggatggccagtcccggactgtccggcagttccagttcacagactggccggaacagggtgtgccaaagtcgggggagggcttcatcgacttcattggccaagtgcataagactaaggagcagtttggccaggacggccccatctctgtccactgcagtgccggcgtgggcaggacgggcgtcttcatcacgcttagcatcgtgctggagcggatgcggtatgaaggcgtggtggacatctttcagacggtgaagatgctacgaacccagcggccggccatggtgcagacagaggatgagtaccagttctgttaccaggcggcactggagtacctcggaagctttgaccactatgcaacctaaagccatggttccccccaggcccgacaccactggccccggatgcctctgcccctcccgggcggacctcctgaggcctggacccccagtgggcagggcaggaggtggcagcggcagcagctgtgtttctgcaccatttccgaggacgacgcagcccctcgagcccccccaccggccccggccgccccagcgacctccctggcaccggccgccgccttcaaatacttggcacattcctcctttccttccaattccaaaaccagattccggggtggggggtggggggatggtgagcaaataggagtgctccccagaaccagaggagggtggggcacagaccatagacggacccctcgtcctcccccagcggtggtagggggacccggggggctcctccccgctctgcagcctggggacactgggctgggaccagaatccagctttcttttaaaactctcagtgtaactgtatcccgtgacatttcattttttttaaatagtgtatttttttttccatttttttttttaagagaaacaaacaaaagactcgccagtcaatgactttcaaagagaactaactttggcttattcatattctgttcaaagacagtctattttttcactgtagaaagcgtccttgtgtgatagttacgttcgcaaacgcgcacgccaggcccatggctgtaccttggcttttttttttttttttttttttttaatttttcctaccatcagaaagtgtgctttgctcacagaagaatgggatgtccttttttctttcttggctttttttttccccctttttgtttcatttttataaattaaattttcagacatatcaaatacagttctgagggtaaggtcatgggggagctcggacccagtggcgttgggtgcggttgagggggacgctgctgtaagaggagagagatgacagtggtcctcctctgagagcctgagctgtctccccgtctcccgcccccaaggagacagagaggatcctacttcttcggggacagtggctgtatggctgtgctgccccacatcagggaccctttccccctgggactgtggggcagtttgggagcaaaaccagaaggacaggcccccctctacccgcctaccctgagcaagcgagttgttcctctttgtacaagggcaggtctgcggttactttcaacactgtttattccagcggaagcagccgggtggttttcccacccccgtgtatgtagatatatcgactttgtattaaaggaagatcgtctga

SEQ ID NO: 171916 - DNA, 7347 bp, Homo sapiens
  Payload ID: 13776
  Gene Symbol: PTPRS
  Gene Name: protein tyrosine phosphatase, receptor type, S
  Uniprot ID: Q13332
  ENST ID: ENST00000357368
  CDS Start-End: 235-6081
cctcgcgccgcccgcccggcagcccggccggcgcgcgcacgccgcgagccgctggcgctcgggctccgctcggatcccatgcaacagccacgatgtgaagcggggcagagccgggggagcccagcccagccagcctccagacgttgccccatctgacgctcggctcgaggcctctctgtgagggaccggggggccatccccctccagggcggagatcggaggtcgctgccaagcatggcgcccacctggggccctggcatggtgtctgtggttggtcccatgggcctccttgtggtcctgctcgttggaggctgtgcagcagaagagccccccaggtttatcaaagaacccaaggaccagatcggcgtgtcggggggtgtggcctctttcgtgtgtcaggccacgggtgaccccaagccacgagtgacctggaacaagaagggcaagaaggtcaactctcagcgctttgagacgattgagtttgatgagagtgcaggggcagtgctgaggatccagccgctgaggacaccgcgggatgaaaacgtgtacgagtgtgtggcccagaactcggttggggagatcacagtccatgccaagcttactgtcctccgagaggaccagctgccctctggcttccccaacatcgacatgggcccacagttgaaggtggtggagcggacacggacagccaccatgctctgtgcagccagcggcaaccctgaccctgagatcacctggttcaaggacttcctgcctgtggatcctagtgccagcaatggacgcatcaaacagctgcgatcagaaacctttgaaagcactccgattcgaggagccctgcagattgaaagcagtgaggaaaccgaccagggcaaatatgagtgtgtggccaccaacagcgccggcgtgcgctactcctcacctgccaacctctacgtgcgagagcttcgagaagtccgccgcgtggccccgcgcttctccatcctgcccatgagccacgagatcatgccagggggcaacgtgaacatcacctgcgtggccgtgggctcgcccatgccatacgtgaagtggatgcagggggccgaggacctgacccccgaggatgacatgcccgtgggtcggaacgtgctggaactcacagatgtcaaggactcggccaactacacctgcgtggccatgtccagcctgggcgtcattgaggcggttgctcagatcacggtgaaatctctccccaaagctcccgggactcccatggtgactgagaacacagccaccagcatcaccatcacgtgggactcgggcaacccagatcctgtgtcctattacgtcatcgaatataaatccaagagccaagacgggccgtatcagattaaagaggacatcaccaccacacgttacagcatcggcggcctgagccccaactcggagtacgagatctgggtgtcggccgtcaactccatcggccaggggccccccagcgagtccgtggtcacccgcacaggcgagcaggccccggccagcgcgccgcggaacgtgcaagcccggatgctcagcgcgaccaccatgattgtgcagtgggaggagccggtggagcccaacggcctgatccgcggctaccgcgtctactacaccatggaaccggagcaccccgtgggcaactggcagaagcacaacgtggacgacagcctgctgaccaccgtgggcagcctgctggaggacgagacctacaccgtgcgggtgctcgccttcacctccgtcggcgacgggcccctctcggaccccatccaggtcaagacgcagcagggagtgccgggccagcccatgaacctgcgggccgaggccaggtcggagaccagcatcacgctgtcctggagccccccgcggcaggagagtatcatcaagtacgagctcctcttccgggaaggcgaccatggccgggaggtgggaaggaccttcgacccgacgacttcctacgtggtggaggacctgaagcccaacacggagtacgccttccgcctggcggcccgctcgccgcagggcctgggcgccttcacccccgtggtgcggcagcgcacgctgcagtccaaaccgtcagccccccctcaagacgttaaatgtgtcagcgtgcgctccacggccattttggtaagttggcgcccgccgccgccggaaacgcacaacggggccctggtgggctacagcgtccgctaccgaccgctgggctcagaggacccggaacccaaggaggtgaacggcatccccccgaccaccactcagatcctgctggaggccttggagaagtggacccagtaccgcatcacgactgtcgctcacacagaggtgggaccagggcccgagagctcgcccgtggtcgtccgcaccgacgaggatgtgcccagcgcgccgccgcggaaggtggaggcggaggcgctcaacgccacggccatccgcgtgctgtggcgctcgcccgcgcccggccggcagcacggccagatccgcggctaccaggtccactacgtgcgcatggagggcgccgaggcccgcgggccgccgcgcatcaaggacgtcatgctggccgatgcccagtgggagacggatgacacggccgaatatgagatggtcatcacaaacttgcagcctgagaccgcgtactccatcacggtagccgcctacaccatgaagggcgatggcgctcgcagcaaacccaaggtggttgtgaccaagggagcagtgctgggccgcccaaccctgtcggtgcagcagacccccgagggcagcctgctggcacgctgggagcccccggctggcaccgcggaggaccaggtgctgggctaccgcctgcagtttggccgtgaggactcgacgcccctggccaccctggagttcccgccctccgaggaccgctacacggcatcaggcgtgcacaagggggccacgtatgtgttccggcttgcggcccggagccgcggcggcctgggcgaggaggcagccgaggtcctgagcatcccggaggacacgccccgtggccacccgcagattctggaggcggccggcaacgcctcggccgggaccgtccttctccgctggctgccacccgtgcccgccgagcgcaacggggccatcgtcaaatacacggtggccgtgcgggaggccggtgccctgggccctgcccgagagactgagctgccggcagcggctgagccgggcgcggagaacgcgctcacgctgcagggcctgaagcccgacacggcctatgacctccaagtgcgagcccacacgcgccggggccctggccccttcagcccccccgtccgctaccggacgttcctgcgggaccaagtctcgcccaagaacttcaaggtgaaaatgatcatgaagacatcagttctgctcagctgggagttccctgacaactacaactcacccacaccctacaagatccagtacaatgggctcacactggatgtggatggccgtaccaccaagaagctcatcacgcacctcaagccccacaccttctacaactttgtgctgaccaatcgcggcagcagcctgggcggcctccagcagacggtcaccgcctggactgccttcaacctgctcaacggcaagcccagcgtcgcccccaagcctgatgctgacggcttcatcatggtgtatcttcctgacggccagagccccgtgcctgtccagagctatttcattgtgatggtgccactgcgcaagtctcgtggaggccaattcctgaccccgctgggtagcccagaggacatggatctggaagagctcatccaggacatctcacggctacagaggcgcagcctgcggcactcgcgtcagctggaggtgccccggccctatattgcagctcgcttctctgtgctgccacccacgttccatcccggcgaccagaagcagtatggcggcttcgataaccggggcctggagcccggccaccgctatgtcctcttcgtgcttgccgtgcttcagaagagcgagcctacctttgcagccagtcccttctcagaccccttccagctggataacccggacccccagcccatcgtggatggcgaggaggggcttatctgggtgatcgggcctgtgctggccgtggtcttcataatctgcattgtcattgctatcctgctctacaagaacaaacccgacagtaaacgcaaggactcagaaccccgcaccaaatgcctcctgaacaatgccgacctcgcccctcaccaccccaaggaccctgtggaaatgagacgcattaacttccagactccagattcaggcctcaggagccccctcagggagccggggtttcactttgaaagcatgcttagccacccgccaattcccatcgcagacatggcggagcacacggagcggctcaaggccaacgacagcctcaagctctcccaggagtatgagtccatcgaccctggacagcagttcacatgggaacattccaacctggaagtgaacaagccgaagaaccgctatgccaacgtcatcgcctatgaccactcccgtgtcatcctccagcccattgaaggcatcatgggcagtgattacatcaatgccaactacgtggacggctaccggtgtcagaacgcgtacattgccacgcaggggccgctgcctgagacctttggggacttctggcgtatggtgtgggagcagcggtcggcgaccatcgtcatgatgacgcggctggaggagaagtcacggatcaagtgtgatcagtattggcccaacagaggcacggagacctacggcttcatccaggtcacgttgctagataccatcgagctggccacattctgcgtcaggacattctctctgcacaagaatggctccagtgagaaacgcgaggtccgccagttccagtttacggcgtggccggaccatggcgtgcccgaatacccaacgcccttcctggctttcctgcggagagtcaagacctgcaacccgccagatgccggccccatcgtggttcactgcagtgccggtgtgggccgcacaggctgctttatcgtcatcgacgccatgcttgagcggatcaagccagagaagacagtcgatgtctatggccacgtgacgctcatgaggtcccagcgcaactacatggtgcagacggaggaccagtacagcttcatccacgaggccctgctggaggccgtgggctgtggcaacacagaagtgcccgcacgcagcctctatgcctacatccagaagctggcccaggtggagcctggcgaacacgtcactggcatggaactcgagttcaagcggctggctaactccaaggcccacacgtcacgcttcatcagtgccaatctgccttgtaacaagttcaagaaccgcctggtgaacatcatgccctatgagagcacacgggtctgtctgcaacccatccggggtgtggagggctctgactacatcaacgccagcttcattgatggctacaggcagcagaaggcctacatcgcgacacaggggccgctggcggagaccacggaagacttctggcgcatgctgtgggagaacaattcgacgatcgtggtgatgctgaccaagctgcgggagatgggccgggagaagtgtcaccagtactggccggccgagcgctctgcccgctaccagtactttgtggtagatccgatggcagaatacaacatgcctcagtatatcctgcgagagttcaaggtcacagatgcccgggatggccagtcccggactgtccggcagttccagttcacagactggccggaacagggtgtgccaaagtcgggggagggcttcatcgacttcattggccaagtgcataagactaaggagcagtttggccaggacggccccatctctgtccactgcagtgccggcgtgggcaggacgggcgtcttcatcacgcttagcatcgtgctggagcggatgcggtatgaaggcgtggtggacatctttcagacggtgaagatgctacgaacccagcggccggccatggtgcagacagaggatgagtaccagttctgttaccaggcggcactggagtacctcggaagctttgaccactatgcaacctaaagccatggttccccccaggcccgacaccactggccccggatgcctctgcccctcccgggcggacctcctgaggcctggacccccagtgggcagggcaggaggtggcagcggcagcagctgtgtttctgcaccatttccgaggacgacgcagcccctcgagcccccccaccggccccggccgccccagcgacctccctggcaccggccgccgccttcaaatacttggcacattcctcctttccttccaattccaaaaccagattccggggtggggggtggggggatggtgagcaaataggagtgctccccagaaccagaggagggtggggcacagaccatagacggacccctcgtcctcccccagcggtggtagggggacccggggggctcctccccgctctgcagcctggggacactgggctgggaccagaatccagctttcttttaaaactctcagtgtaactgtatcccgtgacatttcattttttttaaatagtgtatttttttttccatttttttttttaagagaaacaaacaaaagactcgccagtcaatgactttcaaagagaactaactttggcttattcatattctgttcaaagacagtctattttttcactgtagaaagcgtccttgtgtgatagttacgttcgcaaacgcgcacgccaggcccatggctgtaccttggcttttttttttttttttttttttttaatttttcctaccatcagaaagtgtgctttgctcacagaagaatgggatgtccttttttctttcttggctttttttttccccctttttgtttcatttttataaattaaattttcagacatatcaaatacagttctgagggtaaggtcatgggggagctcggacccagtggcgttgggtgcggttgagggggacgctgctgtaagaggagagagatgacagtggtcctcctctgagagcctgagctgtctccccgtctcccgcccccaaggagacagagaggatcctacttcttcggggacagtggctgtatggctgtgctgccccacatcagggaccctttccccctgggactgtggggcagtttgggagcaaaaccagaaggacaggcccccctctacccgcctaccctgagcaagcgagttgttcctctttgtacaagggcaggtctgcggttactttcaacactgtttattccagcggaagcagccgggtggttttcccacccccgtgtatgtagatatatcgactttgtattaaaggaagatcgtctga

SEQ ID NO: 171917 - DNA, 893 bp, Homo sapiens
  Payload ID: 13776
  Gene Symbol: PTPRS
  Gene Name: protein tyrosine phosphatase, receptor type, S
  ENST ID: ENST00000590509
  CDS Start-End: 249-635
attccatcccatcaccccatgatccttccccattgtcccatgaccagcccccgcaggaccctcccctgctccatgtgaccctccctctgcctcctccatgaaggtctcctggatttccccactcgcctctcacagccctccattgtctctgcagacgttgccccatctgacgctcggctcgaggcctctctgtgagggaccggggggccatccccctccagggcggagatcggaggtcgctgccaagcatggcgcccacctggggccctggcatggtgtctgtggttggtcccatgggcctccttgtggtcctgctcgttggaggctgtgcagcagaagagccccccaggtttatcaaagaacccaaggaccagatcggcgtgtcggggggtgtggcctctttcgtgtgtcaggccacgggtgaccccaagccacgagtgacctggaacaagaagggcaagaaggtcaactctcagcgctttgagacgattgagtttgatgagagtgcaggggcagtgctgaggatccagccgctgaggacaccgcgggatgaaaacgtgtacgagtgtgtggcccagaactcggttggggagatcacagtccatgccaagcttactgtcctccgaggaccttgatctcccttatccaaccagtaacagtctcagggcccagcgcctactggtggggatttattgtgcctttgcaagaaagaaaggaattgagagactagaatcatcctaatttataatcttcatcatgtgcttctgatgacaaaaggctgatccaactcagatgggttcaagcgagaaaggtaattgatgtgcagaattaaaattccatggagtggctggcttcaggttcagctggatccaggggctcattgaattttctca

SEQ ID NO: 171918 - DNA, 5993 bp, Homo sapiens
  Payload ID: 13776
  Gene Symbol: PTPRS
  Gene Name: protein tyrosine phosphatase, receptor type, S
  Uniprot ID: Q13332
  ENST ID: ENST00000588012
  CDS Start-End: 24-5756
gagatcggaggtcgctgccaagcatggcgcccacctggggccctggcatggtgtctgtggttggtcccatgggcctccttgtggtcctgctcgttggaggctgtgcagcagaagagccccccaggtttatcaaagaacccaaggaccagatcggcgtgtcggggggtgtggcctctttcgtgtgtcaggccacgggtgaccccaagccacgagtgacctggaacaagaagggcaagaaggtcaactctcagcgctttgagacgattgagtttgatgagagtgcaggggcagtgctgaggatccagccgctgaggacaccgcgggatgaaaacgtgtacgagtgtgtggcccagaactcggttggggagatcacagtccatgccaagcttactgtcctccgagaggaccagctgccctctggcttccccaacatcgacatgggcccacagttgaaggtggtggagcggacacggacagccaccatgctctgtgcagccagcggcaaccctgaccctgagatcacctggttcaaggacttcctgcctgtggatcctagtgccagcaatggacgcatcaaacagctgcgatcaggagccctgcagattgaaagcagtgaggaaaccgaccagggcaaatatgagtgtgtggccaccaacagcgccggcgtgcgctactcctcacctgccaacctctacgtgcgagtccgccgcgtggccccgcgcttctccatcctgcccatgagccacgagatcatgccagggggcaacgtgaacatcacctgcgtggccgtgggctcgcccatgccatacgtgaagtggatgcagggggccgaggacctgacccccgaggatgacatgcccgtgggtcggaacgtgctggaactcacagatgtcaaggactcggccaactacacctgcgtggccatgtccagcctgggcgtcattgaggcggttgctcagatcacggtgaaatctctccccaaagctcccgggactcccatggtgactgagaacacagccaccagcatcaccatcacgtgggactcgggcaacccagatcctgtgtcctattacgtcatcgaatataaatccaagagccaagacgggccgtatcagattaaagaggacatcaccaccacacgttacagcatcggcggcctgagccccaactcggagtacgagatctgggtgtcggccgtcaactccatcggccaggggccccccagcgagtccgtggtcacccgcacaggcgagcaggccccggccagcgcgccgcggaacgtgcaagcccggatgctcagcgcgaccaccatgattgtgcagtgggaggagccggtggagcccaacggcctgatccgcggctaccgcgtctactacaccatggaaccggagcaccccgtgggcaactggcagaagcacaacgtggacgacagcctgctgaccaccgtgggcagcctgctggaggacgagacctacaccgtgcgggtgctcgccttcacctccgtcggcgacgggcccctctcggaccccatccaggtcaagacgcagcagggagtgccgggccagcccatgaacctgcgggccgaggccaggtcggagaccagcatcacgctgtcctggagccccccgcggcaggagagtatcatcaagtacgagctcctcttccgggaaggcgaccatggccgggaggtgggaaggaccttcgacccgacgacttcctacgtggtggaggacctgaagcccaacacggagtacgccttccgcctggcggcccgctcgccgcagggcctgggcgccttcacccccgtggtgcggcagcgcacgctgcagtccaaaccgtcagccccccctcaagacgttaaatgtgtcagcgtgcgctccacggccattttggtaagttggcgcccgccgccgccggaaacgcacaacggggccctggtgggctacagcgtccgctaccgaccgctgggctcagaggacccggaacccaaggaggtgaacggcatccccccgaccaccactcagatcctgctggaggccttggagaagtggacccagtaccgcatcacgactgtcgctcacacagaggtgggaccagggcccgagagctcgcccgtggtcgtccgcaccgacgaggatgtgcccagcgcgccgccgcggaaggtggaggcggaggcgctcaacgccacggccatccgcgtgctgtggcgctcgcccgcgcccggccggcagcacggccagatccgcggctaccaggtccactacgtgcgcatggagggcgccgaggcccgcgggccgccgcgcatcaaggacgtcatgctggccgatgcccaggagatggtcatcacaaacttgcagcctgagaccgcgtactccatcacggtagccgcctacaccatgaagggcgatggcgctcgcagcaaacccaaggtggttgtgaccaagggagcagtgctgggccgcccaaccctgtcggtgcagcagacccccgagggcagcctgctggcacgctgggagcccccggctggcaccgcggaggaccaggtgctgggctaccgcctgcagtttggccgtgaggactcgacgcccctggccaccctggagttcccgccctccgaggaccgctacacggcatcaggcgtgcacaagggggccacgtatgtgttccggcttgcggcccggagccgcggcggcctgggcgaggaggcagccgaggtcctgagcatcccggaggacacgccccgtggccacccgcagattctggaggcggccggcaacgcctcggccgggaccgtccttctccgctggctgccacccgtgcccgccgagcgcaacggggccatcgtcaaatacacggtggccgtgcgggaggccggtgccctgggccctgcccgagagactgagctgccggcagcggctgagccgggcgcggagaacgcgctcacgctgcagggcctgaagcccgacacggcctatgacctccaagtgcgagcccacacgcgccggggccctggccccttcagcccccccgtccgctaccggacgttcctgcgggaccaagtctcgcccaagaacttcaaggtgaaaatgatcatgaagacatcagttctgctcagctgggagttccctgacaactacaactcacccacaccctacaagatccagtacaatgggctcacactggatgtggatggccgtaccaccaagaagctcatcacgcacctcaagccccacaccttctacaactttgtgctgaccaatcgcggcagcagcctgggcggcctccagcagacggtcaccgcctggactgccttcaacctgctcaacggcaagcccagcgtcgcccccaagcctgatgctgacggcttcatcatggtgtatcttcctgacggccagagccccgtgcctgtccagagctatttcattgtgatggtgccactgcgcaagtctcgtggaggccaattcctgaccccgctgggtagcccagaggacatggatctggaagagctcatccaggacatctcacggctacagaggcgcagcctgcggcactcgcgtcagctggaggtgccccggccctatattgcagctcgcttctctgtgctgccacccacgttccatcccggcgaccagaagcagtatggcggcttcgataaccggggcctggagcccggccaccgctatgtcctcttcgtgcttgccgtgcttcagaagagcgagcctacctttgcagccagtcccttctcagaccccttccagctggataacccggacccccagcccatcgtggatggcgaggaggggcttatctgggtgatcgggcctgtgctggccgtggtcttcataatctgcattgtcattgctatcctgctctacaagaacaaacccgacagtaaacgcaaggactcagaaccccgcaccaaatgcctcctgaacaatgccgacctcgcccctcaccaccccaaggaccctgtggaaatgagacgcattaacttccagactccaggcatgcttagccacccgccaattcccatcgcagacatggcggagcacacggagcggctcaaggccaacgacagcctcaagctctcccaggagtatgagtccatcgaccctggacagcagttcacatgggaacattccaacctggaagtgaacaagccgaagaaccgctatgccaacgtcatcgcctatgaccactcccgtgtcatcctccagcccattgaaggcatcatgggcagtgattacatcaatgccaactacgtggacggctaccggtgtcagaacgcgtacattgccacgcaggggccgctgcctgagacctttggggacttctggcgtatggtgtgggagcagcggtcggcgaccatcgtcatgatgacgcggctggaggagaagtcacggatcaagtgtgatcagtattggcccaacagaggcacggagacctacggcttcatccaggtcacgttgctagataccatcgagctggccacattctgcgtcaggacattctctctgcacaagaatggctccagtgagaaacgcgaggtccgccagttccagtttacggcgtggccggaccatggcgtgcccgaatacccaacgcccttcctggctttcctgcggagagtcaagacctgcaacccgccagatgccggccccatcgtggttcactgcagtgccggtgtgggccgcacaggctgctttatcgtcatcgacgccatgcttgagcggatcaagccagagaagacagtcgatgtctatggccacgtgacgctcatgaggtcccagcgcaactacatggtgcagacggaggaccagtacagcttcatccacgaggccctgctggaggccgtgggctgtggcaacacagaagtgcccgcacgcagcctctatgcctacatccagaagctggcccaggtggagcctggcgaacacgtcactggcatggaactcgagttcaagcggctggctaactccaaggcccacacgtcacgcttcatcagtgccaatctgccttgtaacaagttcaagaaccgcctggtgaacatcatgccctatgagagcacacgggtctgtctgcaacccatccggggtgtggagggctctgactacatcaacgccagcttcattgatggctacaggcagcagaaggcctacatcgcgacacaggggccgctggcggagaccacggaagacttctggcgcatgctgtgggagaacaattcgacgatcgtggtgatgctgaccaagctgcgggagatgggccgggagaagtgtcaccagtactggccggccgagcgctctgcccgctaccagtactttgtggtagatccgatggcagaatacaacatgcctcagtatatcctgcgagagttcaaggtcacagatgcccgggatggccagtcccggactgtccggcagttccagttcacagactggccggaacagggtgtgccaaagtcgggggagggcttcatcgacttcattggccaagtgcataagactaaggagcagtttggccaggacggccccatctctgtccactgcagtgccggcgtgggcaggacgggcgtcttcatcacgcttagcatcgtgctggagcggatgcggtatgaaggcgtggtggacatctttcagacggtgaagatgctacgaacccagcggccggccatggtgcagacagaggatgagtaccagttctgttaccaggcggcactggagtacctcggaagctttgaccactatgcaacctaaagccatggttccccccaggcccgacaccactggccccggatgcctctgcccctcccgggcggacctcctgaggcctggacccccagtgggcagggcaggaggtggcagcggcagcagctgtgtttctgcaccatttccgaggacgacgcagcccctcgagcccccccaccggccccggccgccccagcgacctccctggcaccggccgccgccttcaaatacttggcacattcctcc

SEQ ID NO: 171919 - DNA, 4766 bp, Homo sapiens
  Payload ID: 13776
  Gene Symbol: PTPRS
  Gene Name: protein tyrosine phosphatase, receptor type, S
  Uniprot ID: Q13332
  ENST ID: ENST00000592099
  CDS Start-End: 24-4529
gagatcggaggtcgctgccaagcatggcgcccacctggggccctggcatggtgtctgtggttggtcccatgggcctccttgtggtcctgctcgttggaggctgtgcagcagaagagccccccaggtttatcaaagaacccaaggaccagatcggcgtgtcggggggtgtggcctctttcgtgtgtcaggccacgggtgaccccaagccacgagtgacctggaacaagaagggcaagaaggtcaactctcagcgctttgagacgattgagtttgatgagagtgcaggggcagtgctgaggatccagccgctgaggacaccgcgggatgaaaacgtgtacgagtgtgtggcccagaactcggttggggagatcacagtccatgccaagcttactgtcctccgagaggaccagctgccctctggcttccccaacatcgacatgggcccacagttgaaggtggtggagcggacacggacagccaccatgctctgtgcagccagcggcaaccctgaccctgagatcacctggttcaaggacttcctgcctgtggatcctagtgccagcaatggacgcatcaaacagctgcgatcaggagccctgcagattgaaagcagtgaggaaaccgaccagggcaaatatgagtgtgtggccaccaacagcgccggcgtgcgctactcctcacctgccaacctctacgtgcgagtccgccgcgtggccccgcgcttctccatcctgcccatgagccacgagatcatgccagggggcaacgtgaacatcacctgcgtggccgtgggctcgcccatgccatacgtgaagtggatgcagggggccgaggacctgacccccgaggatgacatgcccgtgggtcggaacgtgctggaactcacagatgtcaaggactcggccaactacacctgcgtggccatgtccagcctgggcgtcattgaggcggttgctcagatcacggtgaaatctctccccaaagctcccgggactcccatggtgactgagaacacagccaccagcatcaccatcacgtgggactcgggcaacccagatcctgtgtcctattacgtcatcgaatataaatccaagagccaagacgggccgtatcagattaaagaggacatcaccaccacacgttacagcatcggcggcctgagccccaactcggagtacgagatctgggtgtcggccgtcaactccatcggccaggggccccccagcgagtccgtggtcacccgcacaggcgagcaggccccggccagcgcgccgcggaacgtgcaagcccggatgctcagcgcgaccaccatgattgtgcagtgggaggagccggtggagcccaacggcctgatccgcggctaccgcgtctactacaccatggaaccggagcaccccgtgggcaactggcagaagcacaacgtggacgacagcctgctgaccaccgtgggcagcctgctggaggacgagacctacaccgtgcgggtgctcgccttcacctccgtcggcgacgggcccctctcggaccccatccaggtcaagacgcagcagggagtgccgggccagcccatgaacctgcgggccgaggccaggtcggagaccagcatcacgctgtcctggagccccccgcggcaggagagtatcatcaagtacgagctcctcttccgggaaggcgaccatggccgggaggtgggaaggaccttcgacccgacgacttcctacgtggtggaggacctgaagcccaacacggagtacgccttccgcctggcggcccgctcgccgcagggcctgggcgccttcacccccgtggtgcggcagcgcacgctgcagtccatctcgcccaagaacttcaaggtgaaaatgatcatgaagacatcagttctgctcagctgggagttccctgacaactacaactcacccacaccctacaagatccagtacaatgggctcacactggatgtggatggccgtaccaccaagaagctcatcacgcacctcaagccccacaccttctacaactttgtgctgaccaatcgcggcagcagcctgggcggcctccagcagacggtcaccgcctggactgccttcaacctgctcaacggcaagcccagcgtcgcccccaagcctgatgctgacggcttcatcatggtgtatcttcctgacggccagagccccgtgcctgtccagagctatttcattgtgatggtgccactgcgcaagtctcgtggaggccaattcctgaccccgctgggtagcccagaggacatggatctggaagagctcatccaggacatctcacggctacagaggcgcagcctgcggcactcgcgtcagctggaggtgccccggccctatattgcagctcgcttctctgtgctgccacccacgttccatcccggcgaccagaagcagtatggcggcttcgataaccggggcctggagcccggccaccgctatgtcctcttcgtgcttgccgtgcttcagaagagcgagcctacctttgcagccagtcccttctcagaccccttccagctggataacccggacccccagcccatcgtggatggcgaggaggggcttatctgggtgatcgggcctgtgctggccgtggtcttcataatctgcattgtcattgctatcctgctctacaagaacaaacccgacagtaaacgcaaggactcagaaccccgcaccaaatgcctcctgaacaatgccgacctcgcccctcaccaccccaaggaccctgtggaaatgagacgcattaacttccagactccaggcatgcttagccacccgccaattcccatcgcagacatggcggagcacacggagcggctcaaggccaacgacagcctcaagctctcccaggagtatgagtccatcgaccctggacagcagttcacatgggaacattccaacctggaagtgaacaagccgaagaaccgctatgccaacgtcatcgcctatgaccactcccgtgtcatcctccagcccattgaaggcatcatgggcagtgattacatcaatgccaactacgtggacggctaccggtgtcagaacgcgtacattgccacgcaggggccgctgcctgagacctttggggacttctggcgtatggtgtgggagcagcggtcggcgaccatcgtcatgatgacgcggctggaggagaagtcacggatcaagtgtgatcagtattggcccaacagaggcacggagacctacggcttcatccaggtcacgttgctagataccatcgagctggccacattctgcgtcaggacattctctctgcacaagaatggctccagtgagaaacgcgaggtccgccagttccagtttacggcgtggccggaccatggcgtgcccgaatacccaacgcccttcctggctttcctgcggagagtcaagacctgcaacccgccagatgccggccccatcgtggttcactgcagtgccggtgtgggccgcacaggctgctttatcgtcatcgacgccatgcttgagcggatcaagccagagaagacagtcgatgtctatggccacgtgacgctcatgaggtcccagcgcaactacatggtgcagacggaggaccagtacagcttcatccacgaggccctgctggaggccgtgggctgtggcaacacagaagtgcccgcacgcagcctctatgcctacatccagaagctggcccaggtggagcctggcgaacacgtcactggcatggaactcgagttcaagcggctggctaactccaaggcccacacgtcacgcttcatcagtgccaatctgccttgtaacaagttcaagaaccgcctggtgaacatcatgccctatgagagcacacgggtctgtctgcaacccatccggggtgtggagggctctgactacatcaacgccagcttcattgatggctacaggcagcagaaggcctacatcgcgacacaggggccgctggcggagaccacggaagacttctggcgcatgctgtgggagaacaattcgacgatcgtggtgatgctgaccaagctgcgggagatgggccgggagaagtgtcaccagtactggccggccgagcgctctgcccgctaccagtactttgtggtagatccgatggcagaatacaacatgcctcagtatatcctgcgagagttcaaggtcacagatgcccgggatggccagtcccggactgtccggcagttccagttcacagactggccggaacagggtgtgccaaagtcgggggagggcttcatcgacttcattggccaagtgcataagactaaggagcagtttggccaggacggccccatctctgtccactgcagtgccggcgtgggcaggacgggcgtcttcatcacgcttagcatcgtgctggagcggatgcggtatgaaggcgtggtggacatctttcagacggtgaagatgctacgaacccagcggccggccatggtgcagacagaggatgagtaccagttctgttaccaggcggcactggagtacctcggaagctttgaccactatgcaacctaaagccatggttccccccaggcccgacaccactggccccggatgcctctgcccctcccgggcggacctcctgaggcctggacccccagtgggcagggcaggaggtggcagcggcagcagctgtgtttctgcaccatttccgaggacgacgcagcccctcgagcccccccaccggccccggccgccccagcgacctccctggcaccggccgccgccttcaaatacttggcacattcctcc

SEQ ID NO: 171920 - DNA, 6353 bp, Homo sapiens
  Payload ID: 13776
  Gene Symbol: PTPRS
  Gene Name: protein tyrosine phosphatase, receptor type, S
  Uniprot ID: Q13332
  ENST ID: ENST00000587303
  CDS Start-End: 101-5947
ctgcagacgttgccccatctgacgctcggctcgaggcctctctgtgagggaccggggggccatccccctccagggcggagatcggaggtcgctgccaagcatggcgcccacctggggccctggcatggtgtctgtggttggtcccatgggcctccttgtggtcctgctcgttggaggctgtgcagcagaagagccccccaggtttatcaaagaacccaaggaccagatcggcgtgtcggggggtgtggcctctttcgtgtgtcaggccacgggtgaccccaagccacgagtgacctggaacaagaagggcaagaaggtcaactctcagcgctttgagacgattgagtttgatgagagtgcaggggcagtgctgaggatccagccgctgaggacaccgcgggatgaaaacgtgtacgagtgtgtggcccagaactcggttggggagatcacagtccatgccaagcttactgtcctccgagaggaccagctgccctctggcttccccaacatcgacatgggcccacagttgaaggtggtggagcggacacggacagccaccatgctctgtgcagccagcggcaaccctgaccctgagatcacctggttcaaggacttcctgcctgtggatcctagtgccagcaatggacgcatcaaacagctgcgatcagaaacctttgaaagcactccgattcgaggagccctgcagattgaaagcagtgaggaaaccgaccagggcaaatatgagtgtgtggccaccaacagcgccggcgtgcgctactcctcacctgccaacctctacgtgcgagagcttcgagaagtccgccgcgtggccccgcgcttctccatcctgcccatgagccacgagatcatgccagggggcaacgtgaacatcacctgcgtggccgtgggctcgcccatgccatacgtgaagtggatgcagggggccgaggacctgacccccgaggatgacatgcccgtgggtcggaacgtgctggaactcacagatgtcaaggactcggccaactacacctgcgtggccatgtccagcctgggcgtcattgaggcggttgctcagatcacggtgaaatctctccccaaagctcccgggactcccatggtgactgagaacacagccaccagcatcaccatcacgtgggactcgggcaacccagatcctgtgtcctattacgtcatcgaatataaatccaagagccaagacgggccgtatcagattaaagaggacatcaccaccacacgttacagcatcggcggcctgagccccaactcggagtacgagatctgggtgtcggccgtcaactccatcggccaggggccccccagcgagtccgtggtcacccgcacaggcgagcaggccccggccagcgcgccgcggaacgtgcaagcccggatgctcagcgcgaccaccatgattgtgcagtgggaggagccggtggagcccaacggcctgatccgcggctaccgcgtctactacaccatggaaccggagcaccccgtgggcaactggcagaagcacaacgtggacgacagcctgctgaccaccgtgggcagcctgctggaggacgagacctacaccgtgcgggtgctcgccttcacctccgtcggcgacgggcccctctcggaccccatccaggtcaagacgcagcagggagtgccgggccagcccatgaacctgcgggccgaggccaggtcggagaccagcatcacgctgtcctggagccccccgcggcaggagagtatcatcaagtacgagctcctcttccgggaaggcgaccatggccgggaggtgggaaggaccttcgacccgacgacttcctacgtggtggaggacctgaagcccaacacggagtacgccttccgcctggcggcccgctcgccgcagggcctgggcgccttcacccccgtggtgcggcagcgcacgctgcagtccaaaccgtcagccccccctcaagacgttaaatgtgtcagcgtgcgctccacggccattttggtaagttggcgcccgccgccgccggaaacgcacaacggggccctggtgggctacagcgtccgctaccgaccgctgggctcagaggacccggaacccaaggaggtgaacggcatccccccgaccaccactcagatcctgctggaggccttggagaagtggacccagtaccgcatcacgactgtcgctcacacagaggtgggaccagggcccgagagctcgcccgtggtcgtccgcaccgacgaggatgtgcccagcgcgccgccgcggaaggtggaggcggaggcgctcaacgccacggccatccgcgtgctgtggcgctcgcccgcgcccggccggcagcacggccagatccgcggctaccaggtccactacgtgcgcatggagggcgccgaggcccgcgggccgccgcgcatcaaggacgtcatgctggccgatgcccagtgggagacggatgacacggccgaatatgagatggtcatcacaaacttgcagcctgagaccgcgtactccatcacggtagccgcctacaccatgaagggcgatggcgctcgcagcaaacccaaggtggttgtgaccaagggagcagtgctgggccgcccaaccctgtcggtgcagcagacccccgagggcagcctgctggcacgctgggagcccccggctggcaccgcggaggaccaggtgctgggctaccgcctgcagtttggccgtgaggactcgacgcccctggccaccctggagttcccgccctccgaggaccgctacacggcatcaggcgtgcacaagggggccacgtatgtgttccggcttgcggcccggagccgcggcggcctgggcgaggaggcagccgaggtcctgagcatcccggaggacacgccccgtggccacccgcagattctggaggcggccggcaacgcctcggccgggaccgtccttctccgctggctgccacccgtgcccgccgagcgcaacggggccatcgtcaaatacacggtggccgtgcgggaggccggtgccctgggccctgcccgagagactgagctgccggcagcggctgagccgggcgcggagaacgcgctcacgctgcagggcctgaagcccgacacggcctatgacctccaagtgcgagcccacacgcgccggggccctggccccttcagcccccccgtccgctaccggacgttcctgcgggaccaagtctcgcccaagaacttcaaggtgaaaatgatcatgaagacatcagttctgctcagctgggagttccctgacaactacaactcacccacaccctacaagatccagtacaatgggctcacactggatgtggatggccgtaccaccaagaagctcatcacgcacctcaagccccacaccttctacaactttgtgctgaccaatcgcggcagcagcctgggcggcctccagcagacggtcaccgcctggactgccttcaacctgctcaacggcaagcccagcgtcgcccccaagcctgatgctgacggcttcatcatggtgtatcttcctgacggccagagccccgtgcctgtccagagctatttcattgtgatggtgccactgcgcaagtctcgtggaggccaattcctgaccccgctgggtagcccagaggacatggatctggaagagctcatccaggacatctcacggctacagaggcgcagcctgcggcactcgcgtcagctggaggtgccccggccctatattgcagctcgcttctctgtgctgccacccacgttccatcccggcgaccagaagcagtatggcggcttcgataaccggggcctggagcccggccaccgctatgtcctcttcgtgcttgccgtgcttcagaagagcgagcctacctttgcagccagtcccttctcagaccccttccagctggataacccggacccccagcccatcgtggatggcgaggaggggcttatctgggtgatcgggcctgtgctggccgtggtcttcataatctgcattgtcattgctatcctgctctacaagaacaaacccgacagtaaacgcaaggactcagaaccccgcaccaaatgcctcctgaacaatgccgacctcgcccctcaccaccccaaggaccctgtggaaatgagacgcattaacttccagactccagattcaggcctcaggagccccctcagggagccggggtttcactttgaaagcatgcttagccacccgccaattcccatcgcagacatggcggagcacacggagcggctcaaggccaacgacagcctcaagctctcccaggagtatgagtccatcgaccctggacagcagttcacatgggaacattccaacctggaagtgaacaagccgaagaaccgctatgccaacgtcatcgcctatgaccactcccgtgtcatcctccagcccattgaaggcatcatgggcagtgattacatcaatgccaactacgtggacggctaccggtgtcagaacgcgtacattgccacgcaggggccgctgcctgagacctttggggacttctggcgtatggtgtgggagcagcggtcggcgaccatcgtcatgatgacgcggctggaggagaagtcacggatcaagtgtgatcagtattggcccaacagaggcacggagacctacggcttcatccaggtcacgttgctagataccatcgagctggccacattctgcgtcaggacattctctctgcacaagaatggctccagtgagaaacgcgaggtccgccagttccagtttacggcgtggccggaccatggcgtgcccgaatacccaacgcccttcctggctttcctgcggagagtcaagacctgcaacccgccagatgccggccccatcgtggttcactgcagtgccggtgtgggccgcacaggctgctttatcgtcatcgacgccatgcttgagcggatcaagccagagaagacagtcgatgtctatggccacgtgacgctcatgaggtcccagcgcaactacatggtgcagacggaggaccagtacagcttcatccacgaggccctgctggaggccgtgggctgtggcaacacagaagtgcccgcacgcagcctctatgcctacatccagaagctggcccaggtggagcctggcgaacacgtcactggcatggaactcgagttcaagcggctggctaactccaaggcccacacgtcacgcttcatcagtgccaatctgccttgtaacaagttcaagaaccgcctggtgaacatcatgccctatgagagcacacgggtctgtctgcaacccatccggggtgtggagggctctgactacatcaacgccagcttcattgatggctacaggcagcagaaggcctacatcgcgacacaggggccgctggcggagaccacggaagacttctggcgcatgctgtgggagaacaattcgacgatcgtggtgatgctgaccaagctgcgggagatgggccgggagaagtgtcaccagtactggccggccgagcgctctgcccgctaccagtactttgtggtagatccgatggcagaatacaacatgcctcagtatatcctgcgagagttcaaggtcacagatgcccgggatggccagtcccggactgtccggcagttccagttcacagactggccggaacagggtgtgccaaagtcgggggagggcttcatcgacttcattggccaagtgcataagactaaggagcagtttggccaggacggccccatctctgtccactgcagtgccggcgtgggcaggacgggcgtcttcatcacgcttagcatcgtgctggagcggatgcggtatgaaggcgtggtggacatctttcagacggtgaagatgctacgaacccagcggccggccatggtgcagacagaggatgagtaccagttctgttaccaggcggcactggagtacctcggaagctttgaccactatgcaacctaaagccatggttccccccaggcccgacaccactggccccggatgcctctgcccctcccgggcggacctcctgaggcctggacccccagtgggcagggcaggaggtggcagcggcagcagctgtgtttctgcaccatttccgaggacgacgcagcccctcgagcccccccaccggccccggccgccccagcgacctccctggcaccggccgccgccttcaaatacttggcacattcctcctttccttccaattccaaaaccagattccggggtggggggtggggggatggtgagcaaataggagtgctccccagaaccagaggagggtggggcacagaccatagacggacccctcgtcctcccccagcggtggtagggggacccggggggctcctccccgctctgcagc

SEQ ID NO: 171921 - DNA, 388 bp, Homo sapiens
  Payload ID: 13776
  Gene Symbol: PTPRS
  Gene Name: protein tyrosine phosphatase, receptor type, S
  ENST ID: ENST00000586065
  CDS Start-End: 152-388
ctgtgactggggacttcgcagaaggcggaggaggcaacaggaccgcagagggggcagacgttgccccatctgacgctcggctcgaggcctctctgtgagggaccggggggccatccccctccagggcggagatcggaggtcgctgccaagcatggcgcccacctggggccctggcatggtgtctgtggttggtcccatgggcctccttgtggtcctgctcgttggaggctgtgcagcagaagagccccccaggtttatcaaagaacccaaggaccagatcggcgtgtcggggggtgtggcctctttcgtgtgtcaggccacgggtgaccccaagccacgagtgacctggaacaagaagggcaagaaggtcaactctcagcgctttgag

SEQ ID NO: 171922 - DNA, 478 bp, Homo sapiens
  Payload ID: 13776
  Gene Symbol: PTPRS
  Gene Name: protein tyrosine phosphatase, receptor type, S
  ENST ID: ENST00000591760
  CDS Start-End: 207-478
cccgagtcttcgctgcgcgccgcgctccgggcggaccgagggacgcggggagcggctgcggcgggccctgtggaggcctcgcggggcctgggcccgatctccgagccgcgggacgttgccccatctgacgctcggctcgaggcctctctgtgagggaccggggggccatccccctccagggcggagatcggaggtcgctgccaagcatggcgcccacctggggccctggcatggtgtctgtggttggtcccatgggcctccttgtggtcctgctcgttggaggctgtgcagcagaagagccccccaggtttatcaaagaacccaaggaccagatcggcgtgtcggggggtgtggcctctttcgtgtgtcaggccacgggtgaccccaagccacgagtgacctggaacaagaagggcaagaaggtcaactctcagcgctttgagacgattgagtttgatgagagtgcaggggcagtgct

SEQ ID NO: 171923 - DNA, 12480 bp, Homo sapiens
  Payload ID: 13777
  Gene Symbol: PTPRT
  Gene Name: protein tyrosine phosphatase, receptor type, T
  ENST ID: ENST00000356100
  CDS Start-End: 1-4353
atggcgagcctcgccgcgctcgccctcagcctgctcctgaggctgcagctgccgccactgcccggcgcccgggctcagagcgccgcaggtggctgttcctttgatgagcactacagcaactgtggttatagtgtggctctagggaccaatgggttcacctgggagcagattaacacatgggagaaaccaatgctggaccaggcagtgcccacaggatctttcatgatggtgaacagctctgggagagcctctggccagaaggcccaccttctcctgccaaccctgaaggagaatgacacccactgcatcgacttccattactacttctccagccgtgacaggtccagcccaggggccttgaacgtctacgtgaaggtgaatggtggcccccaagggaaccctgtgtggaatgtgtccggggtcgtcactgagggctgggtgaaggcagagctcgccatcagcactttctggccacatttctatcaggtgatatttgaatccgtctcattgaagggtcatcctggctacatcgccgtggacgaggtccgggtccttgctcatccatgcagaaaagcacctcattttctgcgactccaaaacgtggaggtgaatgtggggcagaatgccacatttcagtgcattgctggtgggaagtggtctcagcatgacaagctttggctccagcaatggaatggcagggacacggccctgatggtcacccgtgtggtcaaccacaggcgcttctcagccacagtcagtgtggcagacactgcccagcggagcgtcagcaagtaccgctgtgtgatccgctctgatggtgggtctggtgtgtccaactacgcggagctgatcgtgaaagagcctcccacgcccattgctcccccagagctgctggctgtgggggccacatacctgtggatcaagccaaatgccaactccatcatcggggatggccccatcatcctgaaggaagtggaatatcgcaccaccacaggcacgtgggcagagacccacatagtcgactctcccaactataagctgtggcatctggaccccgatgttgagtatgagatccgagtgctcctcacacgaccaggtgaggggggtacgggaccgccagggcctcccctcaccaccaggaccaagtgtgcagatccggtacatggcccacagaacgtggaaatcgtagacatcagagcccggcagctgaccctgcagtgggagcccttcggctacgcggtgacccgctgccatagctacaacctcaccgtgcagtaccagtatgtgttcaaccagcagcagtacgaggccgaggaggtcatccagacctcctcccactacaccctgcgaggcctgcgccccttcatgaccatccggctgcgactcttgctgtctaaccccgagggccgaatggagagcgaggagctggtggtgcagactgaggaagacgttccaggagctgttcctctagaatccatccaaggggggccctttgaggagaagatctacatccagtggaaacctcccaatgagaccaatggggtcatcacgctctacgagatcaactacaaggctgtcggctcgctggacccaagtgctgacctctcgagccagagggggaaagtgttcaagctccggaatgaaacccaccacctctttgtgggtctgtacccagggaccacctattccttcaccatcaaggccagcacagcaaagggctttgggccccctgtcaccactcggattgccaccaaaatttcagctccatccatgcctgagtacgacacagacaccccattgaatgagacagacacgaccatcacagtgatgctgaaacccgctcagtcccggggagctcctgtcagtgtttatcagctggttgtcaaggaggagcgacttcagaagtcacggagggcagctgacattattgagtgcttttcggtgcccgtgagctatcggaatgcctccagcctcgattctctacactactttgctgctgagttgaagcctgccaacctgcctgtcacccagccatttacagtgggtgacaataagacatacaatggctactggaaccctcctctctctcccctgaaaagctacagcatctacttccaggcactcagcaaagccaatggagagaccaaaatcaactgtgttcgtctggctacaaaagcaccaatgggcagcgcccaggtgaccccggggactccactctgcctcctcaccacaggtgcctccacccagaattctaacactgtggagccagagaagcaggtggacaacaccgtgaagatggctggcgtgatcgctggcctcctcatgttcatcatcattctcctgggcgtgatgctcaccatcaaaaggaggaagctggccaagaagcagaaggagacccagagtggagcccagagggagatggggcctgtggcctctgccgacaaacccaccaccaagctcagcgccagccgcaatgatgaaggcttctcttctagttctcaggacgtcaacggattcacagatggcagccgcggggagctttcccagcccaccctcacgatccagactcatccctaccgcacctgtgaccctgtggagatgagctacccccgggaccagttccaacccgccatccgggtggctgacttgctgcagcacatcacgcagatgaagagaggccagggctacgggttcaaggaggaatacgaggccttaccagaggggcagacagcttcgtgggacacagccaaggaggatgaaaaccgcaataagaatcgatatgggaacatcatatcctacgaccattcccgggtgaggctgctggtgctggatggagacccgcactctgactacatcaatgccaactacattgacggataccatcgacctcggcactacattgcgactcaaggtccgatgcaggagactgtaaaggacttttggagaatgatctggcaggagaactccgccagcatcgtcatggtcacaaacctggtggaagtgggcagggtgaaatgtgtgcgatactggccagatgacacggaggtctacggagacattaaagtcaccctgattgaaacagagcccctggcagaatacgtcatacgcaccttcacagtccagaagaaaggctaccatgagatccgggagctccgcctcttccacttcaccagctggcctgaccacggcgttccctgctatgccactggccttctgggcttcgtccgccaggtcaagttcctcaaccccccggaagctgggcccatagtggtccactgcagtgctggggctgggcggactggctgcttcattgccattgacaccatgcttgacatggccgagaatgaaggggtggtggacatcttcaactgcgtgcgtgagctccgggcccaaagggtcaacctggtacagacagaggagcaatatgtgtttgtgcacgatgccatcctggaagcgtgcctctgtggcaacactgccatccctgtgtgtgagttccgttctctctactacaatatcagcaggctggacccccagacaaactccagccaaatcaaagatgaatttcagaccctcaacattgtgacaccccgtgtgcggcccgaggactgcagcattgggctcctgccccggaaccatgataagaatcgaagtatggacgtgctgcctctggaccgctgcctgcccttccttatctcagtggacggagaatccagcaattacatcaacgcagcactgatggatagccacaagcagcctgccgccttcgtggtcacccagcaccctctacccaacaccgtggcagacttctggaggctggtgttcgattacaactgctcctctgtggtgatgctgaatgagatggacactgcccagttctgtatgcagtactggcctgagaagacctccgggtgctatgggcccatccaggtggagttcgtctccgcagacatcgacgaggacatcatccacagaatattccgcatctgtaacatggcccggccacaggatggttatcgtatagtccagcacctccagtacattggctggcctgcctaccgggacacgcccccctccaagcgctctctgctcaaagtggtccgacgactggagaagtggcaggagcagtatgacgggagggagggacgtactgtggtccactgcctaaatgggggaggccgtagtggaaccttctgtgccatctgcagtgtgtgtgagatgatccagcagcaaaacatcattgacgtgttccacatcgtgaaaacactgcgtaacaacaaatccaacatggtggagaccctggaacagtataaatttgtatacgaggtggcactggaatatttaagctccttttagctcaatgggatggggaacctgccggagtccagaggctgctgtgaccaagcccccttttgtgtgaatggcagtaactgggctcaggagctctgaggtggcaccctgcctgactccaaggagaagactggtggccctgtgttccacggggggctctgcaccttctgaggggtctcctgttgccgtgggagatgctgctccaaaaggcccaggcttccttttcaacctaaccagccacagccaagggcccaagcagaagtacacccacaagcaaggccttggatttctggctcccagaccacctgcttttgttctgagtttgtggatctcttggcaagccaactgtgcaggtgctggggagtgggaggctcccctgccctccttctccttaggagtggaggagatgtgtgttctgctcctctacgtcatggaaaagattgaggctcttgggggtcactgctctgctgccccctgcaacctccttcaggggcctctggcaccagacatttgcagtctggaccagtgtgaccttacgatgttccctaggccacaagagaggccccccatcctcacacctaacctgcatggggcttcgcccacaaccattctgtaccccttccccagcctgggccttgaccgtccagcattcactggccggccagctgtgtccacagcagtttttgataaaggtgttctttgcttttttgtgtggtcagtgggagggggtggaactgcagggaacttctctgctcctccttgtctttgtaaaaagggaccacctccctggggcagggcttgggctgacctgtaggatgtaacccctgtgtttctttggtggtagctttctttggaagagacaaacaagataagatttgattattttccaaagtgtatgtgaaaagaaactttcttttggagggtgtaaaatcttagtctcttatgtcaaaaagaagggggcgggggagtttgagtatgtacctctaagacaaatctctcgggccttttattttttcctggcaatgtccttaaaagctcccaccctgggacagcatgccactgagcaaggagagatgggtgagcctgaagatggtccctttggtttctggggcaaatagagcaccagctttgtgcataatttggatgtccaaatttgaactccttcctaaagaaacccagcagccaccttgaaaaaggccattgtggagcccattatactttgatttaaaataggccaagagaatcaggcctggagatctagggtcttgtccaaagtgtgagtgagtcaatgagagggaaccaacatttgctaagtctctactgtatgccagggatcatgcttggcactttccataggacatttcacacagtccttagaacccccaggagagagctactgacttgttatcatctccatttgatcatctcctccaatgaggaaacccacgcaccttccttagtaatgaaatcctgggttccaaaggggcaggtaatggcaatgagacttctccgtgctgttttcttcatcttctctaagccaagcaattattttatggagggaaaataaggccagaaacttctgagcagataactccacaaatggaaatttagtactttcttcctgatgccagttcttctgggaagcgcagaatttcagatatattttagtaacacattcccagctccccaggaaagccagtctcatctaatttcttagtcagtaaaaacaattccctgttccttcaggctatgaatggaccagccagggaaactctcgaccttgatctctagccagtgcttaggcccaatatctgacagcctcaggtgggctgggacctaggaagctccatcttgaaggctggtctagccccagacagggcatgaggggcagagaattcaagaaggtacagctttggccctcaagagcccactgtatgctggggaaatggaaccatggtgcagtagtgtggagtggatgagtgttccatgagcctaggagcaagaaagtctcttcggcctcgggcttcctggagaaggggacgtccattcctgctgggtcttaacaagcataaaaaggaaaaaaaggaaactcaggcaaagggatccatatgtgcaatggcaaagaaatgtgaaaaggcattgggagaagcagtctgggggaggccagcccagtgcgggcacagcacaacacggggagcagcaagagatgagccagggtccaggagacagatgcccatcgcgagtacagactttgtcctattggcaacaaggagtccatggagctttagagagatgcactcagcttcgtgttggccaagactccttctgggccaatggggctgcctcttttcctttcatcagacactgtgaaaacattcccttaagcgtgcactttttaatatcacatctatttgtctgtctgctcattgttttgttgctggaactaaatatgcaatggatcatgagactcagattctatgagaaacccagggtctctgctttaccacggagcagggtcaccaacccagatctccaggcccatgaggatggaacatgaaaggagccgacaaaagttgcttccattggcatgggctctggagctgtccagaagtccagggacaccagacttgatcaaggaagggctgtcactttagaggttcaaaaggaagtgcctcaaagcaaaggcaagcaaaggaaccccacgatgaacttgctcttttcctttgatgagcctctccccaggtgtatttcagcagaccccggggacccacccccactgggcctgctggcctccctcggctccagcccaatgccccagctggccttccccagcctgcaaggagcctgtagcatggcaaatctgcctgctgtatgctattttcttagatcttggtacatccagacaggatgagggtggagggagagctatttaacacaaatcctaagatttttttctgctcaggaaggggtgaaatagctggcagatacaaaagacagtggcttttatcattttaaatggtaggaatttaaggtgtgacttcagggagaaacaaacttgcaaaaaaaaaaaatctcaggccatgttggggtaacccagcaagggccagtgatgatttcccccagctcatccccttattttcccacaacccaaccattctctaaagcaggacagtgaataggtcttaggccagtgcacacaggaagaaattgaggcttatggatggggatgacttccctaagatcccatgggacaaggatgtggcaaggcttggatgagatggggcaccagtgcccaggaatttgaacattttcctttacccaggaaatctccggagccaacaccaccacccccagggggtctccccaccccaccccatttacagggtgagctcagcctgtcatgagcagaggaaaatattattaatgctctctgagtctttacaacaggagctcttacctcatagatgtgggctctgtttggggaagatgcaaggaagtaatgagaagcccaggaaatttctccacctgtgtttatggcctaaatagcttcaggatgtatcttagctgcactccaacattgcatcctttctggggtgaagaatctgggccaaccaggggtccttgggcctctagaaggccacagtaggcctctctttgtgggaatggaaggggacagtttgcttttagtgctggccctctctgtgggtgtggcctgcaaaggaaccaacagaccctatgctggggactctaacatgtgagctcattaaattcttccagcattctaaaggagggtttgtgattgtcaccatttactgatgaggaaactaaggctcctaggggagaaatcacttgcccacagttccacagctagtgagtgaatgaaccaggatttaaaccggttttttctcactacagagacaatatttttccaccattgtatctcacatttttcccaggaggttacccataacagaagagactagagtggaacagatacgtcagtggataaagctcaaagcaaacaacagtaagcttaaaattccttcatagtctcatgttttacgttcacaattcatgcaaaatttgcattccactttctgatttagccttgttggttttaatatgactctatgaatatttcaaaaaaaaatgtgctctgttcctcatgttgttctgttctgttcaccccgctatgacggaccctaggtcagctggtcttcagcttgaccctagaattgactctaggagcagtgaccctgctgcctcccagagccagttataggctcaagatcaagaccaactgaccttctcctaggcagctcctttggtgtgtgggtgctctgacctcactgttcatgaggggacctcaactaaggcatcttccagttgggtgctggaaggaacccattaactcacactagaatgatgaggatttgctcatctggcgtggagaaggatgagcccacaaaaccctaaagggaaaagagaagctggacacagctgtactcagcagattcctgaatgctaggctggaaagtggtgcctgttgtccaagtggagtcacatggttgctaatgtgggcaagtctgaggacacacttcatgagcagctggggtctggaaggctcctcactttaccctagccacacataattactgggtgcctacagcacctagcaccttggagggggcactattaggaaatcgagattactatggcacaattaattcctgggtaaggcatggggttgtggtggacagagctcagtctttagtttgaacgaaaacatacatacatgaaaaacatacatgaaaaaaggaccctcatcaacattagaaggggtagatttggagcactttaggcaggaaaacaggaacgcaaggccaggaaactggaacccagtgaatactcagaaccgaggatgcagatgacttatttagcaaaatggtcacttctgtgacatagctggagaaaggatgggtaacagcttgccagagccacttggaacaagggcaaatctcagtgtctggggcaaaagatgatgcatttccctctgacccatcatgtttattcatcctccactccccattgccacactagctcttgctgtaagtcctcaccaggatctacatttcctcgtcgctggtgggaaccccttagagtacatagaggtatcagtccagtaagactgctctacacaacagaagtgaggcccagggagtagcagccaggcccttatcctgttacctctgcaggagtgactgcccaacccagatccagagacattgaaggaaatgataattccttggtacctcactgccttgggacaaaatgaagaaagccacccttccttaggctgcagcttgccactcctgggctgggtaaacaggtcatcagcaccaagctcaaccaggagtaacactctggaagacatgggtgagcccaagaggaagcatgaacaggacgctgttcctaagtcatgtcaacaggttgtgctgggccaggatccccagggaaaaaaatggtcaacccaactggagggtaggttagaagaaaaaaaacataaacgtggatagtcatgtcatctcaaatccctgacttggcttccccattacttaacagtctgagctccttcttagcctgtgaccagcttcaaatcacagccaagtaaaacaaggaaataggaaaagtaaatccaactagaagagacaagctgagattcagatttgtttactcctcccatgcaaagtttccctgttggaggttttccatgtatacatgtctagaagtgatagaatgcaaggccttggctttgtcttgcagggatctgcctttgaggtcatagactgaacagcagggagagaggttagtggtggagtgtggggggagctgttctagctccagtttcttctgacacatttttcaggatcatggatctgatcctccgaagcacagcagagatatctaagccatatttgtgcacatgagcagactcttctagttttttagtaaccagggatgggcttttgcatggcactgactatagagatgtcttgtagagatcaagccagtcttttgcatcccacctgcccacctccagaagagatgggaaaaggtcatcaaagggcattcaccaactgaaatccactcatgaatgttaggtctctaaaaggaggcatcaacactcacaatggtagcctccaaacctagcatcccacctatctaagagctcaggggtggtccactggggcagatacaagggaagtgcaagggctcaggatgaaagaaaatctattgggaagagttttaggggcttgatcattatggggcttccttctatatctgagaactgctctgggtggtgagatgtggactctgatccttaattggaatgttcggagaatgagtgtctggtggccttgaagtgttggacagaaaagtatcagtataaaagcctggagctcagggtaattaatgtagttcatggttccttagtgagcaggactcttggatgtggaggagaaagggtcataggaagtaaaccaccaaaattacaaaattgagtctctgtacaattacttcagtgcctttgggcttatgaatacaaatcagtgggccttctctatgatggtccaacaaactctcagtgtccaccctgtccctgtatctcccatggaagatgaataatgtcaggtgttctttgggtcaaaggccccagggcagtctggaggcttagagggcagagtggtgtcattccatgtaaagttaggcttctgaggggtcaggcagaatatggtgtccatatcttccatagctctgcagattcttggatgaagtcaagcacagtttgctagacccaggtcactcctctgagtataactaggacccatgagtgaaacttaatagctgtaaggaagaacctgctgtctgccagagaggataagctgcccatctcagcagctgtctaaaagaaggcaggtgtctctttaaagggaagagaagcattggtgaaatggatttcaggtcacttccattccagatgggtgagatcttgtggagctgggatcatgtttgaactcattcatacctgtagagcacgaatccaagtagattgtgtttggtctgtacaggctgaagccccctgctctcccacccaagtgcccccactgagcaggccaacatgctgttgtggccacatatactgggctgatccaggctggttatcaccaaacagcaaaccatagggaacagctgctttgccatagacccaatacccatgtagatctctcatgagagcagccataactcagacccactgaccaacagggccatgagtgacagccagaaccagtgaaggtccaagtaggacacagagcagggcttttcttaccatacacattatctccagaggttatttctaccccactccctattcaaggcctgttggagcacactgcaaaagcaaaagcacagtaactcaatttacacatgattataatcatttccagtgcacacatttcatcaccaggtggatcctgagctagcccatgtaaatccgggttaacccatattggtaatcatactcaaaagcacttttcaccctacattctactagccaatcaaagacaaagagttgtggcctctaccattgccttggcttctggacaccctcacaagctatcccaaggttcccgctcaactccagggaggctgacatcttcacatccactgggcatataatattgcatgagaccaaagtctccacactctttgcagcctcctccatgaatcccaatggcctgcacttgtacagtttgggtgtttgatagataaagcacgtatgagaagagaaaacaaaataaatcaactttttaaaaaagccagcactgtgctgtcaatgttttttttttcttttcaattctagctcagaaaagcagaaggtaaataatgtcaggtcaatgaatatcagatatattttttgactgtacattacagtgaagtgtaatctttttacacctgcaagtccatcttatttattcttgtaaatgttccctgacaatgtttgtaacatggctgtgttaaaaaatctatacaataaagctgtgaccctgagattcatgttttcctaagata

SEQ ID NO: 171924 - DNA, 12483 bp, Homo sapiens
  Payload ID: 13777
  Gene Symbol: PTPRT
  Gene Name: protein tyrosine phosphatase, receptor type, T
  ENST ID: ENST00000373184
  CDS Start-End: 1-4356
atggcgagcctcgccgcgctcgccctcagcctgctcctgaggctgcagctgccgccactgcccggcgcccgggctcagagcgccgcaggtggctgttcctttgatgagcactacagcaactgtggttatagtgtggctctagggaccaatgggttcacctgggagcagattaacacatgggagaaaccaatgctggaccaggcagtgcccacaggatctttcatgatggtgaacagctctgggagagcctctggccagaaggcccaccttctcctgccaaccctgaaggagaatgacacccactgcatcgacttccattactacttctccagccgtgacaggtccagcccaggggccttgaacgtctacgtgaaggtgaatggtggcccccaagggaaccctgtgtggaatgtgtccggggtcgtcactgagggctgggtgaaggcagagctcgccatcagcactttctggccacatttctatcaggtgatatttgaatccgtctcattgaagggtcatcctggctacatcgccgtggacgaggtccgggtccttgctcatccatgcagaaaagcacctcattttctgcgactccaaaacgtggaggtgaatgtggggcagaatgccacatttcagtgcattgctggtgggaagtggtctcagcatgacaagctttggctccagcaatggaatggcagggacacggccctgatggtcacccgtgtggtcaaccacaggcgcttctcagccacagtcagtgtggcagacactgcccagcggagcgtcagcaagtaccgctgtgtgatccgctctgatggtgggtctggtgtgtccaactacgcggagctgatcgtgaaagagcctcccacgcccattgctcccccagagctgctggctgtgggggccacatacctgtggatcaagccaaatgccaactccatcatcggggatggccccatcatcctgaaggaagtggaatatcgcaccaccacaggcacgtgggcagagacccacatagtcgactctcccaactataagctgtggcatctggaccccgatgttgagtatgagatccgagtgctcctcacacgaccaggtgaggggggtacgggaccgccagggcctcccctcaccaccaggaccaagtgtgcagatccggtacatggcccacagaacgtggaaatcgtagacatcagagcccggcagctgaccctgcagtgggagcccttcggctacgcggtgacccgctgccatagctacaacctcaccgtgcagtaccagtatgtgttcaaccagcagcagtacgaggccgaggaggtcatccagacctcctcccactacaccctgcgaggcctgcgccccttcatgaccatccggctgcgactcttgctgtctaaccccgagggccgaatggagagcgaggagctggtggtgcagactgaggaagacgttccaggagctgttcctctagaatccatccaaggggggccctttgaggagaagatctacatccagtggaaacctcccaatgagaccaatggggtcatcacgctctacgagatcaactacaaggctgtcggctcgctggacccaagtgctgacctctcgagccagagggggaaagtgttcaagctccggaatgaaacccaccacctctttgtgggtctgtacccagggaccacctattccttcaccatcaaggccagcacagcaaagggctttgggccccctgtcaccactcggattgccaccaaaatttcagctccatccatgcctgagtacgacacagacaccccattgaatgagacagacacgaccatcacagtgatgctgaaacccgctcagtcccggggagctcctgtcagtgtttatcagctggttgtcaaggaggagcgacttcagaagtcacggagggcagctgacattattgagtgcttttcggtgcccgtgagctatcggaatgcctccagcctcgattctctacactactttgctgctgagttgaagcctgccaacctgcctgtcacccagccatttacagtgggtgacaataagacatacaatggctactggaaccctcctctctctcccctgaaaagctacagcatctacttccaggcactcagcaaagccaatggagagaccaaaatcaactgtgttcgtctggctacaaaaggtgcctccacccagaattctaacactgtggagccagagaagcaggtggacaacaccgtgaagatggctggcgtgatcgctggcctcctcatgttcatcatcattctcctgggcgtgatgctcaccatcaaaaggaggaagctggccaagaagcagaaggagacccagagtggagcccagagggagatggggcctgtggcctctgccgacaaacccaccaccaagctcagcgccagccgcaatgatgaaggcttctcttctagttctcaggacgtcaacggattcacagatggcagccgcggggagctttcccagcccaccctcacgatccagactcatccctaccgcacctgtgaccctgtggagatgagctacccccgggaccagttccaacccgccatccgggtggctgacttgctgcagcacatcacgcagatgaagagaggccagggctacgggttcaaggaggaatacgaggccttaccagaggggcagacagcttcgtgggacacagccaaggaggatgaaaaccgcaataagaatcgatatgggaacatcatatcctacgaccattcccgggtgaggctgctggtgctggatggagacccgcactctgactacatcaatgccaactacattgacggataccatcgacctcggcactacattgcgactcaaggtccgatgcaggagactgtaaaggacttttggagaatgatctggcaggagaactccgccagcatcgtcatggtcacaaacctggtggaagtgggcaggcacccagcggaacacactgtgggaaatgccactctaggccgtgcggcgtcccccggaatggtgaaatgtgtgcgatactggccagatgacacggaggtctacggagacattaaagtcaccctgattgaaacagagcccctggcagaatacgtcatacgcaccttcacagtccagaagaaaggctaccatgagatccgggagctccgcctcttccacttcaccagctggcctgaccacggcgttccctgctatgccactggccttctgggcttcgtccgccaggtcaagttcctcaaccccccggaagctgggcccatagtggtccactgcagtgctggggctgggcggactggctgcttcattgccattgacaccatgcttgacatggccgagaatgaaggggtggtggacatcttcaactgcgtgcgtgagctccgggcccaaagggtcaacctggtacagacagaggagcaatatgtgtttgtgcacgatgccatcctggaagcgtgcctctgtggcaacactgccatccctgtgtgtgagttccgttctctctactacaatatcagcaggctggacccccagacaaactccagccaaatcaaagatgaatttcagaccctcaacattgtgacaccccgtgtgcggcccgaggactgcagcattgggctcctgccccggaaccatgataagaatcgaagtatggacgtgctgcctctggaccgctgcctgcccttccttatctcagtggacggagaatccagcaattacatcaacgcagcactgatggatagccacaagcagcctgccgccttcgtggtcacccagcaccctctacccaacaccgtggcagacttctggaggctggtgttcgattacaactgctcctctgtggtgatgctgaatgagatggacactgcccagttctgtatgcagtactggcctgagaagacctccgggtgctatgggcccatccaggtggagttcgtctccgcagacatcgacgaggacatcatccacagaatattccgcatctgtaacatggcccggccacaggatggttatcgtatagtccagcacctccagtacattggctggcctgcctaccgggacacgcccccctccaagcgctctctgctcaaagtggtccgacgactggagaagtggcaggagcagtatgacgggagggagggacgtactgtggtccactgcctaaatgggggaggccgtagtggaaccttctgtgccatctgcagtgtgtgtgagatgatccagcagcaaaacatcattgacgtgttccacatcgtgaaaacactgcgtaacaacaaatccaacatggtggagaccctggaacagtataaatttgtatacgaggtggcactggaatatttaagctccttttagctcaatgggatggggaacctgccggagtccagaggctgctgtgaccaagcccccttttgtgtgaatggcagtaactgggctcaggagctctgaggtggcaccctgcctgactccaaggagaagactggtggccctgtgttccacggggggctctgcaccttctgaggggtctcctgttgccgtgggagatgctgctccaaaaggcccaggcttccttttcaacctaaccagccacagccaagggcccaagcagaagtacacccacaagcaaggccttggatttctggctcccagaccacctgcttttgttctgagtttgtggatctcttggcaagccaactgtgcaggtgctggggagtgggaggctcccctgccctccttctccttaggagtggaggagatgtgtgttctgctcctctacgtcatggaaaagattgaggctcttgggggtcactgctctgctgccccctgcaacctccttcaggggcctctggcaccagacatttgcagtctggaccagtgtgaccttacgatgttccctaggccacaagagaggccccccatcctcacacctaacctgcatggggcttcgcccacaaccattctgtaccccttccccagcctgggccttgaccgtccagcattcactggccggccagctgtgtccacagcagtttttgataaaggtgttctttgcttttttgtgtggtcagtgggagggggtggaactgcagggaacttctctgctcctccttgtctttgtaaaaagggaccacctccctggggcagggcttgggctgacctgtaggatgtaacccctgtgtttctttggtggtagctttctttggaagagacaaacaagataagatttgattattttccaaagtgtatgtgaaaagaaactttcttttggagggtgtaaaatcttagtctcttatgtcaaaaagaagggggcgggggagtttgagtatgtacctctaagacaaatctctcgggccttttattttttcctggcaatgtccttaaaagctcccaccctgggacagcatgccactgagcaaggagagatgggtgagcctgaagatggtccctttggtttctggggcaaatagagcaccagctttgtgcataatttggatgtccaaatttgaactccttcctaaagaaacccagcagccaccttgaaaaaggccattgtggagcccattatactttgatttaaaataggccaagagaatcaggcctggagatctagggtcttgtccaaagtgtgagtgagtcaatgagagggaaccaacatttgctaagtctctactgtatgccagggatcatgcttggcactttccataggacatttcacacagtccttagaacccccaggagagagctactgacttgttatcatctccatttgatcatctcctccaatgaggaaacccacgcaccttccttagtaatgaaatcctgggttccaaaggggcaggtaatggcaatgagacttctccgtgctgttttcttcatcttctctaagccaagcaattattttatggagggaaaataaggccagaaacttctgagcagataactccacaaatggaaatttagtactttcttcctgatgccagttcttctgggaagcgcagaatttcagatatattttagtaacacattcccagctccccaggaaagccagtctcatctaatttcttagtcagtaaaaacaattccctgttccttcaggctatgaatggaccagccagggaaactctcgaccttgatctctagccagtgcttaggcccaatatctgacagcctcaggtgggctgggacctaggaagctccatcttgaaggctggtctagccccagacagggcatgaggggcagagaattcaagaaggtacagctttggccctcaagagcccactgtatgctggggaaatggaaccatggtgcagtagtgtggagtggatgagtgttccatgagcctaggagcaagaaagtctcttcggcctcgggcttcctggagaaggggacgtccattcctgctgggtcttaacaagcataaaaaggaaaaaaaggaaactcaggcaaagggatccatatgtgcaatggcaaagaaatgtgaaaaggcattgggagaagcagtctgggggaggccagcccagtgcgggcacagcacaacacggggagcagcaagagatgagccagggtccaggagacagatgcccatcgcgagtacagactttgtcctattggcaacaaggagtccatggagctttagagagatgcactcagcttcgtgttggccaagactccttctgggccaatggggctgcctcttttcctttcatcagacactgtgaaaacattcccttaagcgtgcactttttaatatcacatctatttgtctgtctgctcattgttttgttgctggaactaaatatgcaatggatcatgagactcagattctatgagaaacccagggtctctgctttaccacggagcagggtcaccaacccagatctccaggcccatgaggatggaacatgaaaggagccgacaaaagttgcttccattggcatgggctctggagctgtccagaagtccagggacaccagacttgatcaaggaagggctgtcactttagaggttcaaaaggaagtgcctcaaagcaaaggcaagcaaaggaaccccacgatgaacttgctcttttcctttgatgagcctctccccaggtgtatttcagcagaccccggggacccacccccactgggcctgctggcctccctcggctccagcccaatgccccagctggccttccccagcctgcaaggagcctgtagcatggcaaatctgcctgctgtatgctattttcttagatcttggtacatccagacaggatgagggtggagggagagctatttaacacaaatcctaagatttttttctgctcaggaaggggtgaaatagctggcagatacaaaagacagtggcttttatcattttaaatggtaggaatttaaggtgtgacttcagggagaaacaaacttgcaaaaaaaaaaaatctcaggccatgttggggtaacccagcaagggccagtgatgatttcccccagctcatccccttattttcccacaacccaaccattctctaaagcaggacagtgaataggtcttaggccagtgcacacaggaagaaattgaggcttatggatggggatgacttccctaagatcccatgggacaaggatgtggcaaggcttggatgagatggggcaccagtgcccaggaatttgaacattttcctttacccaggaaatctccggagccaacaccaccacccccagggggtctccccaccccaccccatttacagggtgagctcagcctgtcatgagcagaggaaaatattattaatgctctctgagtctttacaacaggagctcttacctcatagatgtgggctctgtttggggaagatgcaaggaagtaatgagaagcccaggaaatttctccacctgtgtttatggcctaaatagcttcaggatgtatcttagctgcactccaacattgcatcctttctggggtgaagaatctgggccaaccaggggtccttgggcctctagaaggccacagtaggcctctctttgtgggaatggaaggggacagtttgcttttagtgctggccctctctgtgggtgtggcctgcaaaggaaccaacagaccctatgctggggactctaacatgtgagctcattaaattcttccagcattctaaaggagggtttgtgattgtcaccatttactgatgaggaaactaaggctcctaggggagaaatcacttgcccacagttccacagctagtgagtgaatgaaccaggatttaaaccggttttttctcactacagagacaatatttttccaccattgtatctcacatttttcccaggaggttacccataacagaagagactagagtggaacagatacgtcagtggataaagctcaaagcaaacaacagtaagcttaaaattccttcatagtctcatgttttacgttcacaattcatgcaaaatttgcattccactttctgatttagccttgttggttttaatatgactctatgaatatttcaaaaaaaaatgtgctctgttcctcatgttgttctgttctgttcaccccgctatgacggaccctaggtcagctggtcttcagcttgaccctagaattgactctaggagcagtgaccctgctgcctcccagagccagttataggctcaagatcaagaccaactgaccttctcctaggcagctcctttggtgtgtgggtgctctgacctcactgttcatgaggggacctcaactaaggcatcttccagttgggtgctggaaggaacccattaactcacactagaatgatgaggatttgctcatctggcgtggagaaggatgagcccacaaaaccctaaagggaaaagagaagctggacacagctgtactcagcagattcctgaatgctaggctggaaagtggtgcctgttgtccaagtggagtcacatggttgctaatgtgggcaagtctgaggacacacttcatgagcagctggggtctggaaggctcctcactttaccctagccacacataattactgggtgcctacagcacctagcaccttggagggggcactattaggaaatcgagattactatggcacaattaattcctgggtaaggcatggggttgtggtggacagagctcagtctttagtttgaacgaaaacatacatacatgaaaaacatacatgaaaaaaggaccctcatcaacattagaaggggtagatttggagcactttaggcaggaaaacaggaacgcaaggccaggaaactggaacccagtgaatactcagaaccgaggatgcagatgacttatttagcaaaatggtcacttctgtgacatagctggagaaaggatgggtaacagcttgccagagccacttggaacaagggcaaatctcagtgtctggggcaaaagatgatgcatttccctctgacccatcatgtttattcatcctccactccccattgccacactagctcttgctgtaagtcctcaccaggatctacatttcctcgtcgctggtgggaaccccttagagtacatagaggtatcagtccagtaagactgctctacacaacagaagtgaggcccagggagtagcagccaggcccttatcctgttacctctgcaggagtgactgcccaacccagatccagagacattgaaggaaatgataattccttggtacctcactgccttgggacaaaatgaagaaagccacccttccttaggctgcagcttgccactcctgggctgggtaaacaggtcatcagcaccaagctcaaccaggagtaacactctggaagacatgggtgagcccaagaggaagcatgaacaggacgctgttcctaagtcatgtcaacaggttgtgctgggccaggatccccagggaaaaaaatggtcaacccaactggagggtaggttagaagaaaaaaaacataaacgtggatagtcatgtcatctcaaatccctgacttggcttccccattacttaacagtctgagctccttcttagcctgtgaccagcttcaaatcacagccaagtaaaacaaggaaataggaaaagtaaatccaactagaagagacaagctgagattcagatttgtttactcctcccatgcaaagtttccctgttggaggttttccatgtatacatgtctagaagtgatagaatgcaaggccttggctttgtcttgcagggatctgcctttgaggtcatagactgaacagcagggagagaggttagtggtggagtgtggggggagctgttctagctccagtttcttctgacacatttttcaggatcatggatctgatcctccgaagcacagcagagatatctaagccatatttgtgcacatgagcagactcttctagttttttagtaaccagggatgggcttttgcatggcactgactatagagatgtcttgtagagatcaagccagtcttttgcatcccacctgcccacctccagaagagatgggaaaaggtcatcaaagggcattcaccaactgaaatccactcatgaatgttaggtctctaaaaggaggcatcaacactcacaatggtagcctccaaacctagcatcccacctatctaagagctcaggggtggtccactggggcagatacaagggaagtgcaagggctcaggatgaaagaaaatctattgggaagagttttaggggcttgatcattatggggcttccttctatatctgagaactgctctgggtggtgagatgtggactctgatccttaattggaatgttcggagaatgagtgtctggtggccttgaagtgttggacagaaaagtatcagtataaaagcctggagctcagggtaattaatgtagttcatggttccttagtgagcaggactcttggatgtggaggagaaagggtcataggaagtaaaccaccaaaattacaaaattgagtctctgtacaattacttcagtgcctttgggcttatgaatacaaatcagtgggccttctctatgatggtccaacaaactctcagtgtccaccctgtccctgtatctcccatggaagatgaataatgtcaggtgttctttgggtcaaaggccccagggcagtctggaggcttagagggcagagtggtgtcattccatgtaaagttaggcttctgaggggtcaggcagaatatggtgtccatatcttccatagctctgcagattcttggatgaagtcaagcacagtttgctagacccaggtcactcctctgagtataactaggacccatgagtgaaacttaatagctgtaaggaagaacctgctgtctgccagagaggataagctgcccatctcagcagctgtctaaaagaaggcaggtgtctctttaaagggaagagaagcattggtgaaatggatttcaggtcacttccattccagatgggtgagatcttgtggagctgggatcatgtttgaactcattcatacctgtagagcacgaatccaagtagattgtgtttggtctgtacaggctgaagccccctgctctcccacccaagtgcccccactgagcaggccaacatgctgttgtggccacatatactgggctgatccaggctggttatcaccaaacagcaaaccatagggaacagctgctttgccatagacccaatacccatgtagatctctcatgagagcagccataactcagacccactgaccaacagggccatgagtgacagccagaaccagtgaaggtccaagtaggacacagagcagggcttttcttaccatacacattatctccagaggttatttctaccccactccctattcaaggcctgttggagcacactgcaaaagcaaaagcacagtaactcaatttacacatgattataatcatttccagtgcacacatttcatcaccaggtggatcctgagctagcccatgtaaatccgggttaacccatattggtaatcatactcaaaagcacttttcaccctacattctactagccaatcaaagacaaagagttgtggcctctaccattgccttggcttctggacaccctcacaagctatcccaaggttcccgctcaactccagggaggctgacatcttcacatccactgggcatataatattgcatgagaccaaagtctccacactctttgcagcctcctccatgaatcccaatggcctgcacttgtacagtttgggtgtttgatagataaagcacgtatgagaagagaaaacaaaataaatcaactttttaaaaaagccagcactgtgctgtcaatgttttttttttcttttcaattctagctcagaaaagcagaaggtaaataatgtcaggtcaatgaatatcagatatattttttgactgtacattacagtgaagtgtaatctttttacacctgcaagtccatcttatttattcttgtaaatgttccctgacaatgtttgtaacatggctgtgttaaaaaatctatacaataaagctgtgaccctgagattcatgttttcctaagata

SEQ ID NO: 171925 - DNA, 12453 bp, Homo sapiens
  Payload ID: 13777
  Gene Symbol: PTPRT
  Gene Name: protein tyrosine phosphatase, receptor type, T
  Uniprot ID: O14522
  ENST ID: ENST00000373187
  CDS Start-End: 1-4326
atggcgagcctcgccgcgctcgccctcagcctgctcctgaggctgcagctgccgccactgcccggcgcccgggctcagagcgccgcaggtggctgttcctttgatgagcactacagcaactgtggttatagtgtggctctagggaccaatgggttcacctgggagcagattaacacatgggagaaaccaatgctggaccaggcagtgcccacaggatctttcatgatggtgaacagctctgggagagcctctggccagaaggcccaccttctcctgccaaccctgaaggagaatgacacccactgcatcgacttccattactacttctccagccgtgacaggtccagcccaggggccttgaacgtctacgtgaaggtgaatggtggcccccaagggaaccctgtgtggaatgtgtccggggtcgtcactgagggctgggtgaaggcagagctcgccatcagcactttctggccacatttctatcaggtgatatttgaatccgtctcattgaagggtcatcctggctacatcgccgtggacgaggtccgggtccttgctcatccatgcagaaaagcacctcattttctgcgactccaaaacgtggaggtgaatgtggggcagaatgccacatttcagtgcattgctggtgggaagtggtctcagcatgacaagctttggctccagcaatggaatggcagggacacggccctgatggtcacccgtgtggtcaaccacaggcgcttctcagccacagtcagtgtggcagacactgcccagcggagcgtcagcaagtaccgctgtgtgatccgctctgatggtgggtctggtgtgtccaactacgcggagctgatcgtgaaagagcctcccacgcccattgctcccccagagctgctggctgtgggggccacatacctgtggatcaagccaaatgccaactccatcatcggggatggccccatcatcctgaaggaagtggaatatcgcaccaccacaggcacgtgggcagagacccacatagtcgactctcccaactataagctgtggcatctggaccccgatgttgagtatgagatccgagtgctcctcacacgaccaggtgaggggggtacgggaccgccagggcctcccctcaccaccaggaccaagtgtgcagatccggtacatggcccacagaacgtggaaatcgtagacatcagagcccggcagctgaccctgcagtgggagcccttcggctacgcggtgacccgctgccatagctacaacctcaccgtgcagtaccagtatgtgttcaaccagcagcagtacgaggccgaggaggtcatccagacctcctcccactacaccctgcgaggcctgcgccccttcatgaccatccggctgcgactcttgctgtctaaccccgagggccgaatggagagcgaggagctggtggtgcagactgaggaagacgttccaggagctgttcctctagaatccatccaaggggggccctttgaggagaagatctacatccagtggaaacctcccaatgagaccaatggggtcatcacgctctacgagatcaactacaaggctgtcggctcgctggacccaagtgctgacctctcgagccagagggggaaagtgttcaagctccggaatgaaacccaccacctctttgtgggtctgtacccagggaccacctattccttcaccatcaaggccagcacagcaaagggctttgggccccctgtcaccactcggattgccaccaaaatttcagctccatccatgcctgagtacgacacagacaccccattgaatgagacagacacgaccatcacagtgatgctgaaacccgctcagtcccggggagctcctgtcagtgtttatcagctggttgtcaaggaggagcgacttcagaagtcacggagggcagctgacattattgagtgcttttcggtgcccgtgagctatcggaatgcctccagcctcgattctctacactactttgctgctgagttgaagcctgccaacctgcctgtcacccagccatttacagtgggtgacaataagacatacaatggctactggaaccctcctctctctcccctgaaaagctacagcatctacttccaggcactcagcaaagccaatggagagaccaaaatcaactgtgttcgtctggctacaaaaggtgcctccacccagaattctaacactgtggagccagagaagcaggtggacaacaccgtgaagatggctggcgtgatcgctggcctcctcatgttcatcatcattctcctgggcgtgatgctcaccatcaaaaggagaagaaatgcttattcctactcctattacttgaagctggccaagaagcagaaggagacccagagtggagcccagagggagatggggcctgtggcctctgccgacaaacccaccaccaagctcagcgccagccgcaatgatgaaggcttctcttctagttctcaggacgtcaacggattcacagatggcagccgcggggagctttcccagcccaccctcacgatccagactcatccctaccgcacctgtgaccctgtggagatgagctacccccgggaccagttccaacccgccatccgggtggctgacttgctgcagcacatcacgcagatgaagagaggccagggctacgggttcaaggaggaatacgaggccttaccagaggggcagacagcttcgtgggacacagccaaggaggatgaaaaccgcaataagaatcgatatgggaacatcatatcctacgaccattcccgggtgaggctgctggtgctggatggagacccgcactctgactacatcaatgccaactacattgacggataccatcgacctcggcactacattgcgactcaaggtccgatgcaggagactgtaaaggacttttggagaatgatctggcaggagaactccgccagcatcgtcatggtcacaaacctggtggaagtgggcagggtgaaatgtgtgcgatactggccagatgacacggaggtctacggagacattaaagtcaccctgattgaaacagagcccctggcagaatacgtcatacgcaccttcacagtccagaagaaaggctaccatgagatccgggagctccgcctcttccacttcaccagctggcctgaccacggcgttccctgctatgccactggccttctgggcttcgtccgccaggtcaagttcctcaaccccccggaagctgggcccatagtggtccactgcagtgctggggctgggcggactggctgcttcattgccattgacaccatgcttgacatggccgagaatgaaggggtggtggacatcttcaactgcgtgcgtgagctccgggcccaaagggtcaacctggtacagacagaggagcaatatgtgtttgtgcacgatgccatcctggaagcgtgcctctgtggcaacactgccatccctgtgtgtgagttccgttctctctactacaatatcagcaggctggacccccagacaaactccagccaaatcaaagatgaatttcagaccctcaacattgtgacaccccgtgtgcggcccgaggactgcagcattgggctcctgccccggaaccatgataagaatcgaagtatggacgtgctgcctctggaccgctgcctgcccttccttatctcagtggacggagaatccagcaattacatcaacgcagcactgatggatagccacaagcagcctgccgccttcgtggtcacccagcaccctctacccaacaccgtggcagacttctggaggctggtgttcgattacaactgctcctctgtggtgatgctgaatgagatggacactgcccagttctgtatgcagtactggcctgagaagacctccgggtgctatgggcccatccaggtggagttcgtctccgcagacatcgacgaggacatcatccacagaatattccgcatctgtaacatggcccggccacaggatggttatcgtatagtccagcacctccagtacattggctggcctgcctaccgggacacgcccccctccaagcgctctctgctcaaagtggtccgacgactggagaagtggcaggagcagtatgacgggagggagggacgtactgtggtccactgcctaaatgggggaggccgtagtggaaccttctgtgccatctgcagtgtgtgtgagatgatccagcagcaaaacatcattgacgtgttccacatcgtgaaaacactgcgtaacaacaaatccaacatggtggagaccctggaacagtataaatttgtatacgaggtggcactggaatatttaagctccttttagctcaatgggatggggaacctgccggagtccagaggctgctgtgaccaagcccccttttgtgtgaatggcagtaactgggctcaggagctctgaggtggcaccctgcctgactccaaggagaagactggtggccctgtgttccacggggggctctgcaccttctgaggggtctcctgttgccgtgggagatgctgctccaaaaggcccaggcttccttttcaacctaaccagccacagccaagggcccaagcagaagtacacccacaagcaaggccttggatttctggctcccagaccacctgcttttgttctgagtttgtggatctcttggcaagccaactgtgcaggtgctggggagtgggaggctcccctgccctccttctccttaggagtggaggagatgtgtgttctgctcctctacgtcatggaaaagattgaggctcttgggggtcactgctctgctgccccctgcaacctccttcaggggcctctggcaccagacatttgcagtctggaccagtgtgaccttacgatgttccctaggccacaagagaggccccccatcctcacacctaacctgcatggggcttcgcccacaaccattctgtaccccttccccagcctgggccttgaccgtccagcattcactggccggccagctgtgtccacagcagtttttgataaaggtgttctttgcttttttgtgtggtcagtgggagggggtggaactgcagggaacttctctgctcctccttgtctttgtaaaaagggaccacctccctggggcagggcttgggctgacctgtaggatgtaacccctgtgtttctttggtggtagctttctttggaagagacaaacaagataagatttgattattttccaaagtgtatgtgaaaagaaactttcttttggagggtgtaaaatcttagtctcttatgtcaaaaagaagggggcgggggagtttgagtatgtacctctaagacaaatctctcgggccttttattttttcctggcaatgtccttaaaagctcccaccctgggacagcatgccactgagcaaggagagatgggtgagcctgaagatggtccctttggtttctggggcaaatagagcaccagctttgtgcataatttggatgtccaaatttgaactccttcctaaagaaacccagcagccaccttgaaaaaggccattgtggagcccattatactttgatttaaaataggccaagagaatcaggcctggagatctagggtcttgtccaaagtgtgagtgagtcaatgagagggaaccaacatttgctaagtctctactgtatgccagggatcatgcttggcactttccataggacatttcacacagtccttagaacccccaggagagagctactgacttgttatcatctccatttgatcatctcctccaatgaggaaacccacgcaccttccttagtaatgaaatcctgggttccaaaggggcaggtaatggcaatgagacttctccgtgctgttttcttcatcttctctaagccaagcaattattttatggagggaaaataaggccagaaacttctgagcagataactccacaaatggaaatttagtactttcttcctgatgccagttcttctgggaagcgcagaatttcagatatattttagtaacacattcccagctccccaggaaagccagtctcatctaatttcttagtcagtaaaaacaattccctgttccttcaggctatgaatggaccagccagggaaactctcgaccttgatctctagccagtgcttaggcccaatatctgacagcctcaggtgggctgggacctaggaagctccatcttgaaggctggtctagccccagacagggcatgaggggcagagaattcaagaaggtacagctttggccctcaagagcccactgtatgctggggaaatggaaccatggtgcagtagtgtggagtggatgagtgttccatgagcctaggagcaagaaagtctcttcggcctcgggcttcctggagaaggggacgtccattcctgctgggtcttaacaagcataaaaaggaaaaaaaggaaactcaggcaaagggatccatatgtgcaatggcaaagaaatgtgaaaaggcattgggagaagcagtctgggggaggccagcccagtgcgggcacagcacaacacggggagcagcaagagatgagccagggtccaggagacagatgcccatcgcgagtacagactttgtcctattggcaacaaggagtccatggagctttagagagatgcactcagcttcgtgttggccaagactccttctgggccaatggggctgcctcttttcctttcatcagacactgtgaaaacattcccttaagcgtgcactttttaatatcacatctatttgtctgtctgctcattgttttgttgctggaactaaatatgcaatggatcatgagactcagattctatgagaaacccagggtctctgctttaccacggagcagggtcaccaacccagatctccaggcccatgaggatggaacatgaaaggagccgacaaaagttgcttccattggcatgggctctggagctgtccagaagtccagggacaccagacttgatcaaggaagggctgtcactttagaggttcaaaaggaagtgcctcaaagcaaaggcaagcaaaggaaccccacgatgaacttgctcttttcctttgatgagcctctccccaggtgtatttcagcagaccccggggacccacccccactgggcctgctggcctccctcggctccagcccaatgccccagctggccttccccagcctgcaaggagcctgtagcatggcaaatctgcctgctgtatgctattttcttagatcttggtacatccagacaggatgagggtggagggagagctatttaacacaaatcctaagatttttttctgctcaggaaggggtgaaatagctggcagatacaaaagacagtggcttttatcattttaaatggtaggaatttaaggtgtgacttcagggagaaacaaacttgcaaaaaaaaaaaatctcaggccatgttggggtaacccagcaagggccagtgatgatttcccccagctcatccccttattttcccacaacccaaccattctctaaagcaggacagtgaataggtcttaggccagtgcacacaggaagaaattgaggcttatggatggggatgacttccctaagatcccatgggacaaggatgtggcaaggcttggatgagatggggcaccagtgcccaggaatttgaacattttcctttacccaggaaatctccggagccaacaccaccacccccagggggtctccccaccccaccccatttacagggtgagctcagcctgtcatgagcagaggaaaatattattaatgctctctgagtctttacaacaggagctcttacctcatagatgtgggctctgtttggggaagatgcaaggaagtaatgagaagcccaggaaatttctccacctgtgtttatggcctaaatagcttcaggatgtatcttagctgcactccaacattgcatcctttctggggtgaagaatctgggccaaccaggggtccttgggcctctagaaggccacagtaggcctctctttgtgggaatggaaggggacagtttgcttttagtgctggccctctctgtgggtgtggcctgcaaaggaaccaacagaccctatgctggggactctaacatgtgagctcattaaattcttccagcattctaaaggagggtttgtgattgtcaccatttactgatgaggaaactaaggctcctaggggagaaatcacttgcccacagttccacagctagtgagtgaatgaaccaggatttaaaccggttttttctcactacagagacaatatttttccaccattgtatctcacatttttcccaggaggttacccataacagaagagactagagtggaacagatacgtcagtggataaagctcaaagcaaacaacagtaagcttaaaattccttcatagtctcatgttttacgttcacaattcatgcaaaatttgcattccactttctgatttagccttgttggttttaatatgactctatgaatatttcaaaaaaaaatgtgctctgttcctcatgttgttctgttctgttcaccccgctatgacggaccctaggtcagctggtcttcagcttgaccctagaattgactctaggagcagtgaccctgctgcctcccagagccagttataggctcaagatcaagaccaactgaccttctcctaggcagctcctttggtgtgtgggtgctctgacctcactgttcatgaggggacctcaactaaggcatcttccagttgggtgctggaaggaacccattaactcacactagaatgatgaggatttgctcatctggcgtggagaaggatgagcccacaaaaccctaaagggaaaagagaagctggacacagctgtactcagcagattcctgaatgctaggctggaaagtggtgcctgttgtccaagtggagtcacatggttgctaatgtgggcaagtctgaggacacacttcatgagcagctggggtctggaaggctcctcactttaccctagccacacataattactgggtgcctacagcacctagcaccttggagggggcactattaggaaatcgagattactatggcacaattaattcctgggtaaggcatggggttgtggtggacagagctcagtctttagtttgaacgaaaacatacatacatgaaaaacatacatgaaaaaaggaccctcatcaacattagaaggggtagatttggagcactttaggcaggaaaacaggaacgcaaggccaggaaactggaacccagtgaatactcagaaccgaggatgcagatgacttatttagcaaaatggtcacttctgtgacatagctggagaaaggatgggtaacagcttgccagagccacttggaacaagggcaaatctcagtgtctggggcaaaagatgatgcatttccctctgacccatcatgtttattcatcctccactccccattgccacactagctcttgctgtaagtcctcaccaggatctacatttcctcgtcgctggtgggaaccccttagagtacatagaggtatcagtccagtaagactgctctacacaacagaagtgaggcccagggagtagcagccaggcccttatcctgttacctctgcaggagtgactgcccaacccagatccagagacattgaaggaaatgataattccttggtacctcactgccttgggacaaaatgaagaaagccacccttccttaggctgcagcttgccactcctgggctgggtaaacaggtcatcagcaccaagctcaaccaggagtaacactctggaagacatgggtgagcccaagaggaagcatgaacaggacgctgttcctaagtcatgtcaacaggttgtgctgggccaggatccccagggaaaaaaatggtcaacccaactggagggtaggttagaagaaaaaaaacataaacgtggatagtcatgtcatctcaaatccctgacttggcttccccattacttaacagtctgagctccttcttagcctgtgaccagcttcaaatcacagccaagtaaaacaaggaaataggaaaagtaaatccaactagaagagacaagctgagattcagatttgtttactcctcccatgcaaagtttccctgttggaggttttccatgtatacatgtctagaagtgatagaatgcaaggccttggctttgtcttgcagggatctgcctttgaggtcatagactgaacagcagggagagaggttagtggtggagtgtggggggagctgttctagctccagtttcttctgacacatttttcaggatcatggatctgatcctccgaagcacagcagagatatctaagccatatttgtgcacatgagcagactcttctagttttttagtaaccagggatgggcttttgcatggcactgactatagagatgtcttgtagagatcaagccagtcttttgcatcccacctgcccacctccagaagagatgggaaaaggtcatcaaagggcattcaccaactgaaatccactcatgaatgttaggtctctaaaaggaggcatcaacactcacaatggtagcctccaaacctagcatcccacctatctaagagctcaggggtggtccactggggcagatacaagggaagtgcaagggctcaggatgaaagaaaatctattgggaagagttttaggggcttgatcattatggggcttccttctatatctgagaactgctctgggtggtgagatgtggactctgatccttaattggaatgttcggagaatgagtgtctggtggccttgaagtgttggacagaaaagtatcagtataaaagcctggagctcagggtaattaatgtagttcatggttccttagtgagcaggactcttggatgtggaggagaaagggtcataggaagtaaaccaccaaaattacaaaattgagtctctgtacaattacttcagtgcctttgggcttatgaatacaaatcagtgggccttctctatgatggtccaacaaactctcagtgtccaccctgtccctgtatctcccatggaagatgaataatgtcaggtgttctttgggtcaaaggccccagggcagtctggaggcttagagggcagagtggtgtcattccatgtaaagttaggcttctgaggggtcaggcagaatatggtgtccatatcttccatagctctgcagattcttggatgaagtcaagcacagtttgctagacccaggtcactcctctgagtataactaggacccatgagtgaaacttaatagctgtaaggaagaacctgctgtctgccagagaggataagctgcccatctcagcagctgtctaaaagaaggcaggtgtctctttaaagggaagagaagcattggtgaaatggatttcaggtcacttccattccagatgggtgagatcttgtggagctgggatcatgtttgaactcattcatacctgtagagcacgaatccaagtagattgtgtttggtctgtacaggctgaagccccctgctctcccacccaagtgcccccactgagcaggccaacatgctgttgtggccacatatactgggctgatccaggctggttatcaccaaacagcaaaccatagggaacagctgctttgccatagacccaatacccatgtagatctctcatgagagcagccataactcagacccactgaccaacagggccatgagtgacagccagaaccagtgaaggtccaagtaggacacagagcagggcttttcttaccatacacattatctccagaggttatttctaccccactccctattcaaggcctgttggagcacactgcaaaagcaaaagcacagtaactcaatttacacatgattataatcatttccagtgcacacatttcatcaccaggtggatcctgagctagcccatgtaaatccgggttaacccatattggtaatcatactcaaaagcacttttcaccctacattctactagccaatcaaagacaaagagttgtggcctctaccattgccttggcttctggacaccctcacaagctatcccaaggttcccgctcaactccagggaggctgacatcttcacatccactgggcatataatattgcatgagaccaaagtctccacactctttgcagcctcctccatgaatcccaatggcctgcacttgtacagtttgggtgtttgatagataaagcacgtatgagaagagaaaacaaaataaatcaactttttaaaaaagccagcactgtgctgtcaatgttttttttttcttttcaattctagctcagaaaagcagaaggtaaataatgtcaggtcaatgaatatcagatatattttttgactgtacattacagtgaagtgtaatctttttacacctgcaagtccatcttatttattcttgtaaatgttccctgacaatgtttgtaacatggctgtgttaaaaaatctatacaataaagctgtgaccctgagattcatgttttcctaagata

SEQ ID NO: 171926 - DNA, 12559 bp, Homo sapiens
  Payload ID: 13777
  Gene Symbol: PTPRT
  Gene Name: protein tyrosine phosphatase, receptor type, T
  ENST ID: ENST00000373190
  CDS Start-End: 110-4432
ccgcgcgcacagccagcggccgcgccggcgatgcggggccaccccgcgcccgccccagtcccggccccggcccccgcgggaaggggctgagctgcccgccgccgcccggatggcgagcctcgccgcgctcgccctcagcctgctcctgaggctgcagctgccgccactgcccggcgcccgggctcagagcgccgcaggtggctgttcctttgatgagcactacagcaactgtggttatagtgtggctctagggaccaatgggttcacctgggagcagattaacacatgggagaaaccaatgctggaccaggcagtgcccacaggatctttcatgatggtgaacagctctgggagagcctctggccagaaggcccaccttctcctgccaaccctgaaggagaatgacacccactgcatcgacttccattactacttctccagccgtgacaggtccagcccaggggccttgaacgtctacgtgaaggtgaatggtggcccccaagggaaccctgtgtggaatgtgtccggggtcgtcactgagggctgggtgaaggcagagctcgccatcagcactttctggccacatttctatcaggtgatatttgaatccgtctcattgaagggtcatcctggctacatcgccgtggacgaggtccgggtccttgctcatccatgcagaaaagcacctcattttctgcgactccaaaacgtggaggtgaatgtggggcagaatgccacatttcagtgcattgctggtgggaagtggtctcagcatgacaagctttggctccagcaatggaatggcagggacacggccctgatggtcacccgtgtggtcaaccacaggcgcttctcagccacagtcagtgtggcagacactgcccagcggagcgtcagcaagtaccgctgtgtgatccgctctgatggtgggtctggtgtgtccaactacgcggagctgatcgtgaaagagcctcccacgcccattgctcccccagagctgctggctgtgggggccacatacctgtggatcaagccaaatgccaactccatcatcggggatggccccatcatcctgaaggaagtggaatatcgcaccaccacaggcacgtgggcagagacccacatagtcgactctcccaactataagctgtggcatctggaccccgatgttgagtatgagatccgagtgctcctcacacgaccaggtgaggggggtacgggaccgccagggcctcccctcaccaccaggaccaagtgtgcagatccggtacatggcccacagaacgtggaaatcgtagacatcagagcccggcagctgaccctgcagtgggagcccttcggctacgcggtgacccgctgccatagctacaacctcaccgtgcagtaccagtatgtgttcaaccagcagcagtacgaggccgaggaggtcatccagacctcctcccactacaccctgcgaggcctgcgccccttcatgaccatccggctgcgactcttgctgtctaaccccgagggccgaatggagagcgaggagctggtggtgcagactgaggaagacgttccaggagctgttcctctagaatccatccaaggggggccctttgaggagaagatctacatccagtggaaacctcccaatgagaccaatggggtcatcacgctctacgagatcaactacaaggctgtcggctcgctggacccaagtgctgacctctcgagccagagggggaaagtgttcaagctccggaatgaaacccaccacctctttgtgggtctgtacccagggaccacctattccttcaccatcaaggccagcacagcaaagggctttgggccccctgtcaccactcggattgccaccaaaatttcagctccatccatgcctgagtacgacacagacaccccattgaatgagacagacacgaccatcacagtgatgctgaaacccgctcagtcccggggagctcctgtcagtgtttatcagctggttgtcaaggaggagcgacttcagaagtcacggagggcagctgacattattgagtgcttttcggtgcccgtgagctatcggaatgcctccagcctcgattctctacactactttgctgctgagttgaagcctgccaacctgcctgtcacccagccatttacagtgggtgacaataagacatacaatggctactggaaccctcctctctctcccctgaaaagctacagcatctacttccaggcactcagcaaagccaatggagagaccaaaatcaactgtgttcgtctggctacaaaaggtgcctccacccagaattctaacactgtggagccagagaagcaggtggacaacaccgtgaagatggctggcgtgatcgctggcctcctcatgttcatcatcattctcctgggcgtgatgctcaccatcaaaaggagaagaaatgcttattcctactcctattacttgaagctggccaagaagcagaaggagacccagagtggagcccagagggagatggggcctgtggcctctgccgacaaacccaccaccaagctcagcgccagccgcaatgatgaaggcttctcttctagttctcaggacgtcaacggattcaatggcagccgcggggagctttcccagcccaccctcacgatccagactcatccctaccgcacctgtgaccctgtggagatgagctacccccgggaccagttccaacccgccatccgggtggctgacttgctgcagcacatcacgcagatgaagagaggccagggctacgggttcaaggaggaatacgaggccttaccagaggggcagacagcttcgtgggacacagccaaggaggatgaaaaccgcaataagaatcgatatgggaacatcatatcctacgaccattcccgggtgaggctgctggtgctggatggagacccgcactctgactacatcaatgccaactacattgacggataccatcgacctcggcactacattgcgactcaaggtccgatgcaggagactgtaaaggacttttggagaatgatctggcaggagaactccgccagcatcgtcatggtcacaaacctggtggaagtgggcagggtgaaatgtgtgcgatactggccagatgacacggaggtctacggagacattaaagtcaccctgattgaaacagagcccctggcagaatacgtcatacgcaccttcacagtccagaagaaaggctaccatgagatccgggagctccgcctcttccacttcaccagctggcctgaccacggcgttccctgctatgccactggccttctgggcttcgtccgccaggtcaagttcctcaaccccccggaagctgggcccatagtggtccactgcagtgctggggctgggcggactggctgcttcattgccattgacaccatgcttgacatggccgagaatgaaggggtggtggacatcttcaactgcgtgcgtgagctccgggcccaaagggtcaacctggtacagacagaggagcaatatgtgtttgtgcacgatgccatcctggaagcgtgcctctgtggcaacactgccatccctgtgtgtgagttccgttctctctactacaatatcagcaggctggacccccagacaaactccagccaaatcaaagatgaatttcagaccctcaacattgtgacaccccgtgtgcggcccgaggactgcagcattgggctcctgccccggaaccatgataagaatcgaagtatggacgtgctgcctctggaccgctgcctgcccttccttatctcagtggacggagaatccagcaattacatcaacgcagcactgatggatagccacaagcagcctgccgccttcgtggtcacccagcaccctctacccaacaccgtggcagacttctggaggctggtgttcgattacaactgctcctctgtggtgatgctgaatgagatggacactgcccagttctgtatgcagtactggcctgagaagacctccgggtgctatgggcccatccaggtggagttcgtctccgcagacatcgacgaggacatcatccacagaatattccgcatctgtaacatggcccggccacaggatggttatcgtatagtccagcacctccagtacattggctggcctgcctaccgggacacgcccccctccaagcgctctctgctcaaagtggtccgacgactggagaagtggcaggagcagtatgacgggagggagggacgtactgtggtccactgcctaaatgggggaggccgtagtggaaccttctgtgccatctgcagtgtgtgtgagatgatccagcagcaaaacatcattgacgtgttccacatcgtgaaaacactgcgtaacaacaaatccaacatggtggagaccctggaacagtataaatttgtatacgaggtggcactggaatatttaagctccttttagctcaatgggatggggaacctgccggagtccagaggctgctgtgaccaagcccccttttgtgtgaatggcagtaactgggctcaggagctctgaggtggcaccctgcctgactccaaggagaagactggtggccctgtgttccacggggggctctgcaccttctgaggggtctcctgttgccgtgggagatgctgctccaaaaggcccaggcttccttttcaacctaaccagccacagccaagggcccaagcagaagtacacccacaagcaaggccttggatttctggctcccagaccacctgcttttgttctgagtttgtggatctcttggcaagccaactgtgcaggtgctggggagtgggaggctcccctgccctccttctccttaggagtggaggagatgtgtgttctgctcctctacgtcatggaaaagattgaggctcttgggggtcactgctctgctgccccctgcaacctccttcaggggcctctggcaccagacatttgcagtctggaccagtgtgaccttacgatgttccctaggccacaagagaggccccccatcctcacacctaacctgcatggggcttcgcccacaaccattctgtaccccttccccagcctgggccttgaccgtccagcattcactggccggccagctgtgtccacagcagtttttgataaaggtgttctttgcttttttgtgtggtcagtgggagggggtggaactgcagggaacttctctgctcctccttgtctttgtaaaaagggaccacctccctggggcagggcttgggctgacctgtaggatgtaacccctgtgtttctttggtggtagctttctttggaagagacaaacaagataagatttgattattttccaaagtgtatgtgaaaagaaactttcttttggagggtgtaaaatcttagtctcttatgtcaaaaagaagggggcgggggagtttgagtatgtacctctaagacaaatctctcgggccttttattttttcctggcaatgtccttaaaagctcccaccctgggacagcatgccactgagcaaggagagatgggtgagcctgaagatggtccctttggtttctggggcaaatagagcaccagctttgtgcataatttggatgtccaaatttgaactccttcctaaagaaacccagcagccaccttgaaaaaggccattgtggagcccattatactttgatttaaaataggccaagagaatcaggcctggagatctagggtcttgtccaaagtgtgagtgagtcaatgagagggaaccaacatttgctaagtctctactgtatgccagggatcatgcttggcactttccataggacatttcacacagtccttagaacccccaggagagagctactgacttgttatcatctccatttgatcatctcctccaatgaggaaacccacgcaccttccttagtaatgaaatcctgggttccaaaggggcaggtaatggcaatgagacttctccgtgctgttttcttcatcttctctaagccaagcaattattttatggagggaaaataaggccagaaacttctgagcagataactccacaaatggaaatttagtactttcttcctgatgccagttcttctgggaagcgcagaatttcagatatattttagtaacacattcccagctccccaggaaagccagtctcatctaatttcttagtcagtaaaaacaattccctgttccttcaggctatgaatggaccagccagggaaactctcgaccttgatctctagccagtgcttaggcccaatatctgacagcctcaggtgggctgggacctaggaagctccatcttgaaggctggtctagccccagacagggcatgaggggcagagaattcaagaaggtacagctttggccctcaagagcccactgtatgctggggaaatggaaccatggtgcagtagtgtggagtggatgagtgttccatgagcctaggagcaagaaagtctcttcggcctcgggcttcctggagaaggggacgtccattcctgctgggtcttaacaagcataaaaaggaaaaaaaggaaactcaggcaaagggatccatatgtgcaatggcaaagaaatgtgaaaaggcattgggagaagcagtctgggggaggccagcccagtgcgggcacagcacaacacggggagcagcaagagatgagccagggtccaggagacagatgcccatcgcgagtacagactttgtcctattggcaacaaggagtccatggagctttagagagatgcactcagcttcgtgttggccaagactccttctgggccaatggggctgcctcttttcctttcatcagacactgtgaaaacattcccttaagcgtgcactttttaatatcacatctatttgtctgtctgctcattgttttgttgctggaactaaatatgcaatggatcatgagactcagattctatgagaaacccagggtctctgctttaccacggagcagggtcaccaacccagatctccaggcccatgaggatggaacatgaaaggagccgacaaaagttgcttccattggcatgggctctggagctgtccagaagtccagggacaccagacttgatcaaggaagggctgtcactttagaggttcaaaaggaagtgcctcaaagcaaaggcaagcaaaggaaccccacgatgaacttgctcttttcctttgatgagcctctccccaggtgtatttcagcagaccccggggacccacccccactgggcctgctggcctccctcggctccagcccaatgccccagctggccttccccagcctgcaaggagcctgtagcatggcaaatctgcctgctgtatgctattttcttagatcttggtacatccagacaggatgagggtggagggagagctatttaacacaaatcctaagatttttttctgctcaggaaggggtgaaatagctggcagatacaaaagacagtggcttttatcattttaaatggtaggaatttaaggtgtgacttcagggagaaacaaacttgcaaaaaaaaaaaatctcaggccatgttggggtaacccagcaagggccagtgatgatttcccccagctcatccccttattttcccacaacccaaccattctctaaagcaggacagtgaataggtcttaggccagtgcacacaggaagaaattgaggcttatggatggggatgacttccctaagatcccatgggacaaggatgtggcaaggcttggatgagatggggcaccagtgcccaggaatttgaacattttcctttacccaggaaatctccggagccaacaccaccacccccagggggtctccccaccccaccccatttacagggtgagctcagcctgtcatgagcagaggaaaatattattaatgctctctgagtctttacaacaggagctcttacctcatagatgtgggctctgtttggggaagatgcaaggaagtaatgagaagcccaggaaatttctccacctgtgtttatggcctaaatagcttcaggatgtatcttagctgcactccaacattgcatcctttctggggtgaagaatctgggccaaccaggggtccttgggcctctagaaggccacagtaggcctctctttgtgggaatggaaggggacagtttgcttttagtgctggccctctctgtgggtgtggcctgcaaaggaaccaacagaccctatgctggggactctaacatgtgagctcattaaattcttccagcattctaaaggagggtttgtgattgtcaccatttactgatgaggaaactaaggctcctaggggagaaatcacttgcccacagttccacagctagtgagtgaatgaaccaggatttaaaccggttttttctcactacagagacaatatttttccaccattgtatctcacatttttcccaggaggttacccataacagaagagactagagtggaacagatacgtcagtggataaagctcaaagcaaacaacagtaagcttaaaattccttcatagtctcatgttttacgttcacaattcatgcaaaatttgcattccactttctgatttagccttgttggttttaatatgactctatgaatatttcaaaaaaaaatgtgctctgttcctcatgttgttctgttctgttcaccccgctatgacggaccctaggtcagctggtcttcagcttgaccctagaattgactctaggagcagtgaccctgctgcctcccagagccagttataggctcaagatcaagaccaactgaccttctcctaggcagctcctttggtgtgtgggtgctctgacctcactgttcatgaggggacctcaactaaggcatcttccagttgggtgctggaaggaacccattaactcacactagaatgatgaggatttgctcatctggcgtggagaaggatgagcccacaaaaccctaaagggaaaagagaagctggacacagctgtactcagcagattcctgaatgctaggctggaaagtggtgcctgttgtccaagtggagtcacatggttgctaatgtgggcaagtctgaggacacacttcatgagcagctggggtctggaaggctcctcactttaccctagccacacataattactgggtgcctacagcacctagcaccttggagggggcactattaggaaatcgagattactatggcacaattaattcctgggtaaggcatggggttgtggtggacagagctcagtctttagtttgaacgaaaacatacatacatgaaaaacatacatgaaaaaaggaccctcatcaacattagaaggggtagatttggagcactttaggcaggaaaacaggaacgcaaggccaggaaactggaacccagtgaatactcagaaccgaggatgcagatgacttatttagcaaaatggtcacttctgtgacatagctggagaaaggatgggtaacagcttgccagagccacttggaacaagggcaaatctcagtgtctggggcaaaagatgatgcatttccctctgacccatcatgtttattcatcctccactccccattgccacactagctcttgctgtaagtcctcaccaggatctacatttcctcgtcgctggtgggaaccccttagagtacatagaggtatcagtccagtaagactgctctacacaacagaagtgaggcccagggagtagcagccaggcccttatcctgttacctctgcaggagtgactgcccaacccagatccagagacattgaaggaaatgataattccttggtacctcactgccttgggacaaaatgaagaaagccacccttccttaggctgcagcttgccactcctgggctgggtaaacaggtcatcagcaccaagctcaaccaggagtaacactctggaagacatgggtgagcccaagaggaagcatgaacaggacgctgttcctaagtcatgtcaacaggttgtgctgggccaggatccccagggaaaaaaatggtcaacccaactggagggtaggttagaagaaaaaaaacataaacgtggatagtcatgtcatctcaaatccctgacttggcttccccattacttaacagtctgagctccttcttagcctgtgaccagcttcaaatcacagccaagtaaaacaaggaaataggaaaagtaaatccaactagaagagacaagctgagattcagatttgtttactcctcccatgcaaagtttccctgttggaggttttccatgtatacatgtctagaagtgatagaatgcaaggccttggctttgtcttgcagggatctgcctttgaggtcatagactgaacagcagggagagaggttagtggtggagtgtggggggagctgttctagctccagtttcttctgacacatttttcaggatcatggatctgatcctccgaagcacagcagagatatctaagccatatttgtgcacatgagcagactcttctagttttttagtaaccagggatgggcttttgcatggcactgactatagagatgtcttgtagagatcaagccagtcttttgcatcccacctgcccacctccagaagagatgggaaaaggtcatcaaagggcattcaccaactgaaatccactcatgaatgttaggtctctaaaaggaggcatcaacactcacaatggtagcctccaaacctagcatcccacctatctaagagctcaggggtggtccactggggcagatacaagggaagtgcaagggctcaggatgaaagaaaatctattgggaagagttttaggggcttgatcattatggggcttccttctatatctgagaactgctctgggtggtgagatgtggactctgatccttaattggaatgttcggagaatgagtgtctggtggccttgaagtgttggacagaaaagtatcagtataaaagcctggagctcagggtaattaatgtagttcatggttccttagtgagcaggactcttggatgtggaggagaaagggtcataggaagtaaaccaccaaaattacaaaattgagtctctgtacaattacttcagtgcctttgggcttatgaatacaaatcagtgggccttctctatgatggtccaacaaactctcagtgtccaccctgtccctgtatctcccatggaagatgaataatgtcaggtgttctttgggtcaaaggccccagggcagtctggaggcttagagggcagagtggtgtcattccatgtaaagttaggcttctgaggggtcaggcagaatatggtgtccatatcttccatagctctgcagattcttggatgaagtcaagcacagtttgctagacccaggtcactcctctgagtataactaggacccatgagtgaaacttaatagctgtaaggaagaacctgctgtctgccagagaggataagctgcccatctcagcagctgtctaaaagaaggcaggtgtctctttaaagggaagagaagcattggtgaaatggatttcaggtcacttccattccagatgggtgagatcttgtggagctgggatcatgtttgaactcattcatacctgtagagcacgaatccaagtagattgtgtttggtctgtacaggctgaagccccctgctctcccacccaagtgcccccactgagcaggccaacatgctgttgtggccacatatactgggctgatccaggctggttatcaccaaacagcaaaccatagggaacagctgctttgccatagacccaatacccatgtagatctctcatgagagcagccataactcagacccactgaccaacagggccatgagtgacagccagaaccagtgaaggtccaagtaggacacagagcagggcttttcttaccatacacattatctccagaggttatttctaccccactccctattcaaggcctgttggagcacactgcaaaagcaaaagcacagtaactcaatttacacatgattataatcatttccagtgcacacatttcatcaccaggtggatcctgagctagcccatgtaaatccgggttaacccatattggtaatcatactcaaaagcacttttcaccctacattctactagccaatcaaagacaaagagttgtggcctctaccattgccttggcttctggacaccctcacaagctatcccaaggttcccgctcaactccagggaggctgacatcttcacatccactgggcatataatattgcatgagaccaaagtctccacactctttgcagcctcctccatgaatcccaatggcctgcacttgtacagtttgggtgtttgatagataaagcacgtatgagaagagaaaacaaaataaatcaactttttaaaaaagccagcactgtgctgtcaatgttttttttttcttttcaattctagctcagaaaagcagaaggtaaataatgtcaggtcaatgaatatcagatatattttttgactgtacattacagtgaagtgtaatctttttacacctgcaagtccatcttatttattcttgtaaatgttccctgacaatgtttgtaacatggctgtgttaaaaaatctatacaataaagctgtgaccctgagattcatgttttcctaagata

SEQ ID NO: 171927 - DNA, 12681 bp, Homo sapiens
  Payload ID: 13777
  Gene Symbol: PTPRT
  Gene Name: protein tyrosine phosphatase, receptor type, T
  Uniprot ID: O14522
  ENST ID: ENST00000373193
  CDS Start-End: 185-4576
cctcccgcctcagttcgcgccgcgcctcggcttggaacgcaggagcgccggctccgggagcccgagcggagccagccgcgcgcacagccagcggccgcgccggcgatgcggggccaccccgcgcccgccccagtcccggccccggcccccgcgggaaggggctgagctgcccgccgccgcccggatggcgagcctcgccgcgctcgccctcagcctgctcctgaggctgcagctgccgccactgcccggcgcccgggctcagagcgccgcaggtggctgttcctttgatgagcactacagcaactgtggttatagtgtggctctagggaccaatgggttcacctgggagcagattaacacatgggagaaaccaatgctggaccaggcagtgcccacaggatctttcatgatggtgaacagctctgggagagcctctggccagaaggcccaccttctcctgccaaccctgaaggagaatgacacccactgcatcgacttccattactacttctccagccgtgacaggtccagcccaggggccttgaacgtctacgtgaaggtgaatggtggcccccaagggaaccctgtgtggaatgtgtccggggtcgtcactgagggctgggtgaaggcagagctcgccatcagcactttctggccacatttctatcaggtgatatttgaatccgtctcattgaagggtcatcctggctacatcgccgtggacgaggtccgggtccttgctcatccatgcagaaaagcacctcattttctgcgactccaaaacgtggaggtgaatgtggggcagaatgccacatttcagtgcattgctggtgggaagtggtctcagcatgacaagctttggctccagcaatggaatggcagggacacggccctgatggtcacccgtgtggtcaaccacaggcgcttctcagccacagtcagtgtggcagacactgcccagcggagcgtcagcaagtaccgctgtgtgatccgctctgatggtgggtctggtgtgtccaactacgcggagctgatcgtgaaagagcctcccacgcccattgctcccccagagctgctggctgtgggggccacatacctgtggatcaagccaaatgccaactccatcatcggggatggccccatcatcctgaaggaagtggaatatcgcaccaccacaggcacgtgggcagagacccacatagtcgactctcccaactataagctgtggcatctggaccccgatgttgagtatgagatccgagtgctcctcacacgaccaggtgaggggggtacgggaccgccagggcctcccctcaccaccaggaccaagtgtgcagatccggtacatggcccacagaacgtggaaatcgtagacatcagagcccggcagctgaccctgcagtgggagcccttcggctacgcggtgacccgctgccatagctacaacctcaccgtgcagtaccagtatgtgttcaaccagcagcagtacgaggccgaggaggtcatccagacctcctcccactacaccctgcgaggcctgcgccccttcatgaccatccggctgcgactcttgctgtctaaccccgagggccgaatggagagcgaggagctggtggtgcagactgaggaagacgttccaggagctgttcctctagaatccatccaaggggggccctttgaggagaagatctacatccagtggaaacctcccaatgagaccaatggggtcatcacgctctacgagatcaactacaaggctgtcggctcgctggacccaagtgctgacctctcgagccagagggggaaagtgttcaagctccggaatgaaacccaccacctctttgtgggtctgtacccagggaccacctattccttcaccatcaaggccagcacagcaaagggctttgggccccctgtcaccactcggattgccaccaaaatttcagctccatccatgcctgagtacgacacagacaccccattgaatgagacagacacgaccatcacagtgatgctgaaacccgctcagtcccggggagctcctgtcagtgtttatcagctggttgtcaaggaggagcgacttcagaagtcacggagggcagctgacattattgagtgcttttcggtgcccgtgagctatcggaatgcctccagcctcgattctctacactactttgctgctgagttgaagcctgccaacctgcctgtcacccagccatttacagtgggtgacaataagacatacaatggctactggaaccctcctctctctcccctgaaaagctacagcatctacttccaggcactcagcaaagccaatggagagaccaaaatcaactgtgttcgtctggctacaaaagcaccaatgggcagcgcccaggtgaccccggggactccactctgcctcctcaccacaggtgcctccacccagaattctaacactgtggagccagagaagcaggtggacaacaccgtgaagatggctggcgtgatcgctggcctcctcatgttcatcatcattctcctgggcgtgatgctcaccatcaaaaggagaagaaatgcttattcctactcctattacttgtcccaaaggaagctggccaagaagcagaaggagacccagagtggagcccagagggagatggggcctgtggcctctgccgacaaacccaccaccaagctcagcgccagccgcaatgatgaaggcttctcttctagttctcaggacgtcaacggattcacagatggcagccgcggggagctttcccagcccaccctcacgatccagactcatccctaccgcacctgtgaccctgtggagatgagctacccccgggaccagttccaacccgccatccgggtggctgacttgctgcagcacatcacgcagatgaagagaggccagggctacgggttcaaggaggaatacgaggccttaccagaggggcagacagcttcgtgggacacagccaaggaggatgaaaaccgcaataagaatcgatatgggaacatcatatcctacgaccattcccgggtgaggctgctggtgctggatggagacccgcactctgactacatcaatgccaactacattgacggataccatcgacctcggcactacattgcgactcaaggtccgatgcaggagactgtaaaggacttttggagaatgatctggcaggagaactccgccagcatcgtcatggtcacaaacctggtggaagtgggcagggtgaaatgtgtgcgatactggccagatgacacggaggtctacggagacattaaagtcaccctgattgaaacagagcccctggcagaatacgtcatacgcaccttcacagtccagaagaaaggctaccatgagatccgggagctccgcctcttccacttcaccagctggcctgaccacggcgttccctgctatgccactggccttctgggcttcgtccgccaggtcaagttcctcaaccccccggaagctgggcccatagtggtccactgcagtgctggggctgggcggactggctgcttcattgccattgacaccatgcttgacatggccgagaatgaaggggtggtggacatcttcaactgcgtgcgtgagctccgggcccaaagggtcaacctggtacagacagaggagcaatatgtgtttgtgcacgatgccatcctggaagcgtgcctctgtggcaacactgccatccctgtgtgtgagttccgttctctctactacaatatcagcaggctggacccccagacaaactccagccaaatcaaagatgaatttcagaccctcaacattgtgacaccccgtgtgcggcccgaggactgcagcattgggctcctgccccggaaccatgataagaatcgaagtatggacgtgctgcctctggaccgctgcctgcccttccttatctcagtggacggagaatccagcaattacatcaacgcagcactgatggatagccacaagcagcctgccgccttcgtggtcacccagcaccctctacccaacaccgtggcagacttctggaggctggtgttcgattacaactgctcctctgtggtgatgctgaatgagatggacactgcccagttctgtatgcagtactggcctgagaagacctccgggtgctatgggcccatccaggtggagttcgtctccgcagacatcgacgaggacatcatccacagaatattccgcatctgtaacatggcccggccacaggatggttatcgtatagtccagcacctccagtacattggctggcctgcctaccgggacacgcccccctccaagcgctctctgctcaaagtggtccgacgactggagaagtggcaggagcagtatgacgggagggagggacgtactgtggtccactgcctaaatgggggaggccgtagtggaaccttctgtgccatctgcagtgtgtgtgagatgatccagcagcaaaacatcattgacgtgttccacatcgtgaaaacactgcgtaacaacaaatccaacatggtggagaccctggaacagtataaatttgtatacgaggtggcactggaatatttaagctccttttagctcaatgggatggggaacctgccggagtccagaggctgctgtgaccaagcccccttttgtgtgaatggcagtaactgggctcaggagctctgaggtggcaccctgcctgactccaaggagaagactggtggccctgtgttccacggggggctctgcaccttctgaggggtctcctgttgccgtgggagatgctgctccaaaaggcccaggcttccttttcaacctaaccagccacagccaagggcccaagcagaagtacacccacaagcaaggccttggatttctggctcccagaccacctgcttttgttctgagtttgtggatctcttggcaagccaactgtgcaggtgctggggagtgggaggctcccctgccctccttctccttaggagtggaggagatgtgtgttctgctcctctacgtcatggaaaagattgaggctcttgggggtcactgctctgctgccccctgcaacctccttcaggggcctctggcaccagacatttgcagtctggaccagtgtgaccttacgatgttccctaggccacaagagaggccccccatcctcacacctaacctgcatggggcttcgcccacaaccattctgtaccccttccccagcctgggccttgaccgtccagcattcactggccggccagctgtgtccacagcagtttttgataaaggtgttctttgcttttttgtgtggtcagtgggagggggtggaactgcagggaacttctctgctcctccttgtctttgtaaaaagggaccacctccctggggcagggcttgggctgacctgtaggatgtaacccctgtgtttctttggtggtagctttctttggaagagacaaacaagataagatttgattattttccaaagtgtatgtgaaaagaaactttcttttggagggtgtaaaatcttagtctcttatgtcaaaaagaagggggcgggggagtttgagtatgtacctctaagacaaatctctcgggccttttattttttcctggcaatgtccttaaaagctcccaccctgggacagcatgccactgagcaaggagagatgggtgagcctgaagatggtccctttggtttctggggcaaatagagcaccagctttgtgcataatttggatgtccaaatttgaactccttcctaaagaaacccagcagccaccttgaaaaaggccattgtggagcccattatactttgatttaaaataggccaagagaatcaggcctggagatctagggtcttgtccaaagtgtgagtgagtcaatgagagggaaccaacatttgctaagtctctactgtatgccagggatcatgcttggcactttccataggacatttcacacagtccttagaacccccaggagagagctactgacttgttatcatctccatttgatcatctcctccaatgaggaaacccacgcaccttccttagtaatgaaatcctgggttccaaaggggcaggtaatggcaatgagacttctccgtgctgttttcttcatcttctctaagccaagcaattattttatggagggaaaataaggccagaaacttctgagcagataactccacaaatggaaatttagtactttcttcctgatgccagttcttctgggaagcgcagaatttcagatatattttagtaacacattcccagctccccaggaaagccagtctcatctaatttcttagtcagtaaaaacaattccctgttccttcaggctatgaatggaccagccagggaaactctcgaccttgatctctagccagtgcttaggcccaatatctgacagcctcaggtgggctgggacctaggaagctccatcttgaaggctggtctagccccagacagggcatgaggggcagagaattcaagaaggtacagctttggccctcaagagcccactgtatgctggggaaatggaaccatggtgcagtagtgtggagtggatgagtgttccatgagcctaggagcaagaaagtctcttcggcctcgggcttcctggagaaggggacgtccattcctgctgggtcttaacaagcataaaaaggaaaaaaaggaaactcaggcaaagggatccatatgtgcaatggcaaagaaatgtgaaaaggcattgggagaagcagtctgggggaggccagcccagtgcgggcacagcacaacacggggagcagcaagagatgagccagggtccaggagacagatgcccatcgcgagtacagactttgtcctattggcaacaaggagtccatggagctttagagagatgcactcagcttcgtgttggccaagactccttctgggccaatggggctgcctcttttcctttcatcagacactgtgaaaacattcccttaagcgtgcactttttaatatcacatctatttgtctgtctgctcattgttttgttgctggaactaaatatgcaatggatcatgagactcagattctatgagaaacccagggtctctgctttaccacggagcagggtcaccaacccagatctccaggcccatgaggatggaacatgaaaggagccgacaaaagttgcttccattggcatgggctctggagctgtccagaagtccagggacaccagacttgatcaaggaagggctgtcactttagaggttcaaaaggaagtgcctcaaagcaaaggcaagcaaaggaaccccacgatgaacttgctcttttcctttgatgagcctctccccaggtgtatttcagcagaccccggggacccacccccactgggcctgctggcctccctcggctccagcccaatgccccagctggccttccccagcctgcaaggagcctgtagcatggcaaatctgcctgctgtatgctattttcttagatcttggtacatccagacaggatgagggtggagggagagctatttaacacaaatcctaagatttttttctgctcaggaaggggtgaaatagctggcagatacaaaagacagtggcttttatcattttaaatggtaggaatttaaggtgtgacttcagggagaaacaaacttgcaaaaaaaaaaaatctcaggccatgttggggtaacccagcaagggccagtgatgatttcccccagctcatccccttattttcccacaacccaaccattctctaaagcaggacagtgaataggtcttaggccagtgcacacaggaagaaattgaggcttatggatggggatgacttccctaagatcccatgggacaaggatgtggcaaggcttggatgagatggggcaccagtgcccaggaatttgaacattttcctttacccaggaaatctccggagccaacaccaccacccccagggggtctccccaccccaccccatttacagggtgagctcagcctgtcatgagcagaggaaaatattattaatgctctctgagtctttacaacaggagctcttacctcatagatgtgggctctgtttggggaagatgcaaggaagtaatgagaagcccaggaaatttctccacctgtgtttatggcctaaatagcttcaggatgtatcttagctgcactccaacattgcatcctttctggggtgaagaatctgggccaaccaggggtccttgggcctctagaaggccacagtaggcctctctttgtgggaatggaaggggacagtttgcttttagtgctggccctctctgtgggtgtggcctgcaaaggaaccaacagaccctatgctggggactctaacatgtgagctcattaaattcttccagcattctaaaggagggtttgtgattgtcaccatttactgatgaggaaactaaggctcctaggggagaaatcacttgcccacagttccacagctagtgagtgaatgaaccaggatttaaaccggttttttctcactacagagacaatatttttccaccattgtatctcacatttttcccaggaggttacccataacagaagagactagagtggaacagatacgtcagtggataaagctcaaagcaaacaacagtaagcttaaaattccttcatagtctcatgttttacgttcacaattcatgcaaaatttgcattccactttctgatttagccttgttggttttaatatgactctatgaatatttcaaaaaaaaatgtgctctgttcctcatgttgttctgttctgttcaccccgctatgacggaccctaggtcagctggtcttcagcttgaccctagaattgactctaggagcagtgaccctgctgcctcccagagccagttataggctcaagatcaagaccaactgaccttctcctaggcagctcctttggtgtgtgggtgctctgacctcactgttcatgaggggacctcaactaaggcatcttccagttgggtgctggaaggaacccattaactcacactagaatgatgaggatttgctcatctggcgtggagaaggatgagcccacaaaaccctaaagggaaaagagaagctggacacagctgtactcagcagattcctgaatgctaggctggaaagtggtgcctgttgtccaagtggagtcacatggttgctaatgtgggcaagtctgaggacacacttcatgagcagctggggtctggaaggctcctcactttaccctagccacacataattactgggtgcctacagcacctagcaccttggagggggcactattaggaaatcgagattactatggcacaattaattcctgggtaaggcatggggttgtggtggacagagctcagtctttagtttgaacgaaaacatacatacatgaaaaacatacatgaaaaaaggaccctcatcaacattagaaggggtagatttggagcactttaggcaggaaaacaggaacgcaaggccaggaaactggaacccagtgaatactcagaaccgaggatgcagatgacttatttagcaaaatggtcacttctgtgacatagctggagaaaggatgggtaacagcttgccagagccacttggaacaagggcaaatctcagtgtctggggcaaaagatgatgcatttccctctgacccatcatgtttattcatcctccactccccattgccacactagctcttgctgtaagtcctcaccaggatctacatttcctcgtcgctggtgggaaccccttagagtacatagaggtatcagtccagtaagactgctctacacaacagaagtgaggcccagggagtagcagccaggcccttatcctgttacctctgcaggagtgactgcccaacccagatccagagacattgaaggaaatgataattccttggtacctcactgccttgggacaaaatgaagaaagccacccttccttaggctgcagcttgccactcctgggctgggtaaacaggtcatcagcaccaagctcaaccaggagtaacactctggaagacatgggtgagcccaagaggaagcatgaacaggacgctgttcctaagtcatgtcaacaggttgtgctgggccaggatccccagggaaaaaaatggtcaacccaactggagggtaggttagaagaaaaaaaacataaacgtggatagtcatgtcatctcaaatccctgacttggcttccccattacttaacagtctgagctccttcttagcctgtgaccagcttcaaatcacagccaagtaaaacaaggaaataggaaaagtaaatccaactagaagagacaagctgagattcagatttgtttactcctcccatgcaaagtttccctgttggaggttttccatgtatacatgtctagaagtgatagaatgcaaggccttggctttgtcttgcagggatctgcctttgaggtcatagactgaacagcagggagagaggttagtggtggagtgtggggggagctgttctagctccagtttcttctgacacatttttcaggatcatggatctgatcctccgaagcacagcagagatatctaagccatatttgtgcacatgagcagactcttctagttttttagtaaccagggatgggcttttgcatggcactgactatagagatgtcttgtagagatcaagccagtcttttgcatcccacctgcccacctccagaagagatgggaaaaggtcatcaaagggcattcaccaactgaaatccactcatgaatgttaggtctctaaaaggaggcatcaacactcacaatggtagcctccaaacctagcatcccacctatctaagagctcaggggtggtccactggggcagatacaagggaagtgcaagggctcaggatgaaagaaaatctattgggaagagttttaggggcttgatcattatggggcttccttctatatctgagaactgctctgggtggtgagatgtggactctgatccttaattggaatgttcggagaatgagtgtctggtggccttgaagtgttggacagaaaagtatcagtataaaagcctggagctcagggtaattaatgtagttcatggttccttagtgagcaggactcttggatgtggaggagaaagggtcataggaagtaaaccaccaaaattacaaaattgagtctctgtacaattacttcagtgcctttgggcttatgaatacaaatcagtgggccttctctatgatggtccaacaaactctcagtgtccaccctgtccctgtatctcccatggaagatgaataatgtcaggtgttctttgggtcaaaggccccagggcagtctggaggcttagagggcagagtggtgtcattccatgtaaagttaggcttctgaggggtcaggcagaatatggtgtccatatcttccatagctctgcagattcttggatgaagtcaagcacagtttgctagacccaggtcactcctctgagtataactaggacccatgagtgaaacttaatagctgtaaggaagaacctgctgtctgccagagaggataagctgcccatctcagcagctgtctaaaagaaggcaggtgtctctttaaagggaagagaagcattggtgaaatggatttcaggtcacttccattccagatgggtgagatcttgtggagctgggatcatgtttgaactcattcatacctgtagagcacgaatccaagtagattgtgtttggtctgtacaggctgaagccccctgctctcccacccaagtgcccccactgagcaggccaacatgctgttgtggccacatatactgggctgatccaggctggttatcaccaaacagcaaaccatagggaacagctgctttgccatagacccaatacccatgtagatctctcatgagagcagccataactcagacccactgaccaacagggccatgagtgacagccagaaccagtgaaggtccaagtaggacacagagcagggcttttcttaccatacacattatctccagaggttatttctaccccactccctattcaaggcctgttggagcacactgcaaaagcaaaagcacagtaactcaatttacacatgattataatcatttccagtgcacacatttcatcaccaggtggatcctgagctagcccatgtaaatccgggttaacccatattggtaatcatactcaaaagcacttttcaccctacattctactagccaatcaaagacaaagagttgtggcctctaccattgccttggcttctggacaccctcacaagctatcccaaggttcccgctcaactccagggaggctgacatcttcacatccactgggcatataatattgcatgagaccaaagtctccacactctttgcagcctcctccatgaatcccaatggcctgcacttgtacagtttgggtgtttgatagataaagcacgtatgagaagagaaaacaaaataaatcaactttttaaaaaagccagcactgtgctgtcaatgttttttttttcttttcaattctagctcagaaaagcagaaggtaaataatgtcaggtcaatgaatatcagatatattttttgactgtacattacagtgaagtgtaatctttttacacctgcaagtccatcttatttattcttgtaaatgttccctgacaatgtttgtaacatggctgtgttaaaaaatctatacaataaagctgtgaccctg

SEQ ID NO: 171928 - DNA, 12746 bp, Homo sapiens
  Payload ID: 13777
  Gene Symbol: PTPRT
  Gene Name: protein tyrosine phosphatase, receptor type, T
  ENST ID: ENST00000373198
  CDS Start-End: 237-4619
ttaggactcgggggacaccgccccccgccccccgcgtcccgcccccgcccagcctcccgcctcagttcgcgccgcgcctcggcttggaacgcaggagcgccggctccgggagcccgagcggagccagccgcgcgcacagccagcggccgcgccggcgatgcggggccaccccgcgcccgccccagtcccggccccggcccccgcgggaaggggctgagctgcccgccgccgcccggatggcgagcctcgccgcgctcgccctcagcctgctcctgaggctgcagctgccgccactgcccggcgcccgggctcagagcgccgcaggtggctgttcctttgatgagcactacagcaactgtggttatagtgtggctctagggaccaatgggttcacctgggagcagattaacacatgggagaaaccaatgctggaccaggcagtgcccacaggatctttcatgatggtgaacagctctgggagagcctctggccagaaggcccaccttctcctgccaaccctgaaggagaatgacacccactgcatcgacttccattactacttctccagccgtgacaggtccagcccaggggccttgaacgtctacgtgaaggtgaatggtggcccccaagggaaccctgtgtggaatgtgtccggggtcgtcactgagggctgggtgaaggcagagctcgccatcagcactttctggccacatttctatcaggtgatatttgaatccgtctcattgaagggtcatcctggctacatcgccgtggacgaggtccgggtccttgctcatccatgcagaaaagcacctcattttctgcgactccaaaacgtggaggtgaatgtggggcagaatgccacatttcagtgcattgctggtgggaagtggtctcagcatgacaagctttggctccagcaatggaatggcagggacacggccctgatggtcacccgtgtggtcaaccacaggcgcttctcagccacagtcagtgtggcagacactgcccagcggagcgtcagcaagtaccgctgtgtgatccgctctgatggtgggtctggtgtgtccaactacgcggagctgatcgtgaaagagcctcccacgcccattgctcccccagagctgctggctgtgggggccacatacctgtggatcaagccaaatgccaactccatcatcggggatggccccatcatcctgaaggaagtggaatatcgcaccaccacaggcacgtgggcagagacccacatagtcgactctcccaactataagctgtggcatctggaccccgatgttgagtatgagatccgagtgctcctcacacgaccaggtgaggggggtacgggaccgccagggcctcccctcaccaccaggaccaagtgtgcagatccggtacatggcccacagaacgtggaaatcgtagacatcagagcccggcagctgaccctgcagtgggagcccttcggctacgcggtgacccgctgccatagctacaacctcaccgtgcagtaccagtatgtgttcaaccagcagcagtacgaggccgaggaggtcatccagacctcctcccactacaccctgcgaggcctgcgccccttcatgaccatccggctgcgactcttgctgtctaaccccgagggccgaatggagagcgaggagctggtggtgcagactgaggaagacgttccaggagctgttcctctagaatccatccaaggggggccctttgaggagaagatctacatccagtggaaacctcccaatgagaccaatggggtcatcacgctctacgagatcaactacaaggctgtcggctcgctggacccaagtgctgacctctcgagccagagggggaaagtgttcaagctccggaatgaaacccaccacctctttgtgggtctgtacccagggaccacctattccttcaccatcaaggccagcacagcaaagggctttgggccccctgtcaccactcggattgccaccaaaatttcagctccatccatgcctgagtacgacacagacaccccattgaatgagacagacacgaccatcacagtgatgctgaaacccgctcagtcccggggagctcctgtcagtgtttatcagctggttgtcaaggaggagcgacttcagaagtcacggagggcagctgacattattgagtgcttttcggtgcccgtgagctatcggaatgcctccagcctcgattctctacactactttgctgctgagttgaagcctgccaacctgcctgtcacccagccatttacagtgggtgacaataagacatacaatggctactggaaccctcctctctctcccctgaaaagctacagcatctacttccaggcactcagcaaagccaatggagagaccaaaatcaactgtgttcgtctggctacaaaagcaccaatgggcagcgcccaggtgaccccggggactccactctgcctcctcaccacaggtgcctccacccagaattctaacactgtggagccagagaagcaggtggacaacaccgtgaagatggctggcgtgatcgctggcctcctcatgttcatcatcattctcctgggcgtgatgctcaccatcaaaaggagaagaaatgcttattcctactcctattacttgaagctggccaagaagcagaaggagacccagagtggagcccagagggagatggggcctgtggcctctgccgacaaacccaccaccaagctcagcgccagccgcaatgatgaaggcttctcttctagttctcaggacgtcaacggattcacagatggcagccgcggggagctttcccagcccaccctcacgatccagactcatccctaccgcacctgtgaccctgtggagatgagctacccccgggaccagttccaacccgccatccgggtggctgacttgctgcagcacatcacgcagatgaagagaggccagggctacgggttcaaggaggaatacgaggccttaccagaggggcagacagcttcgtgggacacagccaaggaggatgaaaaccgcaataagaatcgatatgggaacatcatatcctacgaccattcccgggtgaggctgctggtgctggatggagacccgcactctgactacatcaatgccaactacattgacggataccatcgacctcggcactacattgcgactcaaggtccgatgcaggagactgtaaaggacttttggagaatgatctggcaggagaactccgccagcatcgtcatggtcacaaacctggtggaagtgggcagggtgaaatgtgtgcgatactggccagatgacacggaggtctacggagacattaaagtcaccctgattgaaacagagcccctggcagaatacgtcatacgcaccttcacagtccagaagaaaggctaccatgagatccgggagctccgcctcttccacttcaccagctggcctgaccacggcgttccctgctatgccactggccttctgggcttcgtccgccaggtcaagttcctcaaccccccggaagctgggcccatagtggtccactgcagtgctggggctgggcggactggctgcttcattgccattgacaccatgcttgacatggccgagaatgaaggggtggtggacatcttcaactgcgtgcgtgagctccgggcccaaagggtcaacctggtacagacagaggagcaatatgtgtttgtgcacgatgccatcctggaagcgtgcctctgtggcaacactgccatccctgtgtgtgagttccgttctctctactacaatatcagcaggctggacccccagacaaactccagccaaatcaaagatgaatttcagaccctcaacattgtgacaccccgtgtgcggcccgaggactgcagcattgggctcctgccccggaaccatgataagaatcgaagtatggacgtgctgcctctggaccgctgcctgcccttccttatctcagtggacggagaatccagcaattacatcaacgcagcactgatggatagccacaagcagcctgccgccttcgtggtcacccagcaccctctacccaacaccgtggcagacttctggaggctggtgttcgattacaactgctcctctgtggtgatgctgaatgagatggacactgcccagttctgtatgcagtactggcctgagaagacctccgggtgctatgggcccatccaggtggagttcgtctccgcagacatcgacgaggacatcatccacagaatattccgcatctgtaacatggcccggccacaggatggttatcgtatagtccagcacctccagtacattggctggcctgcctaccgggacacgcccccctccaagcgctctctgctcaaagtggtccgacgactggagaagtggcaggagcagtatgacgggagggagggacgtactgtggtccactgcctaaatgggggaggccgtagtggaaccttctgtgccatctgcagtgtgtgtgagatgatccagcagcaaaacatcattgacgtgttccacatcgtgaaaacactgcgtaacaacaaatccaacatggtggagaccctggaacagtataaatttgtatacgaggtggcactggaatatttaagctccttttagctcaatgggatggggaacctgccggagtccagaggctgctgtgaccaagcccccttttgtgtgaatggcagtaactgggctcaggagctctgaggtggcaccctgcctgactccaaggagaagactggtggccctgtgttccacggggggctctgcaccttctgaggggtctcctgttgccgtgggagatgctgctccaaaaggcccaggcttccttttcaacctaaccagccacagccaagggcccaagcagaagtacacccacaagcaaggccttggatttctggctcccagaccacctgcttttgttctgagtttgtggatctcttggcaagccaactgtgcaggtgctggggagtgggaggctcccctgccctccttctccttaggagtggaggagatgtgtgttctgctcctctacgtcatggaaaagattgaggctcttgggggtcactgctctgctgccccctgcaacctccttcaggggcctctggcaccagacatttgcagtctggaccagtgtgaccttacgatgttccctaggccacaagagaggccccccatcctcacacctaacctgcatggggcttcgcccacaaccattctgtaccccttccccagcctgggccttgaccgtccagcattcactggccggccagctgtgtccacagcagtttttgataaaggtgttctttgcttttttgtgtggtcagtgggagggggtggaactgcagggaacttctctgctcctccttgtctttgtaaaaagggaccacctccctggggcagggcttgggctgacctgtaggatgtaacccctgtgtttctttggtggtagctttctttggaagagacaaacaagataagatttgattattttccaaagtgtatgtgaaaagaaactttcttttggagggtgtaaaatcttagtctcttatgtcaaaaagaagggggcgggggagtttgagtatgtacctctaagacaaatctctcgggccttttattttttcctggcaatgtccttaaaagctcccaccctgggacagcatgccactgagcaaggagagatgggtgagcctgaagatggtccctttggtttctggggcaaatagagcaccagctttgtgcataatttggatgtccaaatttgaactccttcctaaagaaacccagcagccaccttgaaaaaggccattgtggagcccattatactttgatttaaaataggccaagagaatcaggcctggagatctagggtcttgtccaaagtgtgagtgagtcaatgagagggaaccaacatttgctaagtctctactgtatgccagggatcatgcttggcactttccataggacatttcacacagtccttagaacccccaggagagagctactgacttgttatcatctccatttgatcatctcctccaatgaggaaacccacgcaccttccttagtaatgaaatcctgggttccaaaggggcaggtaatggcaatgagacttctccgtgctgttttcttcatcttctctaagccaagcaattattttatggagggaaaataaggccagaaacttctgagcagataactccacaaatggaaatttagtactttcttcctgatgccagttcttctgggaagcgcagaatttcagatatattttagtaacacattcccagctccccaggaaagccagtctcatctaatttcttagtcagtaaaaacaattccctgttccttcaggctatgaatggaccagccagggaaactctcgaccttgatctctagccagtgcttaggcccaatatctgacagcctcaggtgggctgggacctaggaagctccatcttgaaggctggtctagccccagacagggcatgaggggcagagaattcaagaaggtacagctttggccctcaagagcccactgtatgctggggaaatggaaccatggtgcagtagtgtggagtggatgagtgttccatgagcctaggagcaagaaagtctcttcggcctcgggcttcctggagaaggggacgtccattcctgctgggtcttaacaagcataaaaaggaaaaaaaggaaactcaggcaaagggatccatatgtgcaatggcaaagaaatgtgaaaaggcattgggagaagcagtctgggggaggccagcccagtgcgggcacagcacaacacggggagcagcaagagatgagccagggtccaggagacagatgcccatcgcgagtacagactttgtcctattggcaacaaggagtccatggagctttagagagatgcactcagcttcgtgttggccaagactccttctgggccaatggggctgcctcttttcctttcatcagacactgtgaaaacattcccttaagcgtgcactttttaatatcacatctatttgtctgtctgctcattgttttgttgctggaactaaatatgcaatggatcatgagactcagattctatgagaaacccagggtctctgctttaccacggagcagggtcaccaacccagatctccaggcccatgaggatggaacatgaaaggagccgacaaaagttgcttccattggcatgggctctggagctgtccagaagtccagggacaccagacttgatcaaggaagggctgtcactttagaggttcaaaaggaagtgcctcaaagcaaaggcaagcaaaggaaccccacgatgaacttgctcttttcctttgatgagcctctccccaggtgtatttcagcagaccccggggacccacccccactgggcctgctggcctccctcggctccagcccaatgccccagctggccttccccagcctgcaaggagcctgtagcatggcaaatctgcctgctgtatgctattttcttagatcttggtacatccagacaggatgagggtggagggagagctatttaacacaaatcctaagatttttttctgctcaggaaggggtgaaatagctggcagatacaaaagacagtggcttttatcattttaaatggtaggaatttaaggtgtgacttcagggagaaacaaacttgcaaaaaaaaaaaatctcaggccatgttggggtaacccagcaagggccagtgatgatttcccccagctcatccccttattttcccacaacccaaccattctctaaagcaggacagtgaataggtcttaggccagtgcacacaggaagaaattgaggcttatggatggggatgacttccctaagatcccatgggacaaggatgtggcaaggcttggatgagatggggcaccagtgcccaggaatttgaacattttcctttacccaggaaatctccggagccaacaccaccacccccagggggtctccccaccccaccccatttacagggtgagctcagcctgtcatgagcagaggaaaatattattaatgctctctgagtctttacaacaggagctcttacctcatagatgtgggctctgtttggggaagatgcaaggaagtaatgagaagcccaggaaatttctccacctgtgtttatggcctaaatagcttcaggatgtatcttagctgcactccaacattgcatcctttctggggtgaagaatctgggccaaccaggggtccttgggcctctagaaggccacagtaggcctctctttgtgggaatggaaggggacagtttgcttttagtgctggccctctctgtgggtgtggcctgcaaaggaaccaacagaccctatgctggggactctaacatgtgagctcattaaattcttccagcattctaaaggagggtttgtgattgtcaccatttactgatgaggaaactaaggctcctaggggagaaatcacttgcccacagttccacagctagtgagtgaatgaaccaggatttaaaccggttttttctcactacagagacaatatttttccaccattgtatctcacatttttcccaggaggttacccataacagaagagactagagtggaacagatacgtcagtggataaagctcaaagcaaacaacagtaagcttaaaattccttcatagtctcatgttttacgttcacaattcatgcaaaatttgcattccactttctgatttagccttgttggttttaatatgactctatgaatatttcaaaaaaaaatgtgctctgttcctcatgttgttctgttctgttcaccccgctatgacggaccctaggtcagctggtcttcagcttgaccctagaattgactctaggagcagtgaccctgctgcctcccagagccagttataggctcaagatcaagaccaactgaccttctcctaggcagctcctttggtgtgtgggtgctctgacctcactgttcatgaggggacctcaactaaggcatcttccagttgggtgctggaaggaacccattaactcacactagaatgatgaggatttgctcatctggcgtggagaaggatgagcccacaaaaccctaaagggaaaagagaagctggacacagctgtactcagcagattcctgaatgctaggctggaaagtggtgcctgttgtccaagtggagtcacatggttgctaatgtgggcaagtctgaggacacacttcatgagcagctggggtctggaaggctcctcactttaccctagccacacataattactgggtgcctacagcacctagcaccttggagggggcactattaggaaatcgagattactatggcacaattaattcctgggtaaggcatggggttgtggtggacagagctcagtctttagtttgaacgaaaacatacatacatgaaaaacatacatgaaaaaaggaccctcatcaacattagaaggggtagatttggagcactttaggcaggaaaacaggaacgcaaggccaggaaactggaacccagtgaatactcagaaccgaggatgcagatgacttatttagcaaaatggtcacttctgtgacatagctggagaaaggatgggtaacagcttgccagagccacttggaacaagggcaaatctcagtgtctggggcaaaagatgatgcatttccctctgacccatcatgtttattcatcctccactccccattgccacactagctcttgctgtaagtcctcaccaggatctacatttcctcgtcgctggtgggaaccccttagagtacatagaggtatcagtccagtaagactgctctacacaacagaagtgaggcccagggagtagcagccaggcccttatcctgttacctctgcaggagtgactgcccaacccagatccagagacattgaaggaaatgataattccttggtacctcactgccttgggacaaaatgaagaaagccacccttccttaggctgcagcttgccactcctgggctgggtaaacaggtcatcagcaccaagctcaaccaggagtaacactctggaagacatgggtgagcccaagaggaagcatgaacaggacgctgttcctaagtcatgtcaacaggttgtgctgggccaggatccccagggaaaaaaatggtcaacccaactggagggtaggttagaagaaaaaaaacataaacgtggatagtcatgtcatctcaaatccctgacttggcttccccattacttaacagtctgagctccttcttagcctgtgaccagcttcaaatcacagccaagtaaaacaaggaaataggaaaagtaaatccaactagaagagacaagctgagattcagatttgtttactcctcccatgcaaagtttccctgttggaggttttccatgtatacatgtctagaagtgatagaatgcaaggccttggctttgtcttgcagggatctgcctttgaggtcatagactgaacagcagggagagaggttagtggtggagtgtggggggagctgttctagctccagtttcttctgacacatttttcaggatcatggatctgatcctccgaagcacagcagagatatctaagccatatttgtgcacatgagcagactcttctagttttttagtaaccagggatgggcttttgcatggcactgactatagagatgtcttgtagagatcaagccagtcttttgcatcccacctgcccacctccagaagagatgggaaaaggtcatcaaagggcattcaccaactgaaatccactcatgaatgttaggtctctaaaaggaggcatcaacactcacaatggtagcctccaaacctagcatcccacctatctaagagctcaggggtggtccactggggcagatacaagggaagtgcaagggctcaggatgaaagaaaatctattgggaagagttttaggggcttgatcattatggggcttccttctatatctgagaactgctctgggtggtgagatgtggactctgatccttaattggaatgttcggagaatgagtgtctggtggccttgaagtgttggacagaaaagtatcagtataaaagcctggagctcagggtaattaatgtagttcatggttccttagtgagcaggactcttggatgtggaggagaaagggtcataggaagtaaaccaccaaaattacaaaattgagtctctgtacaattacttcagtgcctttgggcttatgaatacaaatcagtgggccttctctatgatggtccaacaaactctcagtgtccaccctgtccctgtatctcccatggaagatgaataatgtcaggtgttctttgggtcaaaggccccagggcagtctggaggcttagagggcagagtggtgtcattccatgtaaagttaggcttctgaggggtcaggcagaatatggtgtccatatcttccatagctctgcagattcttggatgaagtcaagcacagtttgctagacccaggtcactcctctgagtataactaggacccatgagtgaaacttaatagctgtaaggaagaacctgctgtctgccagagaggataagctgcccatctcagcagctgtctaaaagaaggcaggtgtctctttaaagggaagagaagcattggtgaaatggatttcaggtcacttccattccagatgggtgagatcttgtggagctgggatcatgtttgaactcattcatacctgtagagcacgaatccaagtagattgtgtttggtctgtacaggctgaagccccctgctctcccacccaagtgcccccactgagcaggccaacatgctgttgtggccacatatactgggctgatccaggctggttatcaccaaacagcaaaccatagggaacagctgctttgccatagacccaatacccatgtagatctctcatgagagcagccataactcagacccactgaccaacagggccatgagtgacagccagaaccagtgaaggtccaagtaggacacagagcagggcttttcttaccatacacattatctccagaggttatttctaccccactccctattcaaggcctgttggagcacactgcaaaagcaaaagcacagtaactcaatttacacatgattataatcatttccagtgcacacatttcatcaccaggtggatcctgagctagcccatgtaaatccgggttaacccatattggtaatcatactcaaaagcacttttcaccctacattctactagccaatcaaagacaaagagttgtggcctctaccattgccttggcttctggacaccctcacaagctatcccaaggttcccgctcaactccagggaggctgacatcttcacatccactgggcatataatattgcatgagaccaaagtctccacactctttgcagcctcctccatgaatcccaatggcctgcacttgtacagtttgggtgtttgatagataaagcacgtatgagaagagaaaacaaaataaatcaactttttaaaaaagccagcactgtgctgtcaatgttttttttttcttttcaattctagctcagaaaagcagaaggtaaataatgtcaggtcaatgaatatcagatatattttttgactgtacattacagtgaagtgtaatctttttacacctgcaagtccatcttatttattcttgtaaatgttccctgacaatgtttgtaacatggctgtgttaaaaaatctatacaataaagctgtgaccctgagattcatgttttcctaagata

SEQ ID NO: 171929 - DNA, 12660 bp, Homo sapiens
  Payload ID: 13777
  Gene Symbol: PTPRT
  Gene Name: protein tyrosine phosphatase, receptor type, T
  ENST ID: ENST00000373201
  CDS Start-End: 238-4533
gttaggactcgggggacaccgccccccgccccccgcgtcccgcccccgcccagcctcccgcctcagttcgcgccgcgcctcggcttggaacgcaggagcgccggctccgggagcccgagcggagccagccgcgcgcacagccagcggccgcgccggcgatgcggggccaccccgcgcccgccccagtcccggccccggcccccgcgggaaggggctgagctgcccgccgccgcccggatggcgagcctcgccgcgctcgccctcagcctgctcctgaggctgcagctgccgccactgcccggcgcccgggctcagagcgccgcaggtggctgttcctttgatgagcactacagcaactgtggttatagtgtggctctagggaccaatgggttcacctgggagcagattaacacatgggagaaaccaatgctggaccaggcagtgcccacaggatctttcatgatggtgaacagctctgggagagcctctggccagaaggcccaccttctcctgccaaccctgaaggagaatgacacccactgcatcgacttccattactacttctccagccgtgacaggtccagcccaggggccttgaacgtctacgtgaaggtgaatggtggcccccaagggaaccctgtgtggaatgtgtccggggtcgtcactgagggctgggtgaaggcagagctcgccatcagcactttctggccacatttctatcaggtgatatttgaatccgtctcattgaagggtcatcctggctacatcgccgtggacgaggtccgggtccttgctcatccatgcagaaaagcacctcattttctgcgactccaaaacgtggaggtgaatgtggggcagaatgccacatttcagtgcattgctggtgggaagtggtctcagcatgacaagctttggctccagcaatggaatggcagggacacggccctgatggtcacccgtgtggtcaaccacaggcgcttctcagccacagtcagtgtggcagacactgcccagcggagcgtcagcaagtaccgctgtgtgatccgctctgatggtgggtctggtgtgtccaactacgcggagctgatcgtgaaagagcctcccacgcccattgctcccccagagctgctggctgtgggggccacatacctgtggatcaagccaaatgccaactccatcatcggggatggccccatcatcctgaaggaagtggaatatcgcaccaccacaggcacgtgggcagagacccacatagtcgactctcccaactataagctgtggcatctggaccccgatgttgagtatgagatccgagtgctcctcacacgaccaggtgaggggggtacgggaccgccagggcctcccctcaccaccaggaccaagtgtgcagatccggtacatggcccacagaacgtggaaatcgtagacatcagagcccggcagctgaccctgcagtgggagcccttcggctacgcggtgacccgctgccatagctacaacctcaccgtgcagtaccagtatgtgttcaaccagcagcagtacgaggccgaggaggtcatccagacctcctcccactacaccctgcgaggcctgcgccccttcatgaccatccggctgcgactcttgctgtctaaccccgagggccgaatggagagcgaggagctggtggtgcagactgaggaagacgttccaggagctgttcctctagaatccatccaaggggggccctttgaggagaagatctacatccagtggaaacctcccaatgagaccaatggggtcatcacgctctacgagatcaactacaaggctgtcggctcgctggacccaagtgctgacctctcgagccagagggggaaagtgttcaagctccggaatgaaacccaccacctctttgtgggtctgtacccagggaccacctattccttcaccatcaaggccagcacagcaaagggctttgggccccctgtcaccactcggattgccaccaaaatttcagctccatccatgcctgagtacgacacagacaccccattgaatgagacagacacgaccatcacagtgatgctgaaacccgctcagtcccggggagctcctgtcagtgtttatcagctggttgtcaaggaggagcgacttcagaagtcacggagggcagctgacattattgagtgcttttcggtgcccgtgagctatcggaatgcctccagcctcgattctctacactactttgctgctgagttgaagcctgccaacctgcctgtcacccagccatttacagtgggtgacaataagacatacaatggctactggaaccctcctctctctcccctgaaaagctacagcatctacttccaggcactcagcaaagccaatggagagaccaaaatcaactgtgttcgtctggctacaaaaggtgcctccacccagaattctaacactgtggagccagagaagcaggtggacaacaccgtgaagatggctggcgtgatcgctggcctcctcatgttcatcatcattctcctgggcgtgatgctcaccatcaaaaggaggaagctggccaagaagcagaaggagacccagagtggagcccagagggagatggggcctgtggcctctgccgacaaacccaccaccaagctcagcgccagccgcaatgatgaaggcttctcttctagttctcaggacgtcaacggattcacagatggcagccgcggggagctttcccagcccaccctcacgatccagactcatccctaccgcacctgtgaccctgtggagatgagctacccccgggaccagttccaacccgccatccgggtggctgacttgctgcagcacatcacgcagatgaagagaggccagggctacgggttcaaggaggaatacgaggccttaccagaggggcagacagcttcgtgggacacagccaaggaggatgaaaaccgcaataagaatcgatatgggaacatcatatcctacgaccattcccgggtgaggctgctggtgctggatggagacccgcactctgactacatcaatgccaactacattgacggataccatcgacctcggcactacattgcgactcaaggtccgatgcaggagactgtaaaggacttttggagaatgatctggcaggagaactccgccagcatcgtcatggtcacaaacctggtggaagtgggcagggtgaaatgtgtgcgatactggccagatgacacggaggtctacggagacattaaagtcaccctgattgaaacagagcccctggcagaatacgtcatacgcaccttcacagtccagaagaaaggctaccatgagatccgggagctccgcctcttccacttcaccagctggcctgaccacggcgttccctgctatgccactggccttctgggcttcgtccgccaggtcaagttcctcaaccccccggaagctgggcccatagtggtccactgcagtgctggggctgggcggactggctgcttcattgccattgacaccatgcttgacatggccgagaatgaaggggtggtggacatcttcaactgcgtgcgtgagctccgggcccaaagggtcaacctggtacagacagaggagcaatatgtgtttgtgcacgatgccatcctggaagcgtgcctctgtggcaacactgccatccctgtgtgtgagttccgttctctctactacaatatcagcaggctggacccccagacaaactccagccaaatcaaagatgaatttcagaccctcaacattgtgacaccccgtgtgcggcccgaggactgcagcattgggctcctgccccggaaccatgataagaatcgaagtatggacgtgctgcctctggaccgctgcctgcccttccttatctcagtggacggagaatccagcaattacatcaacgcagcactgatggatagccacaagcagcctgccgccttcgtggtcacccagcaccctctacccaacaccgtggcagacttctggaggctggtgttcgattacaactgctcctctgtggtgatgctgaatgagatggacactgcccagttctgtatgcagtactggcctgagaagacctccgggtgctatgggcccatccaggtggagttcgtctccgcagacatcgacgaggacatcatccacagaatattccgcatctgtaacatggcccggccacaggatggttatcgtatagtccagcacctccagtacattggctggcctgcctaccgggacacgcccccctccaagcgctctctgctcaaagtggtccgacgactggagaagtggcaggagcagtatgacgggagggagggacgtactgtggtccactgcctaaatgggggaggccgtagtggaaccttctgtgccatctgcagtgtgtgtgagatgatccagcagcaaaacatcattgacgtgttccacatcgtgaaaacactgcgtaacaacaaatccaacatggtggagaccctggaacagtataaatttgtatacgaggtggcactggaatatttaagctccttttagctcaatgggatggggaacctgccggagtccagaggctgctgtgaccaagcccccttttgtgtgaatggcagtaactgggctcaggagctctgaggtggcaccctgcctgactccaaggagaagactggtggccctgtgttccacggggggctctgcaccttctgaggggtctcctgttgccgtgggagatgctgctccaaaaggcccaggcttccttttcaacctaaccagccacagccaagggcccaagcagaagtacacccacaagcaaggccttggatttctggctcccagaccacctgcttttgttctgagtttgtggatctcttggcaagccaactgtgcaggtgctggggagtgggaggctcccctgccctccttctccttaggagtggaggagatgtgtgttctgctcctctacgtcatggaaaagattgaggctcttgggggtcactgctctgctgccccctgcaacctccttcaggggcctctggcaccagacatttgcagtctggaccagtgtgaccttacgatgttccctaggccacaagagaggccccccatcctcacacctaacctgcatggggcttcgcccacaaccattctgtaccccttccccagcctgggccttgaccgtccagcattcactggccggccagctgtgtccacagcagtttttgataaaggtgttctttgcttttttgtgtggtcagtgggagggggtggaactgcagggaacttctctgctcctccttgtctttgtaaaaagggaccacctccctggggcagggcttgggctgacctgtaggatgtaacccctgtgtttctttggtggtagctttctttggaagagacaaacaagataagatttgattattttccaaagtgtatgtgaaaagaaactttcttttggagggtgtaaaatcttagtctcttatgtcaaaaagaagggggcgggggagtttgagtatgtacctctaagacaaatctctcgggccttttattttttcctggcaatgtccttaaaagctcccaccctgggacagcatgccactgagcaaggagagatgggtgagcctgaagatggtccctttggtttctggggcaaatagagcaccagctttgtgcataatttggatgtccaaatttgaactccttcctaaagaaacccagcagccaccttgaaaaaggccattgtggagcccattatactttgatttaaaataggccaagagaatcaggcctggagatctagggtcttgtccaaagtgtgagtgagtcaatgagagggaaccaacatttgctaagtctctactgtatgccagggatcatgcttggcactttccataggacatttcacacagtccttagaacccccaggagagagctactgacttgttatcatctccatttgatcatctcctccaatgaggaaacccacgcaccttccttagtaatgaaatcctgggttccaaaggggcaggtaatggcaatgagacttctccgtgctgttttcttcatcttctctaagccaagcaattattttatggagggaaaataaggccagaaacttctgagcagataactccacaaatggaaatttagtactttcttcctgatgccagttcttctgggaagcgcagaatttcagatatattttagtaacacattcccagctccccaggaaagccagtctcatctaatttcttagtcagtaaaaacaattccctgttccttcaggctatgaatggaccagccagggaaactctcgaccttgatctctagccagtgcttaggcccaatatctgacagcctcaggtgggctgggacctaggaagctccatcttgaaggctggtctagccccagacagggcatgaggggcagagaattcaagaaggtacagctttggccctcaagagcccactgtatgctggggaaatggaaccatggtgcagtagtgtggagtggatgagtgttccatgagcctaggagcaagaaagtctcttcggcctcgggcttcctggagaaggggacgtccattcctgctgggtcttaacaagcataaaaaggaaaaaaaggaaactcaggcaaagggatccatatgtgcaatggcaaagaaatgtgaaaaggcattgggagaagcagtctgggggaggccagcccagtgcgggcacagcacaacacggggagcagcaagagatgagccagggtccaggagacagatgcccatcgcgagtacagactttgtcctattggcaacaaggagtccatggagctttagagagatgcactcagcttcgtgttggccaagactccttctgggccaatggggctgcctcttttcctttcatcagacactgtgaaaacattcccttaagcgtgcactttttaatatcacatctatttgtctgtctgctcattgttttgttgctggaactaaatatgcaatggatcatgagactcagattctatgagaaacccagggtctctgctttaccacggagcagggtcaccaacccagatctccaggcccatgaggatggaacatgaaaggagccgacaaaagttgcttccattggcatgggctctggagctgtccagaagtccagggacaccagacttgatcaaggaagggctgtcactttagaggttcaaaaggaagtgcctcaaagcaaaggcaagcaaaggaaccccacgatgaacttgctcttttcctttgatgagcctctccccaggtgtatttcagcagaccccggggacccacccccactgggcctgctggcctccctcggctccagcccaatgccccagctggccttccccagcctgcaaggagcctgtagcatggcaaatctgcctgctgtatgctattttcttagatcttggtacatccagacaggatgagggtggagggagagctatttaacacaaatcctaagatttttttctgctcaggaaggggtgaaatagctggcagatacaaaagacagtggcttttatcattttaaatggtaggaatttaaggtgtgacttcagggagaaacaaacttgcaaaaaaaaaaaatctcaggccatgttggggtaacccagcaagggccagtgatgatttcccccagctcatccccttattttcccacaacccaaccattctctaaagcaggacagtgaataggtcttaggccagtgcacacaggaagaaattgaggcttatggatggggatgacttccctaagatcccatgggacaaggatgtggcaaggcttggatgagatggggcaccagtgcccaggaatttgaacattttcctttacccaggaaatctccggagccaacaccaccacccccagggggtctccccaccccaccccatttacagggtgagctcagcctgtcatgagcagaggaaaatattattaatgctctctgagtctttacaacaggagctcttacctcatagatgtgggctctgtttggggaagatgcaaggaagtaatgagaagcccaggaaatttctccacctgtgtttatggcctaaatagcttcaggatgtatcttagctgcactccaacattgcatcctttctggggtgaagaatctgggccaaccaggggtccttgggcctctagaaggccacagtaggcctctctttgtgggaatggaaggggacagtttgcttttagtgctggccctctctgtgggtgtggcctgcaaaggaaccaacagaccctatgctggggactctaacatgtgagctcattaaattcttccagcattctaaaggagggtttgtgattgtcaccatttactgatgaggaaactaaggctcctaggggagaaatcacttgcccacagttccacagctagtgagtgaatgaaccaggatttaaaccggttttttctcactacagagacaatatttttccaccattgtatctcacatttttcccaggaggttacccataacagaagagactagagtggaacagatacgtcagtggataaagctcaaagcaaacaacagtaagcttaaaattccttcatagtctcatgttttacgttcacaattcatgcaaaatttgcattccactttctgatttagccttgttggttttaatatgactctatgaatatttcaaaaaaaaatgtgctctgttcctcatgttgttctgttctgttcaccccgctatgacggaccctaggtcagctggtcttcagcttgaccctagaattgactctaggagcagtgaccctgctgcctcccagagccagttataggctcaagatcaagaccaactgaccttctcctaggcagctcctttggtgtgtgggtgctctgacctcactgttcatgaggggacctcaactaaggcatcttccagttgggtgctggaaggaacccattaactcacactagaatgatgaggatttgctcatctggcgtggagaaggatgagcccacaaaaccctaaagggaaaagagaagctggacacagctgtactcagcagattcctgaatgctaggctggaaagtggtgcctgttgtccaagtggagtcacatggttgctaatgtgggcaagtctgaggacacacttcatgagcagctggggtctggaaggctcctcactttaccctagccacacataattactgggtgcctacagcacctagcaccttggagggggcactattaggaaatcgagattactatggcacaattaattcctgggtaaggcatggggttgtggtggacagagctcagtctttagtttgaacgaaaacatacatacatgaaaaacatacatgaaaaaaggaccctcatcaacattagaaggggtagatttggagcactttaggcaggaaaacaggaacgcaaggccaggaaactggaacccagtgaatactcagaaccgaggatgcagatgacttatttagcaaaatggtcacttctgtgacatagctggagaaaggatgggtaacagcttgccagagccacttggaacaagggcaaatctcagtgtctggggcaaaagatgatgcatttccctctgacccatcatgtttattcatcctccactccccattgccacactagctcttgctgtaagtcctcaccaggatctacatttcctcgtcgctggtgggaaccccttagagtacatagaggtatcagtccagtaagactgctctacacaacagaagtgaggcccagggagtagcagccaggcccttatcctgttacctctgcaggagtgactgcccaacccagatccagagacattgaaggaaatgataattccttggtacctcactgccttgggacaaaatgaagaaagccacccttccttaggctgcagcttgccactcctgggctgggtaaacaggtcatcagcaccaagctcaaccaggagtaacactctggaagacatgggtgagcccaagaggaagcatgaacaggacgctgttcctaagtcatgtcaacaggttgtgctgggccaggatccccagggaaaaaaatggtcaacccaactggagggtaggttagaagaaaaaaaacataaacgtggatagtcatgtcatctcaaatccctgacttggcttccccattacttaacagtctgagctccttcttagcctgtgaccagcttcaaatcacagccaagtaaaacaaggaaataggaaaagtaaatccaactagaagagacaagctgagattcagatttgtttactcctcccatgcaaagtttccctgttggaggttttccatgtatacatgtctagaagtgatagaatgcaaggccttggctttgtcttgcagggatctgcctttgaggtcatagactgaacagcagggagagaggttagtggtggagtgtggggggagctgttctagctccagtttcttctgacacatttttcaggatcatggatctgatcctccgaagcacagcagagatatctaagccatatttgtgcacatgagcagactcttctagttttttagtaaccagggatgggcttttgcatggcactgactatagagatgtcttgtagagatcaagccagtcttttgcatcccacctgcccacctccagaagagatgggaaaaggtcatcaaagggcattcaccaactgaaatccactcatgaatgttaggtctctaaaaggaggcatcaacactcacaatggtagcctccaaacctagcatcccacctatctaagagctcaggggtggtccactggggcagatacaagggaagtgcaagggctcaggatgaaagaaaatctattgggaagagttttaggggcttgatcattatggggcttccttctatatctgagaactgctctgggtggtgagatgtggactctgatccttaattggaatgttcggagaatgagtgtctggtggccttgaagtgttggacagaaaagtatcagtataaaagcctggagctcagggtaattaatgtagttcatggttccttagtgagcaggactcttggatgtggaggagaaagggtcataggaagtaaaccaccaaaattacaaaattgagtctctgtacaattacttcagtgcctttgggcttatgaatacaaatcagtgggccttctctatgatggtccaacaaactctcagtgtccaccctgtccctgtatctcccatggaagatgaataatgtcaggtgttctttgggtcaaaggccccagggcagtctggaggcttagagggcagagtggtgtcattccatgtaaagttaggcttctgaggggtcaggcagaatatggtgtccatatcttccatagctctgcagattcttggatgaagtcaagcacagtttgctagacccaggtcactcctctgagtataactaggacccatgagtgaaacttaatagctgtaaggaagaacctgctgtctgccagagaggataagctgcccatctcagcagctgtctaaaagaaggcaggtgtctctttaaagggaagagaagcattggtgaaatggatttcaggtcacttccattccagatgggtgagatcttgtggagctgggatcatgtttgaactcattcatacctgtagagcacgaatccaagtagattgtgtttggtctgtacaggctgaagccccctgctctcccacccaagtgcccccactgagcaggccaacatgctgttgtggccacatatactgggctgatccaggctggttatcaccaaacagcaaaccatagggaacagctgctttgccatagacccaatacccatgtagatctctcatgagagcagccataactcagacccactgaccaacagggccatgagtgacagccagaaccagtgaaggtccaagtaggacacagagcagggcttttcttaccatacacattatctccagaggttatttctaccccactccctattcaaggcctgttggagcacactgcaaaagcaaaagcacagtaactcaatttacacatgattataatcatttccagtgcacacatttcatcaccaggtggatcctgagctagcccatgtaaatccgggttaacccatattggtaatcatactcaaaagcacttttcaccctacattctactagccaatcaaagacaaagagttgtggcctctaccattgccttggcttctggacaccctcacaagctatcccaaggttcccgctcaactccagggaggctgacatcttcacatccactgggcatataatattgcatgagaccaaagtctccacactctttgcagcctcctccatgaatcccaatggcctgcacttgtacagtttgggtgtttgatagataaagcacgtatgagaagagaaaacaaaataaatcaactttttaaaaaagccagcactgtgctgtcaatgttttttttttcttttcaattctagctcagaaaagcagaaggtaaataatgtcaggtcaatgaatatcagatatattttttgactgtacattacagtgaagtgtaatctttttacacctgcaagtccatcttatttattcttgtaaatgttccctgacaatgtttgtaacatggctgtgttaaaaaatctatacaataaagctgtgaccctgagattcatgttttcctaagata

SEQ ID NO: 171930 - DNA, 940 bp, Homo sapiens
  Payload ID: 13777
  Gene Symbol: PTPRT
  Gene Name: protein tyrosine phosphatase, receptor type, T
  ENST ID: ENST00000620410
  CDS Start-End: 1-940
ggatctttcatgatggtgaacagctctgggagagcctctggccagaaggcccaccttctcctgccaaccctgaaggagaatgacacccactgcatcgacttccattactacttctccagccgtgacaggtccagcccaggggccttgaacgtctacgtgaaggtgaatggtggcccccaagggaaccctgtgtggaatgtgtccggggtcgtcactgagggctgggtgaaggcagagctcgccatcagcactttctggccacatttctatcaggtgatatttgaatccgtctcattgaagggtcatcctggctacatcgccgtggacgaggtccgggtccttgctcatccatgcagaaaagcacctcattttctgcgactccaaaacgtggaggtgaatgtggggcagaatgccacatttcagtgcattgctggtgggaagtggtctcagcatgacaagctttggctccagcaatggaatggcagggacacggccctgatggtcacccgtgtggtcaaccacaggcgcttctcagccacagtcagtgtggcagacactgcccagcggagcgtcagcaagtaccgctgtgtgatccgctctgatggtgggtctggtgtgtccaactacgcggagctgatcgtgaaagagcctcccacgcccattgctcccccagagctgctggctgtgggggccacatacctgtggatcaagccaaatgccaactccatcatcggggatggccccatcatcctgaaggaagtggaatatcgcaccaccacaggcacgtgggcagagacccacatagtcgactctcccaactataagctgtggcatctggaccccgatgttgagtatgagatccgagtgctcctcacacgaccaggtgaggggggtacgggaccgccagggcctcccctcaccaccaggaccaagtgtgcag

SEQ ID NO: 171931 - DNA, 11285 bp, Homo sapiens
  Payload ID: 13777
  Gene Symbol: PTPRT
  Gene Name: protein tyrosine phosphatase, receptor type, T
  ENST ID: ENST00000612229
  CDS Start-End: 1-3180
tttgcagatccggtacatggcccacagaacgtggaaatcgtagacatcagagcccggcagctgaccctgcagtgggagcccttcggctacgcggtgacccgctgccatagctacaacctcaccgtgcagtaccagtatgtgttcaaccagcagcagtacgaggccgaggaggtcatccagacctcctcccactacaccctgcgaggcctgcgccccttcatgaccatccggctgcgactcttgctgtctaaccccgagggccgaatggagagcgaggagctggtggtgcagactgaggaagacgttccaggagctgttcctctagaatccatccaaggggggccctttgaggagaagatctacatccagtggaaacctcccaatgagaccaatggggtcatcacgctctacgagatcaactacaaggctgtcggctcgctggacccaagtgctgacctctcgagccagagggggaaagtgttcaagctccggaatgaaacccaccacctctttgtgggtctgtacccagggaccacctattccttcaccatcaaggccagcacagcaaagggctttgggccccctgtcaccactcggattgccaccaaaatttcagctccatccatgcctgagtacgacacagacaccccattgaatgagacagacacgaccatcacagtgatgctgaaacccgctcagtcccggggagctcctgtcagtgtttatcagctggttgtcaaggaggagcgacttcagaagtcacggagggcagctgacattattgagtgcttttcggtgcccgtgagctatcggaatgcctccagcctcgattctctacactactttgctgctgagttgaagcctgccaacctgcctgtcacccagccatttacagtgggtgacaataagacatacaatggctactggaaccctcctctctctcccctgaaaagctacagcatctacttccaggcactcagcaaagccaatggagagaccaaaatcaactgtgttcgtctggctacaaaaggtgcctccacccagaattctaacactgtggagccagagaagcaggtggacaacaccgtgaagatggctggcgtgatcgctggcctcctcatgttcatcatcattctcctgggcgtgatgctcaccatcaaaaggagaagaaatgcttattcctactcctattacttgaagctggccaagaagcagaaggagacccagagtggagcccagagggagatggggcctgtggcctctgccgacaaacccaccaccaagctcagcgccagccgcaatgatgaaggcttctcttctagttctcaggacgtcaacggattcacagatggcagccgcggggagctttcccagcccaccctcacgatccagactcatccctaccgcacctgtgaccctgtggagatgagctacccccgggaccagttccaacccgccatccgggtggctgacttgctgcagcacatcacgcagatgaagagaggccagggctacgggttcaaggaggaatacgaggccttaccagaggggcagacagcttcgtgggacacagccaaggaggatgaaaaccgcaataagaatcgatatgggaacatcatatcctacgaccattcccgggtgaggctgctggtgctggatggagacccgcactctgactacatcaatgccaactacattgacggataccatcgacctcggcactacattgcgactcaaggtccgatgcaggagactgtaaaggacttttggagaatgatctggcaggagaactccgccagcatcgtcatggtcacaaacctggtggaagtgggcagggtgaaatgtgtgcgatactggccagatgacacggaggtctacggagacattaaagtcaccctgattgaaacagagcccctggcagaatacgtcatacgcaccttcacagtccagaagaaaggctaccatgagatccgggagctccgcctcttccacttcaccagctggcctgaccacggcgttccctgctatgccactggccttctgggcttcgtccgccaggtcaagttcctcaaccccccggaagctgggcccatagtggtccactgcagtgctggggctgggcggactggctgcttcattgccattgacaccatgcttgacatggccgagaatgaaggggtggtggacatcttcaactgcgtgcgtgagctccgggcccaaagggtcaacctggtacagacagaggagcaatatgtgtttgtgcacgatgccatcctggaagcgtgcctctgtggcaacactgccatccctgtgtgtgagttccgttctctctactacaatatcagcaggctggacccccagacaaactccagccaaatcaaagatgaatttcagaccctcaacattgtgacaccccgtgtgcggcccgaggactgcagcattgggctcctgccccggaaccatgataagaatcgaagtatggacgtgctgcctctggaccgctgcctgcccttccttatctcagtggacggagaatccagcaattacatcaacgcagcactgatggatagccacaagcagcctgccgccttcgtggtcacccagcaccctctacccaacaccgtggcagacttctggaggctggtgttcgattacaactgctcctctgtggtgatgctgaatgagatggacactgcccagttctgtatgcagtactggcctgagaagacctccgggtgctatgggcccatccaggtggagttcgtctccgcagacatcgacgaggacatcatccacagaatattccgcatctgtaacatggcccggccacaggatggttatcgtatagtccagcacctccagtacattggctggcctgcctaccgggacacgcccccctccaagcgctctctgctcaaagtggtccgacgactggagaagtggcaggagcagtatgacgggagggagggacgtactgtggtccactgcctaaatgggggaggccgtagtggaaccttctgtgccatctgcagtgtgtgtgagatgatccagcagcaaaacatcattgacgtgttccacatcgtgaaaacactgcgtaacaacaaatccaacatggtggagaccctggaacagtataaatttgtatacgaggtggcactggaatatttaagctccttttagctcaatgggatggggaacctgccggagtccagaggctgctgtgaccaagcccccttttgtgtgaatggcagtaactgggctcaggagctctgaggtggcaccctgcctgactccaaggagaagactggtggccctgtgttccacggggggctctgcaccttctgaggggtctcctgttgccgtgggagatgctgctccaaaaggcccaggcttccttttcaacctaaccagccacagccaagggcccaagcagaagtacacccacaagcaaggccttggatttctggctcccagaccacctgcttttgttctgagtttgtggatctcttggcaagccaactgtgcaggtgctggggagtgggaggctcccctgccctccttctccttaggagtggaggagatgtgtgttctgctcctctacgtcatggaaaagattgaggctcttgggggtcactgctctgctgccccctgcaacctccttcaggggcctctggcaccagacatttgcagtctggaccagtgtgaccttacgatgttccctaggccacaagagaggccccccatcctcacacctaacctgcatggggcttcgcccacaaccattctgtaccccttccccagcctgggccttgaccgtccagcattcactggccggccagctgtgtccacagcagtttttgataaaggtgttctttgcttttttgtgtggtcagtgggagggggtggaactgcagggaacttctctgctcctccttgtctttgtaaaaagggaccacctccctggggcagggcttgggctgacctgtaggatgtaacccctgtgtttctttggtggtagctttctttggaagagacaaacaagataagatttgattattttccaaagtgtatgtgaaaagaaactttcttttggagggtgtaaaatcttagtctcttatgtcaaaaagaagggggcgggggagtttgagtatgtacctctaagacaaatctctcgggccttttattttttcctggcaatgtccttaaaagctcccaccctgggacagcatgccactgagcaaggagagatgggtgagcctgaagatggtccctttggtttctggggcaaatagagcaccagctttgtgcataatttggatgtccaaatttgaactccttcctaaagaaacccagcagccaccttgaaaaaggccattgtggagcccattatactttgatttaaaataggccaagagaatcaggcctggagatctagggtcttgtccaaagtgtgagtgagtcaatgagagggaaccaacatttgctaagtctctactgtatgccagggatcatgcttggcactttccataggacatttcacacagtccttagaacccccaggagagagctactgacttgttatcatctccatttgatcatctcctccaatgaggaaacccacgcaccttccttagtaatgaaatcctgggttccaaaggggcaggtaatggcaatgagacttctccgtgctgttttcttcatcttctctaagccaagcaattattttatggagggaaaataaggccagaaacttctgagcagataactccacaaatggaaatttagtactttcttcctgatgccagttcttctgggaagcgcagaatttcagatatattttagtaacacattcccagctccccaggaaagccagtctcatctaatttcttagtcagtaaaaacaattccctgttccttcaggctatgaatggaccagccagggaaactctcgaccttgatctctagccagtgcttaggcccaatatctgacagcctcaggtgggctgggacctaggaagctccatcttgaaggctggtctagccccagacagggcatgaggggcagagaattcaagaaggtacagctttggccctcaagagcccactgtatgctggggaaatggaaccatggtgcagtagtgtggagtggatgagtgttccatgagcctaggagcaagaaagtctcttcggcctcgggcttcctggagaaggggacgtccattcctgctgggtcttaacaagcataaaaaggaaaaaaaggaaactcaggcaaagggatccatatgtgcaatggcaaagaaatgtgaaaaggcattgggagaagcagtctgggggaggccagcccagtgcgggcacagcacaacacggggagcagcaagagatgagccagggtccaggagacagatgcccatcgcgagtacagactttgtcctattggcaacaaggagtccatggagctttagagagatgcactcagcttcgtgttggccaagactccttctgggccaatggggctgcctcttttcctttcatcagacactgtgaaaacattcccttaagcgtgcactttttaatatcacatctatttgtctgtctgctcattgttttgttgctggaactaaatatgcaatggatcatgagactcagattctatgagaaacccagggtctctgctttaccacggagcagggtcaccaacccagatctccaggcccatgaggatggaacatgaaaggagccgacaaaagttgcttccattggcatgggctctggagctgtccagaagtccagggacaccagacttgatcaaggaagggctgtcactttagaggttcaaaaggaagtgcctcaaagcaaaggcaagcaaaggaaccccacgatgaacttgctcttttcctttgatgagcctctccccaggtgtatttcagcagaccccggggacccacccccactgggcctgctggcctccctcggctccagcccaatgccccagctggccttccccagcctgcaaggagcctgtagcatggcaaatctgcctgctgtatgctattttcttagatcttggtacatccagacaggatgagggtggagggagagctatttaacacaaatcctaagatttttttctgctcaggaaggggtgaaatagctggcagatacaaaagacagtggcttttatcattttaaatggtaggaatttaaggtgtgacttcagggagaaacaaacttgcaaaaaaaaaaaatctcaggccatgttggggtaacccagcaagggccagtgatgatttcccccagctcatccccttattttcccacaacccaaccattctctaaagcaggacagtgaataggtcttaggccagtgcacacaggaagaaattgaggcttatggatggggatgacttccctaagatcccatgggacaaggatgtggcaaggcttggatgagatggggcaccagtgcccaggaatttgaacattttcctttacccaggaaatctccggagccaacaccaccacccccagggggtctccccaccccaccccatttacagggtgagctcagcctgtcatgagcagaggaaaatattattaatgctctctgagtctttacaacaggagctcttacctcatagatgtgggctctgtttggggaagatgcaaggaagtaatgagaagcccaggaaatttctccacctgtgtttatggcctaaatagcttcaggatgtatcttagctgcactccaacattgcatcctttctggggtgaagaatctgggccaaccaggggtccttgggcctctagaaggccacagtaggcctctctttgtgggaatggaaggggacagtttgcttttagtgctggccctctctgtgggtgtggcctgcaaaggaaccaacagaccctatgctggggactctaacatgtgagctcattaaattcttccagcattctaaaggagggtttgtgattgtcaccatttactgatgaggaaactaaggctcctaggggagaaatcacttgcccacagttccacagctagtgagtgaatgaaccaggatttaaaccggttttttctcactacagagacaatatttttccaccattgtatctcacatttttcccaggaggttacccataacagaagagactagagtggaacagatacgtcagtggataaagctcaaagcaaacaacagtaagcttaaaattccttcatagtctcatgttttacgttcacaattcatgcaaaatttgcattccactttctgatttagccttgttggttttaatatgactctatgaatatttcaaaaaaaaatgtgctctgttcctcatgttgttctgttctgttcaccccgctatgacggaccctaggtcagctggtcttcagcttgaccctagaattgactctaggagcagtgaccctgctgcctcccagagccagttataggctcaagatcaagaccaactgaccttctcctaggcagctcctttggtgtgtgggtgctctgacctcactgttcatgaggggacctcaactaaggcatcttccagttgggtgctggaaggaacccattaactcacactagaatgatgaggatttgctcatctggcgtggagaaggatgagcccacaaaaccctaaagggaaaagagaagctggacacagctgtactcagcagattcctgaatgctaggctggaaagtggtgcctgttgtccaagtggagtcacatggttgctaatgtgggcaagtctgaggacacacttcatgagcagctggggtctggaaggctcctcactttaccctagccacacataattactgggtgcctacagcacctagcaccttggagggggcactattaggaaatcgagattactatggcacaattaattcctgggtaaggcatggggttgtggtggacagagctcagtctttagtttgaacgaaaacatacatacatgaaaaacatacatgaaaaaaggaccctcatcaacattagaaggggtagatttggagcactttaggcaggaaaacaggaacgcaaggccaggaaactggaacccagtgaatactcagaaccgaggatgcagatgacttatttagcaaaatggtcacttctgtgacatagctggagaaaggatgggtaacagcttgccagagccacttggaacaagggcaaatctcagtgtctggggcaaaagatgatgcatttccctctgacccatcatgtttattcatcctccactccccattgccacactagctcttgctgtaagtcctcaccaggatctacatttcctcgtcgctggtgggaaccccttagagtacatagaggtatcagtccagtaagactgctctacacaacagaagtgaggcccagggagtagcagccaggcccttatcctgttacctctgcaggagtgactgcccaacccagatccagagacattgaaggaaatgataattccttggtacctcactgccttgggacaaaatgaagaaagccacccttccttaggctgcagcttgccactcctgggctgggtaaacaggtcatcagcaccaagctcaaccaggagtaacactctggaagacatgggtgagcccaagaggaagcatgaacaggacgctgttcctaagtcatgtcaacaggttgtgctgggccaggatccccagggaaaaaaatggtcaacccaactggagggtaggttagaagaaaaaaaacataaacgtggatagtcatgtcatctcaaatccctgacttggcttccccattacttaacagtctgagctccttcttagcctgtgaccagcttcaaatcacagccaagtaaaacaaggaaataggaaaagtaaatccaactagaagagacaagctgagattcagatttgtttactcctcccatgcaaagtttccctgttggaggttttccatgtatacatgtctagaagtgatagaatgcaaggccttggctttgtcttgcagggatctgcctttgaggtcatagactgaacagcagggagagaggttagtggtggagtgtggggggagctgttctagctccagtttcttctgacacatttttcaggatcatggatctgatcctccgaagcacagcagagatatctaagccatatttgtgcacatgagcagactcttctagttttttagtaaccagggatgggcttttgcatggcactgactatagagatgtcttgtagagatcaagccagtcttttgcatcccacctgcccacctccagaagagatgggaaaaggtcatcaaagggcattcaccaactgaaatccactcatgaatgttaggtctctaaaaggaggcatcaacactcacaatggtagcctccaaacctagcatcccacctatctaagagctcaggggtggtccactggggcagatacaagggaagtgcaagggctcaggatgaaagaaaatctattgggaagagttttaggggcttgatcattatggggcttccttctatatctgagaactgctctgggtggtgagatgtggactctgatccttaattggaatgttcggagaatgagtgtctggtggccttgaagtgttggacagaaaagtatcagtataaaagcctggagctcagggtaattaatgtagttcatggttccttagtgagcaggactcttggatgtggaggagaaagggtcataggaagtaaaccaccaaaattacaaaattgagtctctgtacaattacttcagtgcctttgggcttatgaatacaaatcagtgggccttctctatgatggtccaacaaactctcagtgtccaccctgtccctgtatctcccatggaagatgaataatgtcaggtgttctttgggtcaaaggccccagggcagtctggaggcttagagggcagagtggtgtcattccatgtaaagttaggcttctgaggggtcaggcagaatatggtgtccatatcttccatagctctgcagattcttggatgaagtcaagcacagtttgctagacccaggtcactcctctgagtataactaggacccatgagtgaaacttaatagctgtaaggaagaacctgctgtctgccagagaggataagctgcccatctcagcagctgtctaaaagaaggcaggtgtctctttaaagggaagagaagcattggtgaaatggatttcaggtcacttccattccagatgggtgagatcttgtggagctgggatcatgtttgaactcattcatacctgtagagcacgaatccaagtagattgtgtttggtctgtacaggctgaagccccctgctctcccacccaagtgcccccactgagcaggccaacatgctgttgtggccacatatactgggctgatccaggctggttatcaccaaacagcaaaccatagggaacagctgctttgccatagacccaatacccatgtagatctctcatgagagcagccataactcagacccactgaccaacagggccatgagtgacagccagaaccagtgaaggtccaagtaggacacagagcagggcttttcttaccatacacattatctccagaggttatttctaccccactccctattcaaggcctgttggagcacactgcaaaagcaaaagcacagtaactcaatttacacatgattataatcatttccagtgcacacatttcatcaccaggtggatcctgagctagcccatgtaaatccgggttaacccatattggtaatcatactcaaaagcacttttcaccctacattctactagccaatcaaagacaaagagttgtggcctctaccattgccttggcttctggacaccctcacaagctatcccaaggttcccgctcaactccagggaggctgacatcttcacatccactgggcatataatattgcatgagaccaaagtctccacactctttgcagcctcctccatgaatcccaatggcctgcacttgtacagtttgggtgtttgatagataaagcacgtatgagaagagaaaacaaaataaatcaactttttaaaaaagccagcactgtgctgtcaatgttttttttttcttttcaattctagctcagaaaagcagaaggtaaataatgtcaggtcaatgaatatcagatatattttttgactgtacattacagtgaagtgtaatctttttacacctgcaagtccatcttatttattcttgtaaatgttccctgacaatgtttgtaacatggctgtgttaaaaaatctatacaataaagctgtgaccctg

SEQ ID NO: 171932 - DNA, 4521 bp, Homo sapiens
  Payload ID: 13777
  Gene Symbol: PTPRT
  Gene Name: protein tyrosine phosphatase, receptor type, T
  ENST ID: ENST00000617474
  CDS Start-End: 185-328
cctcccgcctcagttcgcgccgcgcctcggcttggaacgcaggagcgccggctccgggagcccgagcggagccagccgcgcgcacagccagcggccgcgccggcgatgcggggccaccccgcgcccgccccagtcccggccccggcccccgcgggaaggggctgagctgcccgccgccgcccggatggcgagcctcgccgcgctcgccctcagcctgctcctgaggctgcagctgccgccactgcccggcgcccgggctcagagcgccgcaggtgtggctgttcctttgatgagcactacagcaactgtggttatagtgtggctctagggaccaatgggttcacctgggagcagattaacacatgggagaaaccaatgctggaccaggcagtgcccacaggatctttcatgatggtgaacagctctgggagagcctctggccagaaggcccaccttctcctgccaaccctgaaggagaatgacacccactgcatcgacttccattactacttctccagccgtgacaggtccagcccaggggccttgaacgtctacgtgaaggtgaatggtggcccccaagggaaccctgtgtggaatgtgtccggggtcgtcactgagggctgggtgaaggcagagctcgccatcagcactttctggccacatttctatcaggtgatatttgaatccgtctcattgaagggtcatcctggctacatcgccgtggacgaggtccgggtccttgctcatccatgcagaaaagcacctcattttctgcgactccaaaacgtggaggtgaatgtggggcagaatgccacatttcagtgcattgctggtgggaagtggtctcagcatgacaagctttggctccagcaatggaatggcagggacacggccctgatggtcacccgtgtggtcaaccacaggcgcttctcagccacagtcagtgtggcagacactgcccagcggagcgtcagcaagtaccgctgtgtgatccgctctgatggtgggtctggtgtgtccaactacgcggagctgatcgtgaaagagcctcccacgcccattgctcccccagagctgctggctgtgggggccacatacctgtggatcaagccaaatgccaactccatcatcggggatggccccatcatcctgaaggaagtggaatatcgcaccaccacaggcacgtgggcagagacccacatagtcgactctcccaactataagctgtggcatctggaccccgatgttgagtatgagatccgagtgctcctcacacgaccaggtgaggggggtacgggaccgccagggcctcccctcaccaccaggaccaagtgtgcagatccggtacatggcccacagaacgtggaaatcgtagacatcagagcccggcagctgaccctgcagtgggagcccttcggctacgcggtgacccgctgccatagctacaacctcaccgtgcagtaccagtatgtgttcaaccagcagcagtacgaggccgaggaggtcatccagacctcctcccactacaccctgcgaggcctgcgccccttcatgaccatccggctgcgactcttgctgtctaaccccgagggccgaatggagagcgaggagctggtggtgcagactgaggaagacgttccaggagctgttcctctagaatccatccaaggggggccctttgaggagaagatctacatccagtggaaacctcccaatgagaccaatggggtcatcacgctctacgagatcaactacaaggctgtcggctcgctggacccaagtgctgacctctcgagccagagggggaaagtgttcaagctccggaatgaaacccaccacctctttgtgggtctgtacccagggaccacctattccttcaccatcaaggccagcacagcaaagggctttgggccccctgtcaccactcggattgccaccaaaatttcagctccatccatgcctgagtacgacacagacaccccattgaatgagacagacacgaccatcacagtgatgctgaaacccgctcagtcccggggagctcctgtcagtgtttatcagctggttgtcaaggaggagcgacttcagaagtcacggagggcagctgacattattgagtgcttttcggtgcccgtgagctatcggaatgcctccagcctcgattctctacactactttgctgctgagttgaagcctgccaacctgcctgtcacccagccatttacagtgggtgacaataagacatacaatggctactggaaccctcctctctctcccctgaaaagctacagcatctacttccaggcactcagcaaagccaatggagagaccaaaatcaactgtgttcgtctggctacaaaaggtgcctccacccagaattctaacactgtggagccagagaagcaggtggacaacaccgtgaagatggctggcgtgatcgctggcctcctcatgttcatcatcattctcctgggcgtgatgctcaccatcaaaaggagaagaaatgcttattcctactcctattacttgtcccaaaggaagctggccaagaagcagaaggagacccagagtggagcccagagggagatggggcctgtggcctctgccgacaaacccaccaccaagctcagcgccagccgcaatgatgaaggcttctcttctagttctcaggacgtcaacggattcacagatggcagccgcggggagctttcccagcccaccctcacgatccagactcatccctaccgcacctgtgaccctgtggagatgagctacccccgggaccagttccaacccgccatccgggtggctgacttgctgcagcacatcacgcagatgaagagaggccagggctacgggttcaaggaggaatacgaggccttaccagaggggcagacagcttcgtgggacacagccaaggaggatgaaaaccgcaataagaatcgatatgggaacatcatatcctacgaccattcccgggtgaggctgctggtgctggatggagacccgcactctgactacatcaatgccaactacattgacggataccatcgacctcggcactacattgcgactcaaggtccgatgcaggagactgtaaaggacttttggagaatgatctggcaggagaactccgccagcatcgtcatggtcacaaacctggtggaagtgggcagggtgaaatgtgtgcgatactggccagatgacacggaggtctacggagacattaaagtcaccctgattgaaacagagcccctggcagaatacgtcatacgcaccttcacagtccagaagaaaggctaccatgagatccgggagctccgcctcttccacttcaccagctggcctgaccacggcgttccctgctatgccactggccttctgggcttcgtccgccaggtcaagttcctcaaccccccggaagctgggcccatagtggtccactgcagtgctggggctgggcggactggctgcttcattgccattgacaccatgcttgacatggccgagaatgaaggggtggtggacatcttcaactgcgtgcgtgagctccgggcccaaagggtcaacctggtacagacagaggagcaatatgtgtttgtgcacgatgccatcctggaagcgtgcctctgtggcaacactgccatccctgtgtgtgagttccgttctctctactacaatatcagcaggctggacccccagacaaactccagccaaatcaaagatgaatttcagaccctcaacattgtgacaccccgtgtgcggcccgaggactgcagcattgggctcctgccccggaaccatgataagaatcgaagtatggacgtgctgcctctggaccgctgcctgcccttccttatctcagtggacggagaatccagcaattacatcaacgcagcactgatggatagccacaagcagcctgccgccttcgtggtcacccagcaccctctacccaacaccgtggcagacttctggaggctggtgttcgattacaactgctcctctgtggtgatgctgaatgagatggacactgcccagttctgtatgcagtactggcctgagaagacctccgggtgctatgggcccatccaggtggagttcgtctccgcagacatcgacgaggacatcatccacagaatattccgcatctgtaacatggcccggccacaggatggttatcgtatagtccagcacctccagtacattggctggcctgcctaccgggacacgcccccctccaagcgctctctgctcaaagtggtccgacgactggagaagtggcaggagcagtatgacgggagggagggacgtactgtggtccactgcctaaatgggggaggccgtagtggaaccttctgtgccatctgcagtgtgtgtgagatgatccagcagcaaaacatcattgacgtgttccacatcgtgaaaacactgcgtaacaacaaatccaacatggtggagaccctggaacagtataaatttgtatacgaggtggcactggaatatttaagctccttttag

SEQ ID NO: 171933 - DNA, 3230 bp, Homo sapiens
  Payload ID: 13777
  Gene Symbol: PTPRT
  Gene Name: protein tyrosine phosphatase, receptor type, T
  ENST ID: ENST00000618610
  CDS Start-End: 1-3230
atccggtacatggcccacagaacgtggaaatcgtagacatcagagcccggcagctgaccctgcagtgggagcccttcggctacgcggtgacccgctgccatagctacaacctcaccgtgcagtaccagtatgtgttcaaccagcagcagtacgaggccgaggaggtcatccagacctcctcccactacaccctgcgaggcctgcgccccttcatgaccatccggctgcgactcttgctgtctaaccccgagggccgaatggagagcgaggagctggtggtgcagactgaggaagacgttccaggagctgttcctctagaatccatccaaggggggccctttgaggagaagatctacatccagtggaaacctcccaatgagaccaatggggtcatcacgctctacgagatcaactacaaggctgtcggctcgctggacccaagtgctgacctctcgagccagagggggaaagtgttcaagctccggaatgaaacccaccacctctttgtgggtctgtacccagggaccacctattccttcaccatcaaggccagcacagcaaagggctttgggccccctgtcaccactcggattgccaccaaaatttcagctccatccatgcctgagtacgacacagacaccccattgaatgagacagacacgaccatcacagtgatgctgaaacccgctcagtcccggggagctcctgtcagtgtttatcagctggttgtcaaggaggagcgacttcagaagtcacggagggcagctgacattattgagtgcttttcggtgcccgtgagctatcggaatgcctccagcctcgattctctacactactttgctgctgagttgaagcctgccaacctgcctgtcacccagccatttacagtgggtgacaataagacatacaatggctactggaaccctcctctctctcccctgaaaagctacagcatctacttccaggcactcagcaaagccaatggagagaccaaaatcaactgtgttcgtctggctacaaaagcaccaatgggcagcgcccaggtgaccccggggactccactctgcctcctcaccacaggtgcctccacccagaattctaacactgtggagccagagaagcaggtggacaacaccgtgaagatggctggcgtgatcgctggcctcctcatgttcatcatcattctcctgggcgtgatgctcaccatcaaaaggagaagaaatgcttattcctactcctattacttgaagctggccaagaagcagaaggagacccagagtggagcccagagggagatggggcctgtggcctctgccgacaaacccaccaccaagctcagcgccagccgcaatgatgaaggcttctcttctagttctcaggacgtcaacggattcacagatggcagccgcggggagctttcccagcccaccctcacgatccagactcatccctaccgcacctgtgaccctgtggagatgagctacccccgggaccagttccaacccgccatccgggtggctgacttgctgcagcacatcacgcagatgaagagaggccagggctacgggttcaaggaggaatacgaggccttaccagaggggcagacagcttcgtgggacacagccaaggaggatgaaaaccgcaataagaatcgatatgggaacatcatatcctacgaccattcccgggtgaggctgctggtgctggatggagacccgcactctgactacatcaatgccaactacattgacggataccatcgacctcggcactacattgcgactcaaggtccgatgcaggagactgtaaaggacttttggagaatgatctggcaggagaactccgccagcatcgtcatggtcacaaacctggtggaagtgggcagggtgaaatgtgtgcgatactggccagatgacacggaggtctacggagacattaaagtcaccctgattgaaacagagcccctggcagaatacgtcatacgcaccttcacagtccagaagaaaggctaccatgagatccgggagctccgcctcttccacttcaccagctggcctgaccacggcgttccctgctatgccactggccttctgggcttcgtccgccaggtcaagttcctcaaccccccggaagctgggcccatagtggtccactgcagtgctggggctgggcggactggctgcttcattgccattgacaccatgcttgacatggccgagaatgaaggggtggtggacatcttcaactgcgtgcgtgagctccgggcccaaagggtcaacctggtacagacagaggagcaatatgtgtttgtgcacgatgccatcctggaagcgtgcctctgtggcaacactgccatccctgtgtgtgagttccgttctctctactacaatatcagcaggctggacccccagacaaactccagccaaatcaaagatgaatttcagaccctcaacattgtgacaccccgtgtgcggcccgaggactgcagcattgggctcctgccccggaaccatgataagaatcgaagtatggacgtgctgcctctggaccgctgcctgcccttccttatctcagtggacggagaatccagcaattacatcaacgcagcactgatggatagccacaagcagcctgccgccttcgtggtcacccagcaccctctacccaacaccgtggcagacttctggaggctggtgttcgattacaactgctcctctgtggtgatgctgaatgagatggacactgcccagttctgtatgcagtactggcctgagaagacctccgggtgctatgggcccatccaggtggagttcgtctccgcagacatcgacgaggacatcatccacagaatattccgcatctgtaacatggcccggccacaggatggttatcgtatagtccagcacctccagtacattggctggcctgcctaccgggacacgcccccctccaagcgctctctgctcaaagtggtccgacgactggagaagtggcaggagcagtatgacgggagggagggacgtactgtggtccactgcctaaatgggggaggccgtagtggaaccttctgtgccatctgcagtgtgtgtgagatgatccagcagcaaaacatcattgacgtgttccacatcgtgaaaacactgcgtaacaacaaatccaacatggtggagaccctggaacagtataaatttgtatacgaggtggcactggaatatttaagctccttttag

SEQ ID NO: 171934 - DNA, 4470 bp, Homo sapiens
  Payload ID: 13778
  Gene Symbol: PTPRU
  Gene Name: protein tyrosine phosphatase, receptor type, U
  Uniprot ID: Q92729
  ENST ID: ENST00000345512
  CDS Start-End: 130-4470
ggcgccagtcccgctccgcgccgcgccgctccgctccggctcgggctccggctcgcctcgggctgggctcgggctccgggggcggcgtcccccgcgccgggccccgggacgggcggcgacgctccaaccatggcccgtgcccaggcgctcgtgctggcactcaccttccagctctgcgcgccggagaccgagactccggcagctggctgcaccttcgaggaggcaagtgacccagcagtgccctgcgagtacagccaggcccagtacgatgacttccagtgggagcaagtgcgaatccaccctggcacccgggcacctgcggacctgccccacggctcctacttgatggtcaacacttcccagcatgccccaggccagcgagcccatgtcatcttccagagcctgagcgagaatgatacccactgtgtgcagttcagctacttcctgtacagccgggacgggcacagcccgggcaccctgggcgtctacgtgcgcgttaatgggggccccctgggcagtgctgtgtggaatatgactggatcccacggccgtcagtggcaccaggctgagctggctgtcagcactttctggcccaatgaatatcaggtgctgtttgaggccctcatctccccagaccgcaggggctacatgggcctagatgacatcctgcttctcagctacccctgcgcaaaggccccacacttctcccgcctgggcgacgtggaggtcaacgcgggccagaacgcgtcgttccagtgcatggccgcgggcagagcggccgaggccgaacgcttcctcttgcaacggcagagcggggcgctggtgccggcggcgggcgtgcggcacatcagccaccggcgcttcctggccactttcccgctggctgccgtgagccgcgccgagcaggacctgtaccgctgtgtgtcccaggccccgcgcggcgcgggcgtctctaacttcgcggagctcatcgtcaaggagcccccaactcccatcgcgcccccacagctgctgcgtgctggccccacctacctcatcatccagctcaacaccaactccatcattggcgacgggccgatcgtgcgcaaggagattgagtaccgcatggcgcgcgggccctgggctgaggtgcacgccgtcagcctgcagacctacaagctgtggcacctcgaccccgacacagagtatgagatcagcgtgctgctcacgcgtcccggagacggcggcactggccgccctgggccacccctcatcagccgcaccaaatgcgcagagcccatgagggcccccaaaggcctggcttttgctgagatccaggcccgtcagctgaccctgcagtgggaaccactgggctacaacgtgacgcgttgccacacctatactgtgtcgctgtgctatcactacaccctgggcagcagccacaaccagaccatccgagagtgtgtgaagacagagcaaggtgtcagccgctacaccatcaagaacctgctgccctatcggaacgttcacgtgaggcttgtcctcactaaccctgaggggcgcaaagagggcaaggaggtcactttccagacggatgaggatgtgcccagtgggattgcagccgagtccctgaccttcactccactggaggacatgatcttcctcaagtgggaggagccccaggagcccaatggtctcatcacccagtatgagatcagctaccagagcatcgagtcatcagacccggcagtgaacgtgccaggcccacgacgtaccatctccaagctccgcaatgagacctaccatgtcttctccaacctgcacccaggcaccacctacctgttctccgtgcgggcccgcacaggcaaaggcttcggccaggcggcactcactgagataaccactaacatctctgctcccagctttgattatgccgacatgccgtcacccctgggcgagtctgagaacaccatcaccgtgctgctgaggccggcacagggccgcggtgcgcccatcagtgtgtaccaggtgattgtggaggaggagcgggcgcggaggctgcggcgggagccaggtggacaggactgcttcccagtgccattgaccttcgaggcggcgctggcccgaggcctggtgcactacttcggggccgaactggcggccagcagtctacctgaggccatgccctttaccgtgggtgacaaccagacctaccgaggcttctggaacccaccacttgagcctaggaaggcctatctcatctacttccaggcagcaagccacctgaagggggagacccggctgaattgcatccgcattgccaggaaagctgcctgcaaggaaagcaagcggcccctggaggtgtcccagagatcggaggagatggggcttatcctgggcatctgtgcaggggggcttgctgtcctcatccttctcctgggtgccatcattgtcatcatccgcaaagggagagaccactatgcctactcctactacccgaagccggtgaacatgaccaaggccaccgtcaactaccgccaggagaagacacacatgatgagcgccgtggaccgcagcttcacagaccagagcaccctgcaggaggacgagcggctgggcctgtccttcatggacacccatggctacagcacccggggagaccagcgcagcggtggggtcactgaggccagcagcctcctggggggctccccgaggcgtccctgtggccggaagggctccccataccacacggggcagctgcaccctgcggtgcgtgtcgcagaccttctgcagcacatcaaccagatgaagacggccgagggttacggcttcaagcaggagtatgagagcttctttgaaggctgggacgccacaaagaagaaagacaaggtcaagggcagccggcaggagccaatgcctgcctatgatcggcaccgagtgaaactgcacccgatgctgggagaccccaatgccgactacattaatgccaactacatagatggttaccacaggtcaaaccacttcatagccactcaagggccgaagcctgagatggtctatgacttctggcgtatggtgtggcaggagcactgttccagcatcgtcatgatcaccaagctggtcgaggtgggcagggtgaaatgctcacggtactggccggaggactcagacacctacggggacatcaagattatgctggtgaagacagagaccctggctgagtatgtcgtgcgcacttttgccctggagcggagaggctactctgcccggcacgaggtccgccagttccacttcacagcgtggccagagcatggcgtcccctaccatgccacggggctgctggctttcatccggcgcgtgaaggcctccaccccacctgatgccgggcccattgtcatccactgcagcgcgggcaccggccgcacaggttgctatatcgtcctggatgtgatgctggacatggcagagtgtgagggcgtcgtggacatttacaactgtgtgaagactctctgctcccggcgtgtcaacatgatccagactgaggagcagtacatcttcattcatgatgcaatcctggaggcctgcctgtgtggggagaccaccatccctgtcagtgagttcaaggccacctacaaggagatgatccgcattgatcctcagagtaattcctcccagctgcgggaagagttccagacgctgaactcggtcaccccgccgctggacgtggaggagtgcagcatcgccctgttgccccggaaccgcgacaagaaccgcagcatggacgtcctgccgcccgaccgctgcctgcccttcctcatctccactgatggggactccaacaactacattaatgcagccctgactgacagctacacacggagtgcggccttcatcgtgaccctgcacccgctgcagagcaccacgcccgacttctggcggctggtctacgattacgggtgcacctccatcgtcatgctcaaccagctgaaccagtccaactccgcctggccctgcctgcagtactggccagagccaggccggcagcaatatggcctcatggaggtggagtttatgtcgggcacagctgatgaagacttagtggctcgagtcttccgggtgcagaacatctctcggttgcaggaggggcacctgctggtgcggcacttccagttcctgcgctggtctgcataccgggacacacctgactccaagaaggccttcttgcacctgctggctgaggtggacaagtggcaggccgagagtggggatgggcgcaccatcgtgcactgcctaaacgggggaggacgcagcggcaccttctgcgcctgcgccacggtcctggagatgatccgctgccacaacttggtggacgttttctttgctgccaaaaccctccggaactacaaacccaacatggtggagaccatggatcagtaccacttttgctacgatgtggccctggagtacttggaggggctggagtcaagatag

SEQ ID NO: 171935 - DNA, 5579 bp, Homo sapiens
  Payload ID: 13778
  Gene Symbol: PTPRU
  Gene Name: protein tyrosine phosphatase, receptor type, U
  Uniprot ID: Q92729
  ENST ID: ENST00000373779
  CDS Start-End: 130-4440
ggcgccagtcccgctccgcgccgcgccgctccgctccggctcgggctccggctcgcctcgggctgggctcgggctccgggggcggcgtcccccgcgccgggccccgggacgggcggcgacgctccaaccatggcccgtgcccaggcgctcgtgctggcactcaccttccagctctgcgcgccggagaccgagactccggcagctggctgcaccttcgaggaggcaagtgacccagcagtgccctgcgagtacagccaggcccagtacgatgacttccagtgggagcaagtgcgaatccaccctggcacccgggcacctgcggacctgccccacggctcctacttgatggtcaacacttcccagcatgccccaggccagcgagcccatgtcatcttccagagcctgagcgagaatgatacccactgtgtgcagttcagctacttcctgtacagccgggacgggcacagcccgggcaccctgggcgtctacgtgcgcgttaatgggggccccctgggcagtgctgtgtggaatatgactggatcccacggccgtcagtggcaccaggctgagctggctgtcagcactttctggcccaatgaatatcaggtgctgtttgaggccctcatctccccagaccgcaggggctacatgggcctagatgacatcctgcttctcagctacccctgcgcaaaggccccacacttctcccgcctgggcgacgtggaggtcaacgcgggccagaacgcgtcgttccagtgcatggccgcgggcagagcggccgaggccgaacgcttcctcttgcaacggcagagcggggcgctggtgccggcggcgggcgtgcggcacatcagccaccggcgcttcctggccactttcccgctggctgccgtgagccgcgccgagcaggacctgtaccgctgtgtgtcccaggccccgcgcggcgcgggcgtctctaacttcgcggagctcatcgtcaaggagcccccaactcccatcgcgcccccacagctgctgcgtgctggccccacctacctcatcatccagctcaacaccaactccatcattggcgacgggccgatcgtgcgcaaggagattgagtaccgcatggcgcgcgggccctgggctgaggtgcacgccgtcagcctgcagacctacaagctgtggcacctcgaccccgacacagagtatgagatcagcgtgctgctcacgcgtcccggagacggcggcactggccgccctgggccacccctcatcagccgcaccaaatgcgcagagcccatgagggcccccaaaggcctggcttttgctgagatccaggcccgtcagctgaccctgcagtgggaaccactgggctacaacgtgacgcgttgccacacctatactgtgtcgctgtgctatcactacaccctgggcagcagccacaaccagaccatccgagagtgtgtgaagacagagcaaggtgtcagccgctacaccatcaagaacctgctgccctatcggaacgttcacgtgaggcttgtcctcactaaccctgaggggcgcaaagagggcaaggaggtcactttccagacggatgaggatgtgcccagtgggattgcagccgagtccctgaccttcactccactggaggacatgatcttcctcaagtgggaggagccccaggagcccaatggtctcatcacccagtatgagatcagctaccagagcatcgagtcatcagacccggcagtgaacgtgccaggcccacgacgtaccatctccaagctccgcaatgagacctaccatgtcttctccaacctgcacccaggcaccacctacctgttctccgtgcgggcccgcacaggcaaaggcttcggccaggcggcactcactgagataaccactaacatctctgctcccagctttgattatgccgacatgccgtcacccctgggcgagtctgagaacaccatcaccgtgctgctgaggccggcacagggccgcggtgcgcccatcagtgtgtaccaggtgattgtggaggaggagcgggcgcggaggctgcggcgggagccaggtggacaggactgcttcccagtgccattgaccttcgaggcggcgctggcccgaggcctggtgcactacttcggggccgaactggcggccagcagtctacctgaggccatgccctttaccgtgggtgacaaccagacctaccgaggcttctggaacccaccacttgagcctaggaaggcctatctcatctacttccaggcagcaagccacctgaagggggagacccggctgaattgcatccgcattgccaggaaagctgcctgcaaggaaagcaagcggcccctggaggtgtcccagagatcggaggagatggggcttatcctgggcatctgtgcaggggggcttgctgtcctcatccttctcctgggtgccatcattgtcatcatccgcaaagggaagccggtgaacatgaccaaggccaccgtcaactaccgccaggagaagacacacatgatgagcgccgtggaccgcagcttcacagaccagagcaccctgcaggaggacgagcggctgggcctgtccttcatggacacccatggctacagcacccggggagaccagcgcagcggtggggtcactgaggccagcagcctcctggggggctccccgaggcgtccctgtggccggaagggctccccataccacacggggcagctgcaccctgcggtgcgtgtcgcagaccttctgcagcacatcaaccagatgaagacggccgagggttacggcttcaagcaggagtatgagagcttctttgaaggctgggacgccacaaagaagaaagacaaggtcaagggcagccggcaggagccaatgcctgcctatgatcggcaccgagtgaaactgcacccgatgctgggagaccccaatgccgactacattaatgccaactacatagatggttaccacaggtcaaaccacttcatagccactcaagggccgaagcctgagatggtctatgacttctggcgtatggtgtggcaggagcactgttccagcatcgtcatgatcaccaagctggtcgaggtgggcagggtgaaatgctcacggtactggccggaggactcagacacctacggggacatcaagattatgctggtgaagacagagaccctggctgagtatgtcgtgcgcacttttgccctggagcggagaggctactctgcccggcacgaggtccgccagttccacttcacagcgtggccagagcatggcgtcccctaccatgccacggggctgctggctttcatccggcgcgtgaaggcctccaccccacctgatgccgggcccattgtcatccactgcagcgcgggcaccggccgcacaggttgctatatcgtcctggatgtgatgctggacatggcagagtgtgagggcgtcgtggacatttacaactgtgtgaagactctctgctcccggcgtgtcaacatgatccagactgaggagcagtacatcttcattcatgatgcaatcctggaggcctgcctgtgtggggagaccaccatccctgtcagtgagttcaaggccacctacaaggagatgatccgcattgatcctcagagtaattcctcccagctgcgggaagagttccagacgctgaactcggtcaccccgccgctggacgtggaggagtgcagcatcgccctgttgccccggaaccgcgacaagaaccgcagcatggacgtcctgccgcccgaccgctgcctgcccttcctcatctccactgatggggactccaacaactacattaatgcagccctgactgacagctacacacggagtgcggccttcatcgtgaccctgcacccgctgcagagcaccacgcccgacttctggcggctggtctacgattacgggtgcacctccatcgtcatgctcaaccagctgaaccagtccaactccgcctggccctgcctgcagtactggccagagccaggccggcagcaatatggcctcatggaggtggagtttatgtcgggcacagctgatgaagacttagtggctcgagtcttccgggtgcagaacatctctcggttgcaggaggggcacctgctggtgcggcacttccagttcctgcgctggtctgcataccgggacacacctgactccaagaaggccttcttgcacctgctggctgaggtggacaagtggcaggccgagagtggggatgggcgcaccatcgtgcactgcctaaacgggggaggacgcagcggcaccttctgcgcctgcgccacggtcctggagatgatccgctgccacaacttggtggacgttttctttgctgccaaaaccctccggaactacaaacccaacatggtggagaccatggatcagtaccacttttgctacgatgtggccctggagtacttggaggggctggagtcaagatagcggggccctggcctggggcacccactgcacactcagggccagacccaccatcctggactggcgaggaagatcagtgcctcctgctctgcccaaacacactcccatggggcaagcactggagtggatgctgggctatcttgctcccccttccactgtgggcagggcctttcgcttgtcccatgggcgggtggtgggccaaggaggagcttagcaagtctgcagcccagccccacctccatagggtcctgcaggcctgtgctgagaggcctggtgctgcctggcagagtgacaaaggctcaggacggctggctctgggggactcaggccaagccccttggcaccatcctggcttttggcagggatgagtgaggccctgcagagagcatcccaggccaaggttcccactcagcctgccccctctgcatgtgggtagaggatgtactgggacttggcatttaggattccatctggcccagcccctgaaggtcctggggaagcaggtctcaattctgaatagccagtggggcacactgactgtcctccccaggggaactgcagcgccctcctccccactgccccctgcagcccctgagatattttgctcactatccctccccacttgcttccctgatatgtgctctgagcttccctgaaccaggatctgcctattactgctgtgccccatggggggctccttccctgcctgacccactgttgcagaatgaagtcacctcgcccccctcttcctttaatcttcaggcctcactggcctgtcctgctcagcttgggccagtgacaatctgcaaggctgaacaacagcccctggggttgaggcccctgtggctcctggtcaggctgcccgttgtggggaggggcagtgttagagcagggctggtcataccctctggagttcagaggaagaggtaggaccagtgcttttttgtttcttttgttatttttggttgggtgggtgggaaggtctctttaaaatggggcaggccacacccccattccgtgcctcaatttccccatctgtaaactgtagatatgactactgacctacctcgcagggggctgtggggaggcataagctgatgtttgtaaagcgctttgtaaataaacgtgctctctgaatgcca

SEQ ID NO: 171936 - DNA, 5550 bp, Homo sapiens
  Payload ID: 13778
  Gene Symbol: PTPRU
  Gene Name: protein tyrosine phosphatase, receptor type, U
  Uniprot ID: Q92729
  ENST ID: ENST00000428026
  CDS Start-End: 97-4398
ctccggctcgggctccggctcgcctcgggctgggctcgggctccgggggcggcgtcccccgcgccgggccccgggacgggcggcgacgctccaaccatggcccgtgcccaggcgctcgtgctggcactcaccttccagctctgcgcgccggagaccgagactccggcagctggctgcaccttcgaggaggcaagtgacccagcagtgccctgcgagtacagccaggcccagtacgatgacttccagtgggagcaagtgcgaatccaccctggcacccgggcacctgcggacctgccccacggctcctacttgatggtcaacacttcccagcatgccccaggccagcgagcccatgtcatcttccagagcctgagcgagaatgatacccactgtgtgcagttcagctacttcctgtacagccgggacgggcacagcccgggcaccctgggcgtctacgtgcgcgttaatgggggccccctgggcagtgctgtgtggaatatgactggatcccacggccgtcagtggcaccaggctgagctggctgtcagcactttctggcccaatgaatatcaggtgctgtttgaggccctcatctccccagaccgcaggggctacatgggcctagatgacatcctgcttctcagctacccctgcgcaaaggccccacacttctcccgcctgggcgacgtggaggtcaacgcgggccagaacgcgtcgttccagtgcatggccgcgggcagagcggccgaggccgaacgcttcctcttgcaacggcagagcggggcgctggtgccggcggcgggcgtgcggcacatcagccaccggcgcttcctggccactttcccgctggctgccgtgagccgcgccgagcaggacctgtaccgctgtgtgtcccaggccccgcgcggcgcgggcgtctctaacttcgcggagctcatcgtcaaggagcccccaactcccatcgcgcccccacagctgctgcgtgctggccccacctacctcatcatccagctcaacaccaactccatcattggcgacgggccgatcgtgcgcaaggagattgagtaccgcatggcgcgcgggccctgggctgaggtgcacgccgtcagcctgcagacctacaagctgtggcacctcgaccccgacacagagtatgagatcagcgtgctgctcacgcgtcccggagacggcggcactggccgccctgggccacccctcatcagccgcaccaaatgcgcagagcccatgagggcccccaaaggcctggcttttgctgagatccaggcccgtcagctgaccctgcagtgggaaccactgggctacaacgtgacgcgttgccacacctatactgtgtcgctgtgctatcactacaccctgggcagcagccacaaccagaccatccgagagtgtgtgaagacagagcaaggtgtcagccgctacaccatcaagaacctgctgccctatcggaacgttcacgtgaggcttgtcctcactaaccctgaggggcgcaaagagggcaaggaggtcactttccagacggatgaggatgtgcccagtgggattgcagccgagtccctgaccttcactccactggaggacatgatcttcctcaagtgggaggagccccaggagcccaatggtctcatcacccagtatgagatcagctaccagagcatcgagtcatcagacccggcagtgaacgtgccaggcccacgacgtaccatctccaagctccgcaatgagacctaccatgtcttctccaacctgcacccaggcaccacctacctgttctccgtgcgggcccgcacaggcaaaggcttcggccaggcggcactcactgagataaccactaacatctctgctcccagctttgattatgccgacatgccgtcacccctgggcgagtctgagaacaccatcaccgtgctgctgaggccggcacagggccgcggtgcgcccatcagtgtgtaccaggtgattgtggaggaggagcgggcgcggaggctgcggcgggagccaggtggacaggactgcttcccagtgccattgaccttcgaggcggcgctggcccgaggcctggtgcactacttcggggccgaactggcggccagcagtctacctgaggccatgccctttaccgtgggtgacaaccagacctaccgaggcttctggaacccaccacttgagcctaggaaggcctatctcatctacttccaggcagcaagccacctgaagggggagacccggctgaattgcatccgcattgccaggaaagctgcctgcaaggaaagcaagcggcccctggaggtgtcccagagatcggaggagatggggcttatcctgggcatctgtgcaggggggcttgctgtcctcatccttctcctgggtgccatcattgtcatcatccgcaaagggaagccggtgaacatgaccaaggccaccgtcaactaccgccaggagaagacacacatgatgagcgccgtggaccgcagcttcacagaccagagcaccctgcaggaggacgagcggctgggcctgtccttcatggacacccatggctacagcacccggggagaccagcgcagcggtggggtcactgaggccagcagcctcctggggggctccccgaggcgtccctgtggccggaagggctccccataccacacggggcagctgcaccctgcggtgcgtgtcgcagaccttctgcagcacatcaaccagatgaagacggccgagggttacggcttcaagcaggagtatgagagcttctttgaaggctgggacgccacaaagaagaaagacaaggtcaagggcagccggcaggagccaatgcctgcctatgatcggcaccgagtgaaactgcacccgatgctgggagaccccaatgccgactacattaatgccaactacatagatggttaccacaggtcaaaccacttcatagccactcaagggccgaagcctgagatggtctatgacttctggcgtatggtgtggcaggagcactgttccagcatcgtcatgatcaccaagctggtcgaggtgaaatgctcacggtactggccggaggactcagacacctacggggacatcaagattatgctggtgaagacagagaccctggctgagtatgtcgtgcgcacttttgccctggagcggagaggctactctgcccggcacgaggtccgccagttccacttcacagcgtggccagagcatggcgtcccctaccatgccacggggctgctggctttcatccggcgcgtgaaggcctccaccccacctgatgccgggcccattgtcatccactgcagcgcgggcaccggccgcacaggttgctatatcgtcctggatgtgatgctggacatggcagagtgtgagggcgtcgtggacatttacaactgtgtgaagactctctgctcccggcgtgtcaacatgatccagactgaggagcagtacatcttcattcatgatgcaatcctggaggcctgcctgtgtggggagaccaccatccctgtcagtgagttcaaggccacctacaaggagatgatccgcattgatcctcagagtaattcctcccagctgcgggaagagttccagacgctgaactcggtcaccccgccgctggacgtggaggagtgcagcatcgccctgttgccccggaaccgcgacaagaaccgcagcatggacgtcctgccgcccgaccgctgcctgcccttcctcatctccactgatggggactccaacaactacattaatgcagccctgactgacagctacacacggagtgcggccttcatcgtgaccctgcacccgctgcagagcaccacgcccgacttctggcggctggtctacgattacgggtgcacctccatcgtcatgctcaaccagctgaaccagtccaactccgcctggccctgcctgcagtactggccagagccaggccggcagcaatatggcctcatggaggtggagtttatgtcgggcacagctgatgaagacttagtggctcgagtcttccgggtgcagaacatctctcggttgcaggaggggcacctgctggtgcggcacttccagttcctgcgctggtctgcataccgggacacacctgactccaagaaggccttcttgcacctgctggctgaggtggacaagtggcaggccgagagtggggatgggcgcaccatcgtgcactgcctaaacgggggaggacgcagcggcaccttctgcgcctgcgccacggtcctggagatgatccgctgccacaacttggtggacgttttctttgctgccaaaaccctccggaactacaaacccaacatggtggagaccatggatcagtaccacttttgctacgatgtggccctggagtacttggaggggctggagtcaagatagcggggccctggcctggggcacccactgcacactcagggccagacccaccatcctggactggcgaggaagatcagtgcctcctgctctgcccaaacacactcccatggggcaagcactggagtggatgctgggctatcttgctcccccttccactgtgggcagggcctttcgcttgtcccatgggcgggtggtgggccaaggaggagcttagcaagtctgcagcccagccccacctccatagggtcctgcaggcctgtgctgagaggcctggtgctgcctggcagagtgacaaaggctcaggacggctggctctgggggactcaggccaagccccttggcaccatcctggcttttggcagggatgagtgaggccctgcagagagcatcccaggccaaggttcccactcagcctgccccctctgcatgtgggtagaggatgtactgggacttggcatttaggattccatctggcccagcccctgaaggtcctggggaagcaggtctcaattctgaatagccagtggggcacactgactgtcctccccaggggaactgcagcgccctcctccccactgccccctgcagcccctgagatattttgctcactatccctccccacttgcttccctgatatgtgctctgagcttccctgaaccaggatctgcctattactgctgtgccccatggggggctccttccctgcctgacccactgttgcagaatgaagtcacctcgcccccctcttcctttaatcttcaggcctcactggcctgtcctgctcagcttgggccagtgacaatctgcaaggctgaacaacagcccctggggttgaggcccctgtggctcctggtcaggctgcccgttgtggggaggggcagtgttagagcagggctggtcataccctctggagttcagaggaagaggtaggaccagtgcttttttgtttcttttgttatttttggttgggtgggtgggaaggtctctttaaaatggggcaggccacacccccattccgtgcctcaatttccccatctgtaaactgtagatatgactactgacctacctcgcagggggctgtggggaggcataagctgatgtttgtaaagcgctttgtaaataaacgtgctctctgaatgccacagagcagccctg

SEQ ID NO: 171937 - DNA, 5337 bp, Homo sapiens
  Payload ID: 13778
  Gene Symbol: PTPRU
  Gene Name: protein tyrosine phosphatase, receptor type, U
  Uniprot ID: Q92729
  ENST ID: ENST00000460170
  CDS Start-End: 7-4329
ccaaccatggcccgtgcccaggcgctcgtgctggcactcaccttccagctctgcgcgccggagaccgagactccggcagctggctgcaccttcgaggaggcaagtgacccagcagtgccctgcgagtacagccaggcccagtacgatgacttccagtgggagcaagtgcgaatccaccctggcacccgggcacctgcggacctgccccacggctcctacttgatggtcaacacttcccagcatgccccaggccagcgagcccatgtcatcttccagagcctgagcgagaatgatacccactgtgtgcagttcagctacttcctgtacagccgggacgggcacagcccgggcaccctgggcgtctacgtgcgcgttaatgggggccccctgggcagtgctgtgtggaatatgactggatcccacggccgtcagtggcaccaggctgagctggctgtcagcactttctggcccaatgaatatcaggtgctgtttgaggccctcatctccccagaccgcaggggctacatgggcctagatgacatcctgcttctcagctacccctgcgcaaaggccccacacttctcccgcctgggcgacgtggaggtcaacgcgggccagaacgcgtcgttccagtgcatggccgcgggcagagcggccgaggccgaacgcttcctcttgcaacggcagagcggggcgctggtgccggcggcgggcgtgcggcacatcagccaccggcgcttcctggccactttcccgctggctgccgtgagccgcgccgagcaggacctgtaccgctgtgtgtcccaggccccgcgcggcgcgggcgtctctaacttcgcggagctcatcgtcaaggagcccccaactcccatcgcgcccccacagctgctgcgtgctggccccacctacctcatcatccagctcaacaccaactccatcattggcgacgggccgatcgtgcgcaaggagattgagtaccgcatggcgcgcgggccctgggctgaggtgcacgccgtcagcctgcagacctacaagctgtggcacctcgaccccgacacagagtatgagatcagcgtgctgctcacgcgtcccggagacggcggcactggccgccctgggccacccctcatcagccgcaccaaatgcgcagagcccatgagggcccccaaaggcctggcttttgctgagatccaggcccgtcagctgaccctgcagtgggaaccactgggctacaacgtgacgcgttgccacacctatactgtgtcgctgtgctatcactacaccctgggcagcagccacaaccagaccatccgagagtgtgtgaagacagagcaaggtgtcagccgctacaccatcaagaacctgctgccctatcggaacgttcacgtgaggcttgtcctcactaaccctgaggggcgcaaagagggcaaggaggtcactttccagacggatgaggatgtgcccagtgggattgcagccgagtccctgaccttcactccactggaggacatgatcttcctcaagtgggaggagccccaggagcccaatggtctcatcacccagtatgagatcagctaccagagcatcgagtcatcagacccggcagtgaacgtgccaggcccacgacgtaccatctccaagctccgcaatgagacctaccatgtcttctccaacctgcacccaggcaccacctacctgttctccgtgcgggcccgcacaggcaaaggcttcggccaggcggcactcactgagataaccactaacatctctgctcccagctttgattatgccgacatgccgtcacccctgggcgagtctgagaacaccatcaccgtgctgctgaggccggcacagggccgcggtgcgcccatcagtgtgtaccaggtgattgtggaggaggagcgggcgcggaggctgcggcgggagccaggtggacaggactgcttcccagtgccattgaccttcgaggcggcgctggcccgaggcctggtgcactacttcggggccgaactggcggccagcagtctacctgaggccatgccctttaccgtgggtgacaaccagacctaccgaggcttctggaacccaccacttgagcctaggaaggcctatctcatctacttccaggcagcaagccacctgaagggggagacccggctgaattgcatccgcattgccaggaaagctgcctgcaaggaaagcaagcggcccctggaggtgtcccagagatcggaggagatggggcttatcctgggcatctgtgcaggggggcttgctgtcctcatccttctcctgggtgccatcattgtcatcatccgcaaagggaagccggtgaacatgaccaaggccaccgtcaactaccgccaggagaagacacacatgatgagcgccgtggaccgcagcttcacagaccagagcaccctgcaggaggacgagcggctgggcctgtccttcatggacacccatggctacagcacccggggagaccagcgcagcggtggggtcactgaggccagcagcctcctggggggctccccgaggcgtccctgtggccggaagggctccccataccacacggggcagctgcaccctgcggtgcgtgtcgcagaccttctgcagcacatcaaccagatgaagacggccgagggttacggcttcaagcaggagtatgagagcttctttgaaggctgggacgccacaaagaagaaagacaaggtcaagggcagccggcaggagccaatgcctgcctatgatcggcaccgagtgaaactgcacccgatgctgggagaccccaatgccgactacattaatgccaactacatagatattcggataaaccgagaaggttaccacaggtcaaaccacttcatagccactcaagggccgaagcctgagatggtctatgacttctggcgtatggtgtggcaggagcactgttccagcatcgtcatgatcaccaagctggtcgaggtgggcagggtgaaatgctcacggtactggccggaggactcagacacctacggggacatcaagattatgctggtgaagacagagaccctggctgagtatgtcgtgcgcacttttgccctggagcggagaggctactctgcccggcacgaggtccgccagttccacttcacagcgtggccagagcatggcgtcccctaccatgccacggggctgctggctttcatccggcgcgtgaaggcctccaccccacctgatgccgggcccattgtcatccactgcagcgcgggcaccggccgcacaggttgctatatcgtcctggatgtgatgctggacatggcagagtgtgagggcgtcgtggacatttacaactgtgtgaagactctctgctcccggcgtgtcaacatgatccagactgaggagcagtacatcttcattcatgatgcaatcctggaggcctgcctgtgtggggagaccaccatccctgtcagtgagttcaaggccacctacaaggagatgatccgcattgatcctcagagtaattcctcccagctgcgggaagagttccagacgctgaactcggtcaccccgccgctggacgtggaggagtgcagcatcgccctgttgccccggaaccgcgacaagaaccgcagcatggacgtcctgccgcccgaccgctgcctgcccttcctcatctccactgatggggactccaacaactacattaatgcagccctgactgacagctacacacggagtgcggccttcatcgtgaccctgcacccgctgcagagcaccacgcccgacttctggcggctggtctacgattacgggtgcacctccatcgtcatgctcaaccagctgaaccagtccaactccgcctggccctgcctgcagtactggccagagccaggccggcagcaatatggcctcatggaggtggagtttatgtcgggcacagctgatgaagacttagtggctcgagtcttccgggtgcagaacatctctcgggaggggcacctgctggtgcggcacttccagttcctgcgctggtctgcataccgggacacacctgactccaagaaggccttcttgcacctgctggctgaggtggacaagtggcaggccgagagtggggatgggcgcaccatcgtgcactgcctaaacgggggaggacgcagcggcaccttctgcgcctgcgccacggtcctggagatgatccgctgccacaacttggtggacgttttctttgctgccaaaaccctccggaactacaaacccaacatggtggagaccatggatcagtaccacttttgctacgatgtggccctggagtacttggaggggctggagtcaagatagcggggccctggcctggggcacccactgcacactcagggccagacccaccatcctggactggcgaggaagatcagtgcctcctgctctgcccaaacacactcccatggggcaagcactggagtggatgctgggctatcttgctcccccttccactgtgggcagggcctttcgcttgtcccatgggcgggtggtgggccaaggaggagcttagcaagtctgcagcccagccccacctccatagggtcctgcaggcctgtgctgagaggcctggtgctgcctggcagagtgacaaaggctcaggacggctggctctgggggactcaggccaagccccttggcaccatcctggcttttggcagggatgagtgaggccctgcagagagcatcccaggccaaggttcccactcagcctgccccctctgcatgtgggtagaggatgtactgggacttggcatttaggattccatctggcccagcccctgaaggtcctggggaagcaggtctcaattctgaatagccagtggggcacactgactgtcctccccaggggaactgcagcgccctcctccccactgccccctgcagcccctgagatattttgctcactatccctccccacttgcttccctgatatgtgctctgagcttccctgaaccaggatctgcctattactgctgtgccccatggggggctccttccctgcctgacccactgttgcagaatgaagtcacctcgcccccctcttcctttaatcttcaggcctcactggcctgtcctgctcagcttgggccagtgacaatctgcaaggctgaacaacagcccctggggttgaggcccctgtggctcctggtcaggctgcccgttgtggggaggggcagtgttagagcagggctggtcataccctctggagttcagaggaagaggtaggaccagtgcttttttgtttcttttgttatttttggttgggtgggtgggaaggtctctttaaaatggggcaggccacacccc
